United States Patent Application Publication US 2007/0054278 A1 - sequence listing, part 79

SEQ ID NO: 96335 - DNA, 14357 bp, Homo sapiens
  misc_feature (1)...(14357): n = A,T,C or G
tccagtctagctgttctaacttgcggtggagccaggacagggacttgatccagacatccggggagaaggtctcagcattggctgatacaatctcacacaggagctccaggatatggatcgctagatccttcctatccaaagagaggcaccgcttctccttgggaagctgccagtatttgctgaagcggtccaagagctggcacaagctgaagaggagtggaaacggggagcaggtctggagccagtattcctctcggcacgcgtttgcctctagagtctggatgaagatcctcagactgaggtctacctcttcaacatctaacctcaagaaaggcaggacaaattccttcagcacctcgtctggctcaagaagagcagccactggaatcccttggggtttcacgggactcatcaggcagttcaggagctctaaaaattgcttttcttccttgggtgtagagaacttcatccagacggtttctttgaggcatgacaccatgaaagtggcagatgaattgggaccctgctcttccacaaacctaagggcagggaaggcagtgagaatctggcccaggaacttgtgggtgccgagattgaccacagccaggctgcacattttcttcaccgtgacttccgggtgcactatgaccaggcgggccacggaggccacagcttttgccaagccctgttcggaggcactctgagtgagctggttaaaagttgtattgaggtcttcctgaaaaccctccacataagccagcaacttttcagagaggccctttcgcccccaggaacgcaggatacctgcaaggactttatttttacctggcagggagaggtctgcgtaacattccaggatcaggtggatcacctgccggatctgagactcagggatggctctgtcagctgtgctgacgtctatcactgtttccagcagcctcaacaccaagtctggctctcggaagagggccctgttactccccaggcaggctacccactcgtccgagaaggcccacttcttctcagaggcaaaaatgtagcacacttccatatggcggtccatcttctgctggatgacggccatggcaatggaagctgtgatatcctccaaggccctgttcttcagcaccgtgctcgttttcctcaggaagtccctgacacactccgccagctcagagaccacctgcctgtcctccttggacaggctggtgcggttcaggtagagcgtcgcgttctggctgaaggaagtcagactgtcgcacagccggtagctgtcgtaacttgtcccctggctgctgcggagcacggcctgcaactcctccccccactcccgcagcaggtggtgcaggaactcgcagcccacgaaaatggtctcactggggagtttggccagcgaggtcaggctgacatcccgttctgcctccttcaccttctctgccagcgcctgctggtggtagggattctgggtgtccgagttccacacagagatcaccgtggccagtttgtccagatacacggttgcagacacctcctgggggtcgtcctctgtcagcgcaaacacagtcagcatgtcagccaggttggccagcgcacagcacttcctccccgggcccaggatccgactctggatctgtgtcagcccgcggagcagcatggccaacaggggcatggtggggcacgcgtctgggtctgacctaagcctctttggaggatgggggaactcatctaaggcaggcaggtacttatgggccattgcactaaactgggagagcagggggtcctgcgggtgacccttgtgcttcatcacctcccaccagacgtccaggaagaaggccacgtcttcggcagaagtgtcaacggtcacatgttccagaaagcgctctagttctgcatggcagatggtggtgggcagggccatcaggagctggataaagagtccagaagcttccagggatttgagcagctcgaagaggatggtgtggttgatggtggggatcatgttgcccaccgagaagaacaggtcttcctgccaccgtgtctctgtgtcggacggggtcacggggtgcggctgcagaaccttggcccagatgatgatcagggctttcttcttccaggcaaagggctgggagtgtgctgcagccgaggagatctcccttaaggcctccacgatgggccgtccaacacgttcccagtcagactttgttaattctgccagtgccttagggtggaacagctgctcggccagcaagaagcctccatgcagaatagtcatttcttcacagatgttcaagggtcctgcacacagacaagccaaataagacagtatagtgaaaatgtttccagatggccactgctgttagtaggctgtcatggtttgagatgacaagggttttaaaggacatcagcggacggggagaagggatgactacaagagccactgcacagctggagtcagaaggacttggccgaggaatccagaatggcttccgagctctccagcctgggaactgggaggccaccaggtgacatcacatacagggaatggaggagaatcagagcaggtgtgaggaaagatgagttcagctttggccatcaaggtacagatgtcctccagcaacggaaatgccaggtggaagttcaggagggaagtaagctgggaaatgtgattctgagaggtatctgcccagaggggatcaccggaaccaagacggtgaatgagatccttcaggaaaagtgtgtgaaaagaaaaagctgggctgctgaggcgagaccctccagcaaaggctgggccagcagaggatgtggggagaggggtttagaaataggaggacagtacaaactacaggggccactgagcatgtaccacaggacatgacagctgagcttctcatgacagatgaagggagcatagccacagggtaatgggcacagagcaatcacacagccacagggtaacaggcacagcagcaatcacacggccacaggataatgggcacagagcaatcacacagccacagggtaatgggcacagagcaatcacacagccacagggtaatgggcacagcagcaatcacacagccacaggataatgggcacagcagcaatcacacagccacagggtaatgggcacagaagcaatcacacggctacaggataatgggcacagagcaatcacacagccacaggataatgggcacagagcaatcacacggccacaggataatgggcacagagcaatcacacggccacagggtaatgggcacagcagcaatcacacggccacagggtaatgggcacagagcaatcacacggccacaggataatgggcacagagcaatcacacggccacaggataatgggcacagagcaatcacacggccacaggataatgggcacagagcaatcacacggccacagggtaatgggcacagagcaatcacacggccacagggtaatgggcacagagcaatcacacggccacaggataatgggcacagagcaatcacacggccacagggtaatgggcacagcagcaatcacacggccacagggtaatgggcacagcagcagtcacacggccacagggtaatgggcacagagcaatcacacggccacagggtaatgggcacagcagcaatcacacggccacaggataatgggcacagcagcaatcacacagccacagggtaatgggcacagaagcaatcacacggctacaggataatgggcacagagcaatcacacagccacaggataatgggcacagagcaatcacacagccacaggataatgggcacagcagcaatcacacagccacaaggtaatgggcacagcagcaatcacacggctacagggtaatgggcacagagcgatcacacggccacaggataatgggcacagagcaatcacacagccacagggtaatgggcacagcagcaatcacgcagccacagggtaatgggcacagcagcagtcacacagccacagggtaatgggcacagagcaatcacatagccacagagcaatgggcacagaaggaatcagacaagccctgccttcactctttataaacttgccttgggaacaggcttcaaacattcttctagctttcagggaaacggtccaccccacagctccttccagtcaaaaacaaggtactcatggccctagctctgtgggagaaaccagggagtagatacagaaaatactgtgctagattaagccttccttcagggaactaacgattgacacagacttaccatggaaaacatcttgggatgtttaatcagacatgggtttaaatcctagttcagccatttaaaaatgatgtgattctggccaggttcagtggctagcacttgtaatcccagctacttggggggctgaggcaggtggatccctgaggccaggagttcaagactagctggggtaacacagtgagactccccctccatctccgaaaaaaaaaaagggatgtgatcttggtcagattgcttctccaagccttccttctgcatatgtggggataatacagacttcatgttatgcctttggggatcatgtgatatataccagtcaagcccttgctagtgggttggcactgctatctcctgaccccatctccccgggacgctatgatggataaatgagatagagctacagtaagaatccagttacagagtctaattaggtgctcagtaaatgttggtttccccaaaccttttcatggttggcaagaccagaatcttgtcactattctttgcctcccccagctcagaaacatcaaaggatgtaggtctttatcaggtatgtttcctttggcccagaaactaaaacgagggtgcaaacactgctccctattcctcattcctgagtcatctcccctttcccaggagtgagagatgctactccttcctcagtctgtcatgcccccaagagctcatattccccattttcacaggccagacaccagcagagaaaacactgactccaggagactaaggaccatcttacccctcccaccatttatgggagcggcagcaggccaagggctcagcactatgtaacccacttgtggaggcaatccatctcatctcacagtggctgagaccgactcccagggagggttacgctgcgaaggggacctccctgggggttaccgcccttctttctggctcaggaggctctcccagggtcccaaaatatagtccctcctgacgctgtaaatttaattttattgcattattggcttagttgagcagatgtttggccctaaacacctgccttccaggcgcattaagtacgcacagtttgaagtagtaagtcccagggcggttactagctggaaaatactccggtactctatcatggatggttaactagtgcttgccacagcccgcttcttaggtttattaagcacctactccatgccagacactgtgctaggtggtacacaggtaagatctcttctattcacaatcaccttttgaggactagtattcctgctctagagataaggacactgaggcgcagaaacgatttgctgagggtgtcccagcctgaatgtggtggggctgggaagcaattacggctgaggggctccaagcccttagagctctgccattccgctcctgaaaagctgtctgggggcggggaccagaccatttccccccagcctactactgctgacacatctcggggtgcctcacccccagctctcccagaacagcctcctggtcttagcagcgtgtgccaagatttagcagggagcatctagttcctatgggctccctcccagaccttgcctgtaagattctgaatccggacgcacgcaggttcacaaagtgatacctcaggagcgcagccgcccccaccgcgggtgtgacccgcgcaaccccacaagggacactgtacctcggcgatctcaatgcaaagtcgcccaaaactcagtggggagacacacttccattctccccgctctgtcgatgaggaaacgtcatgagcgtaagacacttggagcgttaagacacttgctcaagaacgcagctgccgttcaggaaatgaggccgtcggggcgcccaggggtgctcggagggagcccgtttcccaaagcacgtgcgcgagccccgggcgcttccaagggctctaacttcacgtctgctccgtgttttcaagcgcagggggccggaggcggcaagacgcggcccaacgcgcggcgggacccggaccaccccccgccaaggccaccccgggacccctagacccgccccgacgcgggggacgtttcggtccgggcccgcgcgagcgtgcgcgacargaggagacgcgacggggcagcaccgctctggtggcgcattgctggacgcagccckgggccggggagccgcggcacccacctaggtccatggcggcgacgccggcggctgcgcggggctaacgcccccycccctccgagaactcgaacgcggcgcgggacgcacggcacgatgggagacgcaggagccacggcggccgcgsttaggcctgctcacaacctccgcccggccccgcccacagcctccgccgcgcacgcgcagtyctcackaacgagcgcgccaagcgcacagcgccgccttccggcagagccctcccaccrgccctcaggtacccggacgtcgctcactagacccctccgcaccgtcccctgcccggcccctcttccggggtcccagcgggtcgggctcatgattccccggccccgcattcaccctcacccggtaaccccgggcgtgccccgcacacagttcacccccaccgagcgcctcccccgggacgcccaccacccagcgcggccgcaccacgcgaggcttccactcccacccgcccagctcgcgccacatacagtccctcaacgcgctcctgccgcgccgccccctccagacagcagcgttccggatcctagacnctttttgacggctggtcctccccagaaaatgcgccgtgtgagcccaaacatggtggggtttacgctggaccccgagcttgcaatctgtgcttgacaaaacacaaacatcgcgtgcctgtctcctccccctgagatcgagtagtaacagccactccaactctccacctccagcttctagcaccagggaccgcctccaccaccccatgtgccaagtggagttcgagctgcgcggccctcaagcagctgaagggtcccgtgagcgatcaggagaagctgctggtctacggcttgtacaaacaggccacccagggcgactgcgacatccccggccctccggcctcagacgtgagagccagggccaagtgggaggcttggagcgcgaamaaaggggcgtccaagatggacgccatgagrggctacgcggccaaagtggaggagctgacgaagaaggaagtgggrggcktggagcgcgaacaaaggggcgtscaagatggacgccatgaggggctacgcggccaaagtggaggagctgacgaagaaggaagtgggrggcgtggagcgcgaacaaaggggcgtscaagatggacgccatgaggggctacgcggccaaagtggaggagctgacgaagaaggaagtggggggcgtggagcgcgaacaaaggggcgtccaagatggacgccatgaggggctacgcggccaaagtggaggagctgacgaagaaggaagtggggggcgtggagcgcgaacaaaggggcgtccaagatggacgccatgaggggctacgcggccagagtgaggagatgaggaagaaggaggctggctgagggctcctcgggaatggaaagggcttcttagaccttgatggctgaaatgtcctgaaactgtcgcaagcttagccgagacatcaataaatcacttaaactgcatgagagtgactgctgttggaaaggagaaactcrgtgactgagtgctggggaggcgtccaaatacacagactaactttttgtatggttttgggtggagttcccagctctcctattacaagagcgtatgtaggtatttggaaggacgagggggacagtgtgctgtggaaatgcccaagatctgagggcaggagaccattctccagtgacagcctcttgggaggttgaggccccagccccttatctcttcaaggctgattyactaataccccagcaccacagaggggagagggactctgtcctcctaaacactaaagtcaagtccaaaagcccccactggaacacagggcctacccggttcatgttttgagggagaccaagctttccgtgatgataatgtgatgaaacaattgatgcgccagaacacagcagtttagaaacaatggagcagatggtgtcaaaatcccagccccagaaaggctcacctaaggccgggcaaccaaaatgttcccgggactattctgtacttaaccctggtttctgcttaggggacggtgggacaatatgcatatggatgtctatgtgggatttgttgcaagagcacaacacaccccttgacctatgcaagtgccagagtgtctgagcccagcttctactcctgttaatgatcacaggagcctcatacacaaccattgtgcatggcggctggagtatggagtagtaaatggtatccagaaaggcaggtctacggtggcatatgggatttcctggtacttcttctttaatagaaactatcttcacagatcatgacatcaggtcagctgcagttctcactgggaccaataaacaatagaagcaacaaccataaagacttaagaggacaaaggaaaccaaacctcactgtgtgtcttcaagatctgttcacatagttgcaggaagttgctgtagacaaagtacattactaaagaatgaagcccacccaggacatcacagcaacgaaagaactatttctggtaactgtggaccaggtgagagccacactgtagaacagcagtgctgccctctcttctttggcgaatgttatgaagacattctgatgcacttaggatcatgattcatgttaaatgtaaattaattgtaaaaataatacatcttgctccaaaatgtggtgacaatttagaagctgtccacatagccagaccactctgtaaatcacagaacctagaaagtaaaaatgtgccataattaggacagcagaaagtaacagtaaaataaagttttaaaaaaaaaaacagaaaataaggatttatctatttgtatttgcttaagaagaggttacctataggatgcagggggaatgggattgatgggcatggggtatactgtgaaaggaaaataaaatcttgggaccaaattcactaagcgaaaaggaaaagttaagcttggaaattgagtcatggaatatgcaaaaaacttccttttgttcctaaacagataagctacaagacagaaggccacatatctccccaggtggtctccctcacctgacaatataaattaacagcttatcttcataggtaagggacaaagacaacaccagaaaccatccctcaccagccgagacaaaacatagatgtactgagctgaatgcataactgttcctctgcctgctgctttcactgtaacatatagatttggtgagcagtaaatgtagatttactgagctgaatgcataactgttcctctgcccgctcctttcactgtaacatgtagatttggtgagcgctaaatgtagatttactgagctgaatgcataactgactgttcgtctgcccgctcctttcactgtaacatgtagatttggtgagcactaaatgtagatttactgagctgaatgcataactgagtgttcctctgcccgctcctttcactgtaacatgtagagttggtgagcgctaaatgtagatttactgagctgaatgcaaaactgactgttcctctgcctgctcctttcactgtaacatgtagatttggtgagtgctaaatgtagacttactgagctgaatgcgtaactgttcctctgcccgctcctttcactgtaacatgtagatttggtgagcactaaatgtagatttactgagctgaatgcaaaactgactgttcctctgcctgctcctttcactgtaacatgtagatttggtgagtgctaaatgtagatttactgagctgaatgcaaaactgactgttcctctaccccctcctttcactgtgacatgtagatttggtgagcgctgatcaaagcctaataagaatgtaaccacttatctccctacctaccctcctgtatttttcctttccctcttccctcccttcctgctctttcccttttaaatacttgttaggaataatgctcaaaatcctaaggaaatagaacactcgaacaaaggattcttagcaaagcaattttacttctgtgcagaggggtgcctccttggccagttgtcatgagagcacacctgaacaaaggggcacgagagcctttgttcctgacacaagtcctgcccctctaccctttccccattggccggggtcaggtcgtacaatctaaactaatcgcgcttggctaaacatttgatttttttagatagggtgggcccgtaaaagaaagcggagaggaaggggaaggggtgtctgtaatgagctagaaagttagtcctctttccaaataaggaaaggaatgtgagctggtactgataacgcctggtgctgtggcgtgcctgggcatctcacaaaggcaaaaagggaaaaggagaaaaagggggcggggcgctatgaattaaagaataaaagattgatcagattatttgaagagaaacgtcgtcatatcccacatactgaggccctaaaaatcctctctggaaagtgtgcgggggccacagatctgtggttgtgtctcaggcacatcctcagccttggcaaaataaacctctaaatgggcgagacttgtctcagacacttacccggtttacaataccttttcatattgttttcatttttgaaccatgtggctctattgctttatataaagaggatgaggcaagggcacttctttattatcattgaagtcagagtaaatttactattgatttcccctgaggttggggtaagaactcttagaacaaacagggaaacttctcaactcttaccctgaatttcaacggacacgttggaggtctcctgaaaactctggctgctaagtcacagcggcactgagtggcaggtgagagagccagaaagccacatgaaggagcactcaccgtccctaggtttgttaattccggtaacatgtcagacggacacggacttcagacagtcctgcaggctaactaggagagctctggcaacacggccgttctaagtcttcccggagatttaactcaaggcacacttgtatttacatgtaggctccacaaccccttgattcaaaaaaacaactctggagaagctgaagaactttccaacttcatctgtttgaaacaacagcttgcagcctgaacaacgcagtgagacggtcgctacaaaagatcaaaacgttggctgggtgtggtggcacgtggctgtgggcccagccattcgggaggctgaggtgggaggatctcttgagccccagaggtcaaggctgcagaaagccacgatggtgccccactgcactccaccctgcgtgatagagcaatgtctcaaaaaccaaaaatgaaacaccagcttgggcaaagctatcttcctcatgccattttctaattgatcatatcccccagatgtgggaaactaatcacttttgtttaaaattagtttttgcggatctaatgggcgtctaaataatttttttttttttgagacggagtttcgctcttggtgcccagctggagtgcgacagcgtgatctcgcttcaccgcgacctccgcctcccaggttcaagggattctcctgccttggcctcctgagtagctgggattacaggcaggtaccaccacacccatctaattttgtatttttagtagagatggggtttctccgtgttggtcaggctggtctcgagctcccgacctcaggtgatccgcctgcctcagcctcccaacgtgctggcattataggcttgagccgccgcgcccggcctaaataataatttttaaaaattactcttttttggtttagaattacttagctgaactgtgcagaagcaagcttctggatgccttgataaaaagccaaagttgtacactagagggctttaggatgaataaaatgttaaaaaacgccaacaggacgaggtggctgatcacctgaggtcagaagttcaagaccagcctgaccaacatggagaaaacccgtctctactaaaaatacaaaattagccatgtgtggtggcacatgcctgtaatcccagctacttgggaggctgaggcaggagaatcgctcaaactcgggaggcagaggttgcggtgagccgaggttgcgccattgcactccagcctgggcaacaagagtgaaactccgtcttaaaaaaaaacaaaaacaaaagcaaaaacaaaacgcaacaaagcgagacatgacaggcaatgaaataaataaaaggaggcagatctcctaaagccaaaatgtcctatgcagacaaacagcattactgttcaccctgcatggtgcccactatcatgcacagttgtatatttaggagaaaaacgttttggtacgccaaaatacaagataagcagataaaagggaaacctgtgtgtgttatttagttattcggtacttatataaaccacttattttactacaacaaacttcgagggccacattatagcagcccaatacactgggaaaaggagtttcttttcacaaggacaatattactagagatgaacattaaaaattacttaataatctaatagaaaattggaaaattaacatacattctaaagagaagcagaagtttacctggttattcaaagttcatataataatttccacatgtataaaaaaaaagagaagggcacggtggctcacacctgtaatcccaggctgaggcaggtggatcacctgaggtcgggagttcgagaccaacctaaccaacacggagaaagcccatctctactaaaaatacaaaattagccagacgtggtggcgcatgcctgtaatcccagctacttgggaggctgaggcaggagaatcgcttgaaaccgggaggcggaggttgcagtgagccaagatcacgccattgcactccagcctgggcaacaagagcgaaactctgtctcaaaaaaaaaaaataaaaaataaaaagaaccaattacctagaggagggccatatatataacttggtttgctttgaaactcaagactgcttccctaggatatggaattcaagctgaatgaaaagttgtagagctggatgagaatttatttctctccgtgaaggtataatagcatcacccctataagaagataagctcaaatacaaccaaaatttcgatgccctacgccctgccagtaagggaggaaagcagaggttacgatttacaagtaattctctatgtgttctttgggaaccaggatcctctgagtcaatcccttccaatctcctaagtttatttttaaaaatctgaacctggccaccactttacatgatgagacttagagactggtatcacagcttgatttcagaagcttactttcaaaaaaaatttattcaatgaatacacaatataattccatttcgagtgattaaaacctatttgttgtttagaaccaaacaaaactacaagaaaacattttcaaaaccttttttttcaggctgaagaaatcgtttaatccattttaaagaaatctcacatgatgttctgtcgggattaaaaatatacacggaaaaaaataaaacaaaatatatacacagaaagaagctcgcacagagtcaggcgtgcagcaacgtcacacactcattcctttctgtttcctctggacactcaaaatgtgaaagcaagtaagaggggggtggttaaccaaaccttttggtccaaggaataaaatttctttaaaaaatttaaaacgtcaaaacctgccagaataagacaatagaagagcgtatcgtcaggcgctgggaatggcaccacgacaaggcattaatgtggattcacttgcacagctgctctcataaaagctacacgattcagaggtaaccctaactatccgcaatcccaaccaaagtcatgttcatgccgctgtcctagtctggacaatcatctgtcactcatccaacacagttatatacagaatgcgcagtcccagcaacagtgtagattacagcaggcgttctctacctggactcatgattggatttcatttctaaattacatcagagctttcaaagattgaaatacacaaatctgcactacccaagcctccttgcctgtacgggaaacaaatcagaagagca

SEQ ID NO: 96336 - DNA, 16447 bp, Homo sapiens
aacctgtgaggcggaggttgcactgagccaagatggtaccactgcactccagcctgggcgacagagtgggactccatttcaaaaatatatatatatatggaggaattaagggggtacaagaattctaaaatatacaaatcatcaggctcaaggaatgtcccttgcacatcatgtggtttcccaactcctcaatccactgttatcaaaggtctaatggaaggcaaagggagccacacactgctcatctctattacgcaacccctcaacccccgctggctctcagggaagggaatgggttcagtttgttcagcaaacattgactgagtgttgtctacttctgagcgcctggctggcattaccctaggtgctgcatctgccctgtgggctccagctaacaggctggcaagagagacctgcatgtaaaataaagggaaattgccacaagagggagttgagaggtcaccatggaaaggcaggaaagttcaactggcccaggacaggcttcaaggacaaaacactaaggctctccttaaggcaatagagagctggtgcaggaaaagactcagcaggagtcattgcaatgctatttgaataagtgatggagtgggcctgagggaagagggagttagggaaggtcacacaggaggaggcctgcctggggacaaagggatctaggcaattgtctcctgaagcgctctcagccaggtttatggttagaaagctaaagtactctgtgctatctcccaatcaacaaaccctagtggctccacacccacattaataaaggcacaaactctcctatgtatacaatcttttctctgcttctagactgtactctcctgggtggagagaactaagtcttttccttcattaagtaaactaatagaaaacagggacccctcaaatgttagtttccatcttcttgattgtcctctcccctcccccagggacttgcacagaggcattacataaacatttgttaaatcaatcaatgatttgcaggtactggaaaaaatgctgcattctacttacatttgatttgcatcaaccaagaatctgtagtaatgataatagatttgcaaagggtgtttttccttctcatttattatcttatttgaccttcacaatagtattagaaattagcctaaataggtatttattcattcttgttttcaagatgaggattcttagctgaaagaaggtgaactaattgtccaaaattacaaaggtgacatgggaacaagcctagatcactgactttctgactttaggctacctcttccactgcatcacaggtccgtgtggcatttctcactatttctcatcattgacaaaaattaactgcagctaagataaagacagaaactgaaaatatacaaccataagaatacaagaagggggggtgaggggcgggcacagtggctcaagcctgtaatcccagcacttgggaggccgaggcaggtggatcacctgaggtcacctgaggtcaggagttcgagaccagcctgaccaacatggtgaaaccccgtctctactaaaaatacaaaaattagccgggtgtggtggtgcatgcctgtaatcccagctacttgggaggctgaggcagaagaatcgcttgaacccgggaggcagaggttgcagtgagccaagatcgcaccattgcattccagcctgggcagcaagagcaaaattccatctcaaaaaaaaaaacaagaataccagaaggggctgggagcagtggctcacgcctgtaatcccagcactttgggaggccagggcgggtggatcacgaggtcaggagatcgagaccatcctggctaatatggtgaaaccccatctctactaaaaatacaaaaaattagcccggcatggtggtgggcacctgcagtcccagctactcaggaggctgaggcaggagaacggcgagaacccgggaggcggagcttgcagtgagccgagatcatgccactgcactccagcctgggtgacagagcgagactccatctcaaaaaaaaaaaaaatatttatttattattttagagaataagttttgctgtatcacccaggctgaagtgcagtagcacaatcatgtcttactgcagcttcgaactcttgggctcaaacaattctcccacctcagcctcctgagtagctaggactacaggcacatgccagcatgccgggttaattttttaattttttgtaaacagggtctcactatgttgcccaggctggtcttaaactcttggcttcaagcaatcctcccacctcagcctcccaaagcactgggattacaggtgtgagccacctcgcctggccaaaatataatgtttttattgtgaatcagattatttattctatggtattttagtgttggttatattcttatattttatttatataatttttgtttgttaatctgacatctggtcatgttgctgaactccatagttttgatacattgtcaatcgtttctctttgtaagatgaatatatatgaaatcaaggaggctttagggtggccaggagctctcctaaaatcttagttttaatagtaaacatccctggcttgttcctagcaaagacagaaatgtttcaaatattttcccataaagcatgacttttgtctcaaaagctgaaagataagtgaaaaagagaaaatattttaaatgcagacgacaaagaatagttattatccataacacagacaggatttctaccatcaataagaaatatacaaatgatctacctttttttaatgggcaaaggatatgaacagacagtttacaaaaacaattaaaatggtcaaagagcaataaaatagtcccacctatttggaaggctgaagtgggaggatcacttgagctcacgagttggaaaccagcctaaggcaacaaagcgtggagacccatctatttatttatttatttatttatttattttttgagacagagtttcgctcttgttgcccaggctggagtgcaatggcacaatatgggctcactgcaacccccgcctcccgggttcaagtgattctcctgcctcagccacctggtaactgggattacaggcacgtgccaccaagcccagctaatttttttgtatttttagtagagatggggtttctccatgttggcccagctggtctcaaactcctggcctcaggtgatccgcccacctcggtctcccagagtgctgggattacaggcgtgagccaccgtgcctgtccagagacccatctcttaaaaaaaaaaaaggcaataagagaatattaacttcactattaatgacatgaaaattaaaacaaatactatttttcacccattaaactagtaactgtataaaaaattcatagcatacactaaacattgccaaagttgtaggaatagggaacattcacacatggttctgagtaaacatgggagttgttacaaacttttacaattcattttcacagaatctattaaaatttacatatccggccaggcatggtggctcaatcctgtaatcctagcactctaggaggccgaggccaatggatagcttgagcctaggaattcgagaccagcctgggcaacatggcaaaaccctgtctctacaaaaaacaaaaaaacaaaaaaaaaactacaaaattatccaggcacagttgcccacatctgtagtcccaactacttgggaggctaagatgggaggattccttgagcccaggaggttgaggctgcagtgtgccctgactgcaccattgcactccagcctgggcgacagaccaagaccctatctttaaacagaatgaaaatagggccgggtgtggtggctcacacctggaatcccagcactttgggaggccaaggtgggtagatgacctgaggtcaggagttcaagaccagcctgaccaacatggtgaaactccatctctactaaaaaatacaaaaaaattagccgggctggcagcaggcgccagctactcaggaggctaagccaggagaattgcttgaacctgggaggtggaggttgcagtgagccaagattgtgccattgcactctagcctgggtgacagagtgagactccatctcaaaaaaaaataaaaataaaaataaatttaaataaaagcacatatcctatctataaatccttataaatgcaaaaggtaacttttttttcttttttgagacagagtttcactcttattgcccaggaaaggcacgactctcgcctcaccacaactcccgcctcccgggttcaagtgattctcctgactcagcctctcgagtagctgggattacaggcatgtgccaccacgcccggctaattttgtatttttagaagagacgcggtttctccatgttggtcaggctggtctggaactcccgacctcagatgatccgcccacctcggcttcccaacgtgctgggattacaggtgtgagccaccctgcccggagcaaaaagataactatttaaggatgttcattattgtattgtttataaagcaaaaaaatctgaaacctaaatgttcatcaagatgggacaaggcacacacataaactggaatactgtgcaacagttttttaaatgttagctgactcagatgtctaaaatacactgtatggcgcattacaggtgctcaataaatactggttgaaaagatttttgtatgaacacagaaaaaagcctaaaagcatatataccaaactggtaagaatgattcccttcaggagcatgggataagtagagggggagaataaccattttgtgtcttttatacttttgcgttgtgtcgatttgtaaaataagtaggagctaattttcaaaaaagatttaaaagacttattcctggtgatgtttctttatctctctctttctccattttgtctctattttagaatgatcctaaaacacaaaaaacgtactttcaatggcccaaatcatggagtggctcagggaaatgaaatctgtctacaaaaaaaaaaaagttgagaatccttgtctttttttcatcatacagttttttttttcttttggtatcaccattacttctcctaaagtcacgacataatatcacctacagcagaaatgaggacttcagtggaattgacatctccttccatcaagcgcatttgcagtccatctttagcaggacctctctctaatggctaaggctaggcagaagaatttgaagacagtctggtttccattttcctaatgcagcctggcccaagagccaggactcccataagactagtctactgtgggagtcagggtcttttccacgtgtggaggctagtgtttgatgctggacggcctggagtaaagggcgaaggggagaaggtaaccaaccaggctggcctcgggattcgcagaggagggctggggctttgacttctgcagggaggtgagcagtgtggccaagggctactcaaggaacgcctctgcgagaattcagactgtggttgagcgcacaaagcaagagtgtgcgaagaaaagttaacgcctctcccagctgaccccaaaatctgctaatctgggcctgacggaaaaaattcggagaagaaccacctcggccgagttacgtgaaaaggctgggtacgaactactctggctctacttggggcgccggctcagagcgatgggcaggacgtccgcgaggaagaaagagtgacgatgatttttcaaggagtctgaaccagctcacccagcaaaccctcctcccatcgagcacccagcgtacaatcatcgaagggccgagggtcctgccctcagtctcgatggcggccggggcgcgccccggccacggcgcacgcgccggcctcagcgctccctcctccatgccctcggcgcacggcgccgcccactcacccagctgcacctctccgtgcgtccccaagctcacccgctctgaggctgcccccgctagtctagctgccgagcccggaagtggatgcagccgctcggcggagaggacgagggggagggggaagtgcttccggggaaacgggccggggttggtgtttgtaaacttgcctcggtcccggtgggggcagccgcggcggtggggttggcagggtgtgctggggcctggaggaggcgccgcgcggccagggagccagcgggaggccgcgcctggcaggtaggagcaagccccaaagaccgcagcgtcgtccgtacagacggcagcgcttcagtagctcgcaagccgtggggtgccgcgcgggaagggggaggggaggggaggaggggcgcgtggcgaagggagggggatctccgggggagggaggggaaaggccgtgcgcgcacaccgccccctgcccgcgcgtcccgccgcgtccccggcccgggagagggctctcggaggggacgcgggcgcgagcacgcatctcgcgcgcttctcggcactctccggctctgctcccggttggtgcagcgggtgcagaggctggctggccggagygaggcgggcgacacgccgcgccgggcttcgcctgcctgtcctccacctccgcagcaagtttccctaccttcgggcggacggggagaacgcacacgtgtgggcactgccagtcccgtttctgcccgccaccgaagcacccagcgatggcccttgagctttcctccaccctagtcttgccgcctctgtaaagtgcgagcttttcgggccggcccactgggcacaaaagccccaaagggtctccgcccccttcttccattcctgagatggcaaatccaagcaactttccttttggcagagttcctccataggaggccccaattacttttgctcctgttggcttccactccttrcccaggagaccagttcctcctattgacctagaaagaaaactcttcttgactcatgtcctcgttctgagcttcacagagagcgcccagcaaaaaaaaaattcatatcgcacgttgtaatggcctgaagatgttgcatttagcagcccccctcttcctttctggtttcaggtttctgaaacagatcgtgagcttcatcaagagaattcaactggaaaaccaagactggtagactctctttttcttcagacaataggcaggagccaggcrgagtccagggattcttggaacacctatcttttcttcggaggacactaagttctatttgaagacaaagttcaatatggcaacaggactgatgggacacgaaggagtcgctaccgtgatttggtgacagttcttcaaaacgacagtgtctcaaggaaaggtggacctaggaactcctgaacttttgggttgccttaagtgagaaatcagcatggctcaggtaaaaagctctagagtcctcctccaagataactgggaagcctgtttgcagtttcactcttgaatgctgccttagtcaacatattgaccaaccccagtgatccaagctctgtattaagcaccagggggagatctagaggaaggaaaggagacaggccacagcccctgccttcagggagcttccagtcaaatgaaggaggtaggctatactgcatcacaggcactgatgggacatttgcaaagcaacgtgtactcagtttacatttggtacattaagtgctgaggggtgtaagggagtgaatagtacggtgaatgctkcttttgtttttttccaacaggaatttattgagttcctgttgcatgcaaggcattgtgctgggaatacaaagatgaatacgattgtccttgtccccagtgagcttccaggctagttggggtcgggagagggatggaaagccatttatttttatattcacaatgccttgtatagtggctggctagtagtagagactctgaatctgttgattgaggaatgtgcaataataggggtatgtacataggagagaacagtacttctgcttggatagaaaaagaagatggaggttgaaagatgcataggattttgctaaacaagcgagaagggtgtttggacaaaaggaacagcatgggcaggagcttagagtcatgggaaaatgtgatgaggttccgagtactgcaggttgtttgatagttacggagtaagggatttaaatggggatagttatggaggtagtattgacagtgataggtgaggaagttgttccctgcagtaagcagagtgtaacccaaaggccttttatgcctcgctaagttaagcagcagagtagcatcagatcagtgttatgtagaaggtcattattgtggaggtagaggatggactggagagacagaatgagcagataggctgttgtagtcatctgagtagaatagctatgtgcacacatctccagagcttctcccagcttgcttctagggaacctccctaccagtctcaccaggatggcagtctgattgtagtataattggctttcctccagctgcttctgaatgcacagcttcctcctttccatatagaataggagcctgtcagtttcttcttcctttgtgttttgcaacccacttctcagcattgtattcagtcttctgagaatgctgccttccactaaggactgaactttgtgctagacactgttaagcgttttacgtcttagtttacttttcatcaaccctgtaaggataagcattatgacaggcatttttcatgtaaggaaactaaggcttgcaaaggtggaataacttgcccaagattatagagtgcaaacagctgagctaagattttaactctggatctttcactccaaagtcccagaaggtggagggaggggtcccagaacgtactgatcatctaaaaggaatttcttcataaatttgtgagtttgctgaccaacgatttcttaaaattttttttttcagtaagaaaagtattttctttaatgccggctaaccgaagtcagtttgaagaatgtagcagttttctggaaatttacttaaacataccttacttaagtaattgtttaaattatatatggagcaaggaatgtgaaaaaaaatgtgatcatacaagcacacatataaatggcctaagaggtcaagagaaatgctgaactccaaaaatcatatcagttgcaattggtaaatacttagggagtttaaaatctaaagggagaaatagcctgtagtcccaggaccttaggagactgaggctggaggattgtttaagctcaggagttccacaccagcctaggcaacatggtgaaaccccgtctctataaatacaaaaaaaaatagccgggtgtggtggcattctcctgaagtcccagttactcaggaggtagaggtagaaggatcgcttaagccagggaggtcaagagtgcagtgagccgagatcgtgccactgcactccagcctgggcgacagagtgacaccctgtctcaaccaacaagcaaaaaatgaaacaaaccgatagaaaatacagttggcaccagcaagatctgccaatcaaaagtgggctctgaagctaaggggtgtgtgtgtgtgtgtgtgtgtgtgtgtgtgtgtgygcgcgcgcgcgctctgaagctaaggggtgtgtgtgtgtgtgtgtgtgtgtgagtgacggagggattctcgctctgttgcccaggctggagtgcagtggcgcgatttcggctcactgcagcctccgcctcccgggttcaagcaattcttctgcctcagcctcccgagtagctgggaccgcaggtgtgtgccaccacacctggctaattcttgtatttttagtatagacaaggtttcacctattgtccaggcttgtctcgaactcctgacttcgtgatccgcccgcctcattctcccaaagtgctgggattataggtgtgagccactgcactcggcccagctgagggctgttgagggaggaaggaggaaggtcctgaaggaatctcctgtgtcagtgggttagcaagatggaacctcatacccactcacagttaaggcctagaaataccttcaaagaaatatgtagccacacactgcctagtgctgatgacaaaggtgtcagtaatacttgattatttacttgatctatatttaaatgctgaaggatgacaagataagtcgttcctggtgagatgagttagggaggactcttgaaggaagcaaggctttggcagtgaggagggacattccctggagagaagcagtttgtagcagggtgtaaaaggtagttctatagaggatggcagtctgtttttgccctgccctgccaggtgacctgacacctcatctcctttcaacttaggcaagtctcctggcttgtgaaggcctagcaggtgtgagtttggttcccactgcagccagcaagaagatgatgctgagccagattgccagcaagcaggccgagaatggcgagcgggcaggtagccctgatgtgctgaggtgctcgagtcaggtacagcgcttgagtccattgtggcacctggggatcgggtggcccaagctctctgccaggagataccaagctctgattccttgatgcttcctcatagggaagtggggcaaggggatccaactggggaatggatgaacattggtatttcagaaagctaaggaaggtcttttgtgtgccttcaactcttttaagaccaggtgcttggagaggaaatagttgtatacttcctctaagctttcggggcaggtggtttactctcatttatgaattttgtctgagagctgcattgggtctcatctcatgttccgagatgggctatgagtttagatttgatttgtcttcaaagggtcaccgaaaagacagtgataagtcccggagccgcaaagatgatgacagcttgtctgaggcctctcattcaaaaaagactgttaaaaaggcaggtaatggggtgatcccccaaactcatacagtttggtaatggggtaatattcctccttcttccctctaccatgtaacctggagctttccctagatgctttgatctctgatagccagtgagtgagtcccccagatttcatccagagactaccttggtagttgatctcctgccttgctggaacagtaatggtacaggttggggagcatgagatcccagatcccgaggcatgggagcaggcaggctccagctcaagtcatactcagactgctgggtttgacaggatagacagcttacccactccacctccttccccaaagggtctcttacctccatggagtacaggagatggcagcacctttagacagcatcagagaggttcctttctccaacagctggaagtggacccagagtagaacagtgtctccaggaagagggcagtggtggcctcatgacatgcctgattattgcccccaggtggtggtagtggaacaaaatggttcttttcaagtaaagattcccaaaaattttgtttgtgaacactgctttggagcctttcggagcagttaccacctaaagaggcacatccttattcacactggtaagtctcttgtttatattcaaaagggggagaatagtctatcgcttgtattccatgtctgtttgtggctctagttgggtttattttaatgggtaagtattagaaatgaaggaagaagataagtcaatgaagcagagagattgcatggctttgtatctggtgtcactgagaccagcacctttggggacctctccccatttatgatcacttaggtgtctacacattactaagagttaaagtttctgagaaaactggaatgaggtccctactgtacatacctccccacattcacttctctgtccacctgggccaggtgagaagccatttgaatgcgatatatgtgatatgcgtttcatccagaagtaccacctggaacgccacaagcgtgtgcacagtggtgaaaagccttaccagtgtgaacggtgtcatcaggtaaggctcatccctgctacaataccccacacacacttttccttccccaagaatcagggccaccctccactcctgcctgacaaaagagccaccagcgttactcgccataatagttaacacatcggggtgaagtgcatctgtctggccttatgcagctgatcatggggagcagcaattagaacattgtaataataataataatagcattccatatcacttactctatgccaggcactgtgagagcatactttacatagatgattttatttaatcctcacattgactccctaaggtagctgtattgtccttatttcacgtatgggaaaattgagattcagagaagttaagtttcccagggacaccgcagatcacgaacagagctgggattcagtccaacttcagagctaatgcactttggaggaagagatacaatctttgccctgggggtcagtatctgatctgatgagaatgtaagagctggggccaaaacaagacaagaacaagagattagaaatgataatagctaacacttcctggatgcattgctaggtcccaagctttgctctgcactcttacactgaatcttcagacgctagaataaaagctccatgagggcagagactttgttcctctggttctctactctgtatctgccttgagatagatactcaataaatctttgatgaataaagcagctgtgctgtgagtaggtacttttagcctcgctttgcagttttgcagatgagtatgcagattctgggctgttaggtaacttgcccaaggtcacacagctgctgagtgatagagccaagattcagccccaggcggtctggcctgagagcttggattctccaccaccgtgtgctcctgctgtctgtgcacgtgctgaggggatggagaatgtggtatctgcctcctgtgagaggaatgagttagccaacaggtagctgcgtttgtctgctcaggcacttaaccctccctttcttctcagtgtttttctcggacagatcgattactcagacacaaacggatgtgccaagggtgccagtccaagacttccgacgggcagttttctctataggcgcaaggggccccgggtggtgggagtgatcagaagaacctgccgaagagcacaccccctctggtctgatggtcccaccaccgccccatgtgaacctgtcccactcctggaggagtggacccaggagaccagaagagtgcatcaggggacagtggccccagaacctcagctctgtaaataatctgagactatgagtatctcggggaagttcttacagcattcctgggtaggggagctagtccctggacccttggctgaggtcataggtggggactcaaggtacaggaccaagactgaagtgtggctcccacaaccttggactccagctggcagctgaaatggaaaagattggggaaggggatttgtttgttctgttcttgtttttgtttatccaaaagcaacttcagcgggtaaactgtggatacaggtaatccagaggcataagagtcctggtccaaagtagggactatagctggtccagctctccccaaaaattgggtttttagttgcagtagctcctcagtgtttcacaatcctgcacttcgcctcctttttgaggaagaataaggtcaggaatggcagctgagcttactttggcttccttatacactgtagggacaaaaggaaaaacggggtggagcagacaagggctggatccaaaaagtggatggcacctcttccttcctcaagggaaaaggaagagttgtgccagtgggtgttgtcatggcccatgtcacattggcacctgatggcatcagctcaaatgcctttaggaggaaacttgggtgagagtggcccatgaagcccttttcttctttttttggggagtcggtcttggagatggtatgtggctacctcgctgccattgactcctaaagtgagacagatgtgttgagcaaggagtcatggaagtcaaagtgggttctctctccttgtgccctcttaggaacaacccaagactggtcccaagttggctaacagctgctcaagaaacaaaggaatctggggtcttctgacatgcctgttgagcagtaggagctgttctccctccccaagtcctatcactgtattcaggtagaggaggtagggaggggtctgtcctttggtcccaaaaaacaagatctcggcttgcttcctgatggccatccctacccaacagagtgtgggggatgggggtgggggtgctgcagagaaaagactaaagaagaaacctaatgtaggttccattcttaaccatattctttgctcctctctgctccaataccaccaccttgtccactcccaaaaaagtaatcgggtgtgtgtgtgtgtgtgagagagagtgtgtgtgagatatgaatgcatgtatttgtatgcttgcaggagatggcatattattgagccaaacccttctctggccctcaccttcagggaggatgagtggaaaatagcctcctcttgcccaaacatgaagggtgcttgaggtctcagcaggagctgaagaacacaatttggggaacagaagggcttttgttttggagggtttttttttttaagatgaattcaacagcctggtggttaggatgtttctaacccaagccagggcttgtgaacatgaattttctaaggtgaaataaaccttttctttctgctaaagaaagaatccttatgggaagttttggggtttggttgacccccactgtaacctgacctgacctgtggcgggtacgggaactgtcttagtaatcatggagactggctgaacctgagtgccaagctgtcagtagggtctgagatgggaaactcctgaaagtatgatttcatttcccagaaaatgtaaagaatggataccagcaatgattcctggctgttacctattctggaggggtggggttggggagggggttgtccatacctctgtggtatgagtatttcagggaaaaagaaagcaggcatggcacccattcgattttccctgacagcatctgagatccttttggggagacgctgaggagtgtttgctgccatgtactcttacagctctatgctgacactcccatttgatgtggtccagaacttagacctcagtccttggatcagccctgtggtccctgcaagcaggggcatctttctgcatgtgagccagcccccttcctgttcaagggttctgctggatctgggcttttcctgtccttcacttctgggatgattcaccccacatcttccagtaccctgtaaaccattttaaaatatttagaaaactatcctcccaaaaatgcttttgaaaatgagagccctctgtccctgccacttacagctagtctctttgggataggggtgtatgtggagagattcatgtaagtctcacatgagtgacctgtgcccctatgtgtactaatgtgtgtactgggtcagaaggtgccctgggttcccacagaccttggtttcctgcctgggtgggtgggagggagggaacttcagagagtatgtgcgaacagccatagcagagccacccctgccaaggacccagtgagggaaactcaggagcaggtggttggttcagttcccgcgctgatgtctggggcagtgcatgtgtgagaagagaggcgcaaagcagtgaaaggagtgatttggcatccagagggcccgggagccccacggataccccagggaagccactgactcacaccgctgcagaggctcctgggcccaatgcccgacccctgctggccagcatggggcctagcactggaagatgcctcaggtgtgtttggagtgggggaaacggaagtagggcacgctctcagagaccaggatagagagtcagggaacctgggaaagagtagtgccagttccgggtaggctgctgcaccaggccctaccagctcaggctataaacagtctgctttgccccaagtcttttccgtccacccccaacagccttgtcatcacttagctactgatcacgcccatggcttgacattggagggttacattagtggagtccgccacagcttcgaaccctctccccagatgccctttgcctctgctgtggccctggggttttatcaactgtccccttcctatcctcctctccaccctgttttttgttttttttttttttaaataatattttgctatgggggaggggaatatcaaatggacaagatcacttttaaatggtagtttttataagatgttataaacttgtatctttttaccattaaagtgcagtgtatgttccttcgtgatatatttaggatatttaaataaaaggaaaatggggcttttctacatactatctcctctttggggaagctttttcatactggttttagttgttttccttttttctccctacataatcaccccacaacttccagcaccctataagccattttaaaaccccttctccacagaggaacaagcaagtaggagcaaaaacagggcatcagttctgagcaagacgaaaaagcacacgcagcaggacggaaggaggctagacaccaacagatgcagtgtctctgacctgggacccccctgcatccgcagcacttgagaattcataggccctttccagacctggctt

SEQ ID NO: 96337 - DNA, 57553 bp, Homo sapiens
  misc_feature (1)...(57553): n = A,T,C or G
tcattagcctaacttagatgataggtgacaaactgaagtgagctatagggagttgtccacttccaggctgctatcagtataccagctggggtgtggcaaagtccagaggttcaagcctcggtttttcatcctgggtgagttcatatggctttccttttctagtcctaagcctgagaaatttctctccaaaatcttcttttagaacacagtccagattgaactgaagttgggcagagtaaaaaatgtttacttctggttgggcacagtggctcacacttgtaatcccagcactatgagaggctgaggtgggtagatcatttgaggtcaggagttcaagaccagcctggccaacatggtgaaaccccgtctctactaaaaatacaaaaaatagctgggtgtggtgacgggcgtctgtaatcccagctgcctgggaggccaaaggaggagaattgcttgagcctaggaggcggaggttgtagtgagctgagatcgcaccactgcacatcagcctggtgagagagtgagaccctgtctcaaaaaaaaaaaagaaaagaaaagaaaagaaaagaaatgttaacttctcgaagcttttggtatcagtctgaagttcaatctttctgattttcccagtgctcaggaattgcccacctccctctctcccccaggataaaatgactgagaatcaggagcaaagtggatagaagaaacaaaattgtcagaccttttaaagaggagggaaaccaagtccatttaccctaaggctttttagttgcaaatttctgctggagaataaggaaaggccttgtgttttgatatctacacttttatttgctgttaaattaccatgatccaattacacactgtatttcctaaatctgggttttgtttaggaacaggtgttaaaatgaacacttacacacatcaaatgttgttggactgtaggaattcatattattttattaatactattcagccataaaaaatgaaatcctttgcaccaacagggatggaactggaggtcattatgttaagtaaaataaaccaggcacagacagacaaataccatatgatctcattcatgtgtgggaacttaaaaagttgatttcatggaggtatggagtagaatgatggttaccaggggctggaaagggagggggaagtgaagagaggttggttaataagtacaaacacacagttaggtagaaggagtgagttccagtgttcaatagtacagtagggtgactataattaacaacaatatattatatatttcaaaacagctggaagagaatatttgaagtgttcccaacaccaataagtgataatggtggctcacgcccataatcccagcattgtgggaggccacggcaggaggatcgcttgagcctgggagtttgagacaagcctaggcaacatcgtgaaacctggtctctacaaaaaaaatacaaaaaattagtcaggcatggtggtgtgcacctgtagtctcagctacttgagaggctgaggtggggggatcacccgagcccagaaggttgaggctgcagtgagctgtgattgtgccactgcactcctgcctgggtgacagagtgagaccctgtctcaaaaaaataaaaagtaaattgaaataaaaaaattaatttaaaaatgtttttaaaaagatagatgtttgaggtgatgggtactctaaataccctgatttgatcattacatattgtatgcatatgtcaacatttacatgtacctcataaatatgtaccattattagcatcgattaaaaattttaaaataaataaattagataagacttttaaaataatgctaagtccttttatcatttattcttatagtttgccatctgaaactcttcaactaggaactagttacattagagaatgagagatcagatataaggcctcaaaacctcacatgtgcccagggcttacggagggcccaggagcaatttctacatctcttttttgtctacatgggttaatttatttgctccctgaattgttattattaaaagtaaacaaaaaggaaaaaatggcatgagcaattcctaatgaaaatcaaattagctttagtgagcccctaccattccaccattaaatggataaaatagacagacagtacaagaaaatcatgatttttatttttaatctgactaaccacagttctttagcatcctgtatgtgaaattagtatcatggttacttttcccagttggccatttggcaggggatctaaatagaaaaactaagtatggatggctaactgatcatggaatgtcaaggaatgatggatttgacttcacggtaaaaaaatacagacattcaagtttccccaaattcttcctatgtagtccactgggatagtatatcttttctgcaagtagaaagcattgaaacaaagatcccataaacaaccacctaagctgggcacggtggctcacgcctgtaatcccagcactttgggaggctgaagagggcagatcacctgaggtcaggagttcgagaccagcctgcccaacatggcgaaacccctgtctctactaaaaatacaaaaaaatagcagggtgtggtggtgggcacctgtaatcccagctactcaggaggctgaggcaggagaattgcttgaacccgggaggtggaggttgtagtgagccgagattgcgccatcacactccaacctgggcgacaagagcgaaactccgtctcaaaaaaaaaaacccacttaaatgaagtcattgtcttttcacccatttaatcaggccttcattataagatatgtgggtacaattattatttttgtgttagagataaggattctgaagtatagaaaagttaagttactggccaggcatggtgcctcatgcctgtaatcccagcactttgggaccaacatggcaaaacggcatctctactaaaaatacaaaaaattagctgggcgtggtggtgtgtgcctgtaattcccgatacctgagaggctgaggcacaagaattacttaaaaaaaaccccgagaggccaaggttgcagtgagccgagatcatgccactgcactccagcctgggcgacagagtgagactgtctccaaaaaaaaaaaaaaaaaaggaagaagaaaagttaagttacctactgaaggctcttactcccaaggccacacttttaaccactatgcaaagtgcctctccttttctctgccaagatagtgaagaaattaatagtcctcagtcctttcataagatataaaaagaaaacaaaaatagtacagcttttaaataactcttcactgtagcagttttcacaaacaggtctacttttagtataaaccagtatatataccagaatgttccaggcaagtggttttaactatttcacacttccatttctccatgttacaataagactaccagtttttacccctttcctacttcatataagtgtatgaagttgagtaatatgatgtcatcaaacatactttgagcttcttggaaaagtgatatgtaaacacaaagtagagtgtttataaaaacagtgtcaatgtggtatgtatccaatgtaaaatagatcaaattattttattagagattcggacaaaaataactctttaatcttatctattttttcatcattttgcatactgcctgtgtctgtggctttcaagggcaatctgaaagggaactaggtctgatacgtgttgattggattcgcagtttagcattctccttattgaggaaatactgcagtacccaagatcttggctgtttccaggttttggaaaaatctcaggtcaaaattgtgttgccagatgggattattacatagaggaaagttggctgtgaatttccatataccaaaggccatcctaactgtcttttatgaaggacccaacaggcttttattataattcaaaaatagccaggtcaccctaggactttttccagtgttaccaaaacatcacttttactgcccaaacggaagtaggccattacctcacagtagaaaataaaagaagctagcttgagaccaaggtagttttaaaaggcatgaaggatgagaaccaccattcttatttagtggctctggacagcgtcacttgcaaacagaactgcctcatgcacagataacaatgcctgacacccattacactttacatgcacgttcacatctgccttttggataaagggcaagaagaaaggaacatttaccattgagaaagaattagaagccttgttagtctccttttaagacttcttcacattccacatggattaactgttagggagaaaaacactgcaaaaataatcagcaatgcatttcggaggctcatcagctcccggctgacagctcacgttagttggatgaaggctgtggataggcttttagatgtgctaacctgtaattttgtttctagagtggcccaaagtggaaggagttttcactccctctcaataagccctcttgtacggttgtgacctctggcctatcataggtttttgacgataaaggagagcccgggtttttgaggttaagggagagttccctgacatctttggggtgaagaagagatggagggagcaaagctgccaaagacctcctgtgacatttccactagtatccacctataagtaagtgctggactatgattccctggggagatcagtggctctaaagacaggcccctgggctctttcctggctctgactcagcttcaaacctgccgtgcaactgctcagagtctaaatgtcttcatttatggaactgaaataatcctgctaagattactttctttgcttcgtgatgtttgcctgagaataagtagctgggactacaggcgtgtgccaccacgcccatctaatttttgtattttttgcagagacagggtctcaccttgttacccaggctggtctcgaactcctgggcttaagcaatctgcccactttggcttcccaaagttctgggattacaggtgtgaaccatcacactcggctaaaatgttttgaaaaatggaaacattgtacaaatgtgagatgttgtgcaacatgtcactgaaacacggtggtataagagaagttttgggaaccagcagaccagaattaggcctgagaaaatcttacagtaagcagaccagaattaggccgtctgagaaaatcttacagtaagcagaccagaattaggcctgtctgacaaaatcttacagtaagcaggccatcttcccaggccttctcttttctccagataatgaagaaggctttttaaaagcaaagccaacttgatttgttaattgatcatccaacttcttaactgtctttttctcatggtaaaataccgagaacattgtgggtgaggagcaagtcgggaggtggaacccacccccgcaccctgcctccaatagattgtatgtgtgggtcgctattgctgggacccacgaaggctgtggattgaggacacagggtagaagtgggatcttctgcaggtcagtgtcagatgtgtctgtgtgatgtagtcatgggagaggcgcgagtcttgggcgggtgtatcttaggggtgtggaagtgtctgcaagggcctccgtggtatgtcatcacattatttatatcatgggcatgaccctgaacgttcacccgagagtggtgagagaaaggccaggatttaaatcagtcttgacagcgcagatgaagtttgttattgttttccgcccttcccgagggacttcggaaatggccccctgagaggtgaattcttggaaagaatatgagggcggttaaggcgtctctgtctcaaactctccggattttttgcagctaccagggactgcgagggtctgcgtcctgggtggaaggaagcggcgtcagtcaacttcctcgcagcggcggcagcggcgcgggctgcagcggagcgcgcgggtctgcgcatcccgcccccgggtcgggaaggggcggagctgggcgtcacccgcccccggcggtctcctcctcccggccgctcccccgagccgagcccgccgcggtcacagccacccgcgggaagctcgtggccgggaccccgaggcgggagcgcgggctgggccgggctgggctacgcgcacgggctcggccgccgcccctgccggtgagtcccgccgcgggaggcgcggaacgggtcgagttgggtattgggaccgcgaggtcggggagccccggggcccgagctcgggaggcggggacgtcaggatcgcggcgttggggagtcctcgcaccccgagctcagaggggaggtccagagtcgcagcgttgggaacctgaggccaggggccggagtttagggccccgatgttgagtctccgaatccaagcccggaaggggggacgacgggttaggatgctggggagccctggagctctgaacggctgtagtggggtggccaggactgcgatgctggggagtcatggagcctgagcctggagagctggcgggggtgtggggaccgcgatgttgggaaggctgagcccggagggcgggagattcaggaccaagacgtgggggagtccgacagggcagaacgaggggcgtcctgtccgcatttgtggggcgccctccgcagggcggaggggaacggaacctgggaggggagtgcggaggagaggaagcccggggcggtagggagagcccgaggaagggcagcccgaggtaggggaaccccggaaagagtagggtgggtctaggcatgtgctttcgccggggaaagatggagggggcttctctgagagggtgggcgcgaggagcggagttgtgatgggaaccgccggcagctggctaatgggcggatgctggggcttggctggatgggaacgccgcggtggggtgtcggaggtggctggtggggctggaacgctgggaacgtctgtctaggctatgggaacgcagcgccctcggtggaacagggtcgtagataactcgagagggaatctagtctagggagcaagaccgggcatccccagacggaggcgggtggggacctcgcactcagcgcgcttggggaatattcggagcctgggtttgggggctgctgcaccttgccgacccggtgcggggacctggaggtagccgggcacagcagcttcctgtgcagctgtgggtgctccaggcactggcagactagtgggaagtccaggagccttggcaggctcattgtcttgacctaagttgcattccatatttcttagctgggttagaaatgattttgtccaggaacccaatgagaagagcctgggctaaaaaaattagttatggagtgagatttcaaatgtrcaggtaatacctacccgtgtgtgtgcgcgccttagggataactcatacaatacactgtatgtgtgatttttagacccacgtgtgtactacttgttccagtactctgagaagctgtttctgggtaaaaacgaggaaaatccacaacaaatacacacaccaaacaatgtccacaaacgcactgcattccagtcgagttaaacatgagagtattgtacagtttgggagtatttgcttgtcagtgaagactcctgttactgaagttaataggagttgcctgcatggaaggtagactgcccttgactgccctgttaaggttatccacaacgtgtacccagccctgagctgctgcacccttgaccaggtcaactggaagggagccagactgcttaggacctcagtggatgagtatccaagtgtgtatctaaaaacaaaggaccaaggcatggctttgtttttgtttttgtttttgttttttatttctgctgtttgtccttgggtgcgtgtccttcaattattagttaaatgttgactatcttacattaacccatcttgtattgttaattatgtatggtaattatttcagttatttggcgtaacaaccaattctggaagacccagagtagaggaatcttattaagtggatatatccattgaaagatatgtttttttttttttttttttgcgggtgtgtgtatgcaccagatttccttctggtgcatataggtccatcttctgacacacactgagatttgagcttcattggataaacaaggattattttggcaactagcatttgttgggtctgtttttaattcatgaaaaggaaatctttaataattatgcaagttaacaggatagaaagcgatttattcattttacaagaatcatttcaggataagcatatttccattaagggtgtgtgtataccttattgagtggtcaggaccttgcatcaaaatctgcactatcattcctgcagcagtgtacttattcacttggacgtaacacttgctgatgcttccaattctttatccaaatgttaaaataaatatgccagtatttatacattcaaatcagyatttctccccttcaaaagcctgctcttggcaagctgtgtactaattctagtgatgctgtcactactgagaataattttggagctcctgctttggagttgccttccgagtttgcaacacatttcctgattgcctcagtggtggcaaaccttcctcagctgggaaacagccaggcactgtgcggggccaacttgggcttccgaggtggggaatcgaggttgtcaataagtatgctcattaaagtaatgaaaattctcttgaaggactggcagttctaaaaggggcatttagtaatggcatggagtatgtatttaggattggaaggaattacagttggtccctgaacaacaccggggttaggggctcccatcatctccacagtggaaattttgagtacaacatttaactcctcaaaaacttaactactttgaagcacaaccttcattttggtgtttatgctctggtatgtatgtaaagtaattggtcctgtcactttattgttatagcttatggcttattgggctagaaaaagtaagcctttctttgcccctcctgatacttgttactaggcagtctctgtcattgtggatttttacagaaagcaaaacaaaaatacaaaagacttgttgtctcaccaaaaaaaaaaaggtacccagaaagccatttgccccagctgtaggtaatgcctggtgcttgatttttgatgtgaaaggatccacagaagtaaagggaagagaatgatttctgaacattcatttcaactttgggatttcatggcacacagtaaaaaatgtactgaacatatccctttttaaaattcgcattttttttttcaggttgtgttgcataaagcttcatacagccacagcttgaatcttgatctagctgtggtttggggcaagttgtttcatctcttttggcctcagttttcttaaaatgaagatattaatgagtatgtacctcatggggctgtgatgaagatgaaataacattgatgcgtgtagaacacttgagttcggtgccggacacatcatgagtgctcaacagagtctacttattcttgttaggaatattatttattgatagtcttatgttaaaattcctttgaagccatgtggaaatttatcatttcccaggtaatgatattcccttcagttaggttttgcaactaactacaaatagaacattttggtttttgccctcctggtcttttaagagtttttaaagggtaacctgaaaagcaacgacaattagttattttttatttattcagaaacgaggaaatacagactccaaataagtggagtcagtgctcccagttactttcttttgaattcagattttttttttaaatgagcattcctgttatgattgtatattatgtataacagtttggtgtggtaaggcaaatctgaaagaaaaaagtttaaaagcctcttctctaatttttttcccttcatccaatgaaaatattattctaacgaaacagctacagttctcttggcacgtattgaaagagacgattctggtaaacattcccttcattccaaatgtgagttttgctctgctgtgttttttaaacaatagggaagaatagcctggcactgaaatctcagctcttctgtaaatgtcaacactagttttttttcaagtttataaattttattttatatatatatgtacatatattagaaagatgggaaagtttcatcttaattttaatcagatgattaggggctgctatgaaatagttaatgtttcatgaaatgttgaccatttagtgagaattctctgttctaggcaagcaagtgctggagatggagaggcttgagacacaggctttgcccttcagaagttcattcacatcatgtgctctcttacaatgatgcaggaacaaaagcttcttctcctaatggcctgtggagctaagaattcatatggattttactacatgatattttccttcartttctcaaagaagggtaaataggtggatctctcaatagtgttcatatttttgaggtggattaactctttcaaaattagatcccaatatgtactcagaggccataaaaggagaaaatagctataattagtgaattacaaagtatatctgcaggatggggtggtattattgctatacgaaactttcctggaatgttgtgtttggttcttgctctgtcttctgagtagcggtttatgtacttgtaaaggaccaggaaacaatatacattgtggcttagactggagccatgattcttttttttttgagatgaagtctccctctgtcacccaggctggagtgcaatggcgcaatctcggctcactgcaacctccatctcctgggttcaagcaattatcctgcctcagcctcctgagtagctgggattgcaggcgcgcaccaccacacccagctaatttttgtatttttgtaatttttgaccaccatgttggtcaggctggtctcgaactcctgacctcgtgatctgcccatcttggcctcccaaagtgctgggattacaggcgtaaaccactgtgcccagcctggagctgtgattcttaatggggagaagtgggtggtgaatttgcccctttcccccagaggatgaaatttggtggtgtctggagacatttttgattgtcatacctggagggggagggatgttactggcatctaatgagtggagtccagagatgctgctaaccatcctaaaatgcacaggacagccccgcacaacaaacagttatctggttcaaaacatcagtagtgctgagaagcccttggctagagcgtgggatttggagtaaaaataaacctgcattagcaccctgacaccaccatttcttaactgtgccaccctgggtgtgttacttaatctgagtatccataggatgcatatctgaagagatgtgagttagagtgtgtatgaaatgcttaacacacagaaggatcgcaataagtgtcaactcttagtatcatgactggtagatctaggtcaaaatccaaagactgtgctttaaacagacacagcttttgtttcttaacctattatgtacagaaagaattcaggtttcttgttttcatttgtgtgcccaaggatagggcaggggcacagatgtagggcctccagcgtctctggtaccttctgcattttgtcctaggttctgccagacagctaagtgtactctgcagatcaaccacgcaaacaggacagtcccccagacttgtgtagaggaaagatgaggatggaggagctttctgttccatgtgggctacacttggaagggggagatagccaggccaggaagctccttctgattgaacttattatctcccaggcttctgaaggctcttctcagacccttgtctagacatgaccagagagtttcctttgctgtgtgagcaggtgaggaggtctggccatttccctcccctttgcttttctttagccaggtatggtgattcatgcctgtaatcccagcactttgggaagctgagatgggaagatcgcttgagccccaggagttcaagaccagcctgggcaacatggcaagaccccatctctacaaaatatacaaaaaatagccaggtgtggtggcacgtgcctgtagtcccaactacttgggacgtgcacacacacacacacgagccacatgagtgagtaatcaactcagtaacaagcagatcttcagcaaacgggcaagtggagcaaattctgggcacagagaatgtttagcagataaggatgtaaataagtaacagtgttttcttagctgtgatctagaaaccattggtactgtggttctcagtcctggctataggatagaatcacctggggttgtccaagaatattgatgccctagccccaccccagaccattgtttgcgagtcaaggtgagtagcacctgggtatcagatttttttaatttttgggtgtgagttgagggtcaaggaccactgccgtgtgaaatgcatgacttgtatttaaaaaaaaagaagaaaagggaattaaaaatatctaagtaacgtaagtgttgttaaacttttgtttagtcttgggtatatgttggcttctaattggttgtggtcaaagtttgaaaaacattgttttagaaccttagaggtgtttaattaatactgataaatttacctcattcaatatttctgtgtgcacatctgctggacagttttcaaagtagttttatatatcttctcaaatatgacttttgctaccatcccatgaggcataaagagcaaatatactgatttttttttaacagatgaagagtgatatggtttagctctgtgtctcccacccaaatctcaccttgaattgtataatccccacgtgtcaagggcgggaccaggtggaaataattaaatcatgggggcagttttccccatgctgttctcatgatagtgagtgagttctctcgagatctgatggttttttaaggggcttctcccattgcttggcactcattctctctcctgagagaaagatttttcttttctcaatgtcttggagggtataggcttccaaaccatctgggtggcaaataaactgttcatattttcctatgtgaggaatattcaataccatatcagagcaatattttttgaatgagcaaataataattatgataaatgttaatatacaatggaggtaataggtgacttcaaaatttcaagacaagtacacctagggaagacccaaggctggttcacctctctttccagggtgacctggttcctgactttaatcaaccctcagttcctagggctgtaagaatttgagaaagaccagagctagggttattgatttaagagctttttgttgattttgagacacagctaacagtagaggtggtgacatttatccttttcaggtccaagattaaaaggagcaaagaagaagaaaaaaatctctattctcaaagaatagagaattgagtactttccaacaatattgtgaaactctgtatttgccctgtccttaacacctgctcttttgactccaagagaataccaaaaggttcaaaataaatccgtagtcaggaaactggaggtgagctacaaaaccaggcgaagatggacataaaatatacatactctgctgaataatgtctatggatcataattttgggagaaatgactgttggtgaaaactataaagagaatttggtaaatctgtataaaatatggaagagcagatagtatatagtcagtgatggagtttaatggctctcaaattagaaaatttatattttccatggtgaattcattccagaaatcccatcttagcttttttattcctgcacttaagcaagataaagtcattactattattcccttgagttgtcagagaccctgagtactttagaaagtggaattagtttcatgggctaatactcaattgcctgcagtgctaaaatgttacccagataggttcaagaatgtcactgaaaccaggtggcatttcaagaaagtagaaactgattccgcaaatcttggtttgatgaagaggttcatgttaattcatgaagtgctaaaggtatttcttggattgcatgggtttttttttttcccctctttaaaatatactgaataatgacttgtttatgacttatatctctggaactattgccaccttctgagaagctgctggtctgagggtctcagacaatgtctttgtctcatctgggatgtaaatatcttagattcttgtaggtctcaagaatcagtctaactcggacacttgggagggagagggagaaaaaggcaatagatgttgttggggcataaatgaaataaggccagagcggcagaggtggggttcaaataggatatttgtcagttcatttacagggatatttttggccacttaataagtacccaacactgctagattccttgagagatgtaagagaagcgtaaagcacgtctttttgtgcttaaggagcctaatacatttggagtgtctgctttttttttccatgaaggagaaaactttagaacgtttataattgtgtgtaggactctgaggcactggtagtaggtgcagtacccctcagtgtgagacagggtaaagtcagtgggagctcttacagtttgagtgtaattcaggagaaacaacctgagtgagatcttgaaagaagaagaatatccaaagagggggacatttatgatgggagacatagcttctgcaatggcacagaggcaaaaatcagaatagtatatggtatgtaaggccctgaggaaatcactttatttggcttcatttttcttcgtatcacttggcaccacttcacatgtatgtgtgtgtgtgtttactccctatcttctgcattggattgcagtggtcagctacataaggaatacatagagcaggacctcagatctagattcccttttgcaattgggtgtttgcagaaaggaaaaaattaaatcactcattgaaaaatatttttcaagggtctactttactatatgcttggttggcagatttctaggtacaggagataacagagatgaacaaggtccctgccttcatgcaacatatattctcttgggggagacaaacaataaacaagtaaatcaggaaatgtatgattttaggtagtgaaaaatgctatgaggaaaaataaatcaggataaggggaaagagagtgccagttttaggtaagggtaaggtaagggtaaaattttagattagctcgcttttagcttccctagagaagccaaagaccactgaagtctttgctaatggagttccagctttattatatgctcatcttgtccagtgaccctctcaacaatatatgtacagtggacattcagcaagtatttcataatagtaataacaatggtcttgctagacttgaattggagcactttttttctcctttttactgtctataaaagaagcatgaatagaagaattcttctattacagaagaagcatgaattgcataggagaggacacacaggtactgttgacaataacacagtgatccatacatccatctctgtggwaaagaagattgaacacagctgcatcaaaatgtaaaagaaaatattaaactctttataattatgtggctgtgatacatctcatggcctagagaaccattgggtctaaatattaaccaaattccaaaggaggtaataatatatccatgcatatgtaaaagcatacaaagacataaaatagctaccatgtattgagcaatcactgtgtgccaggcattgtgcaatgtactttacttgcattacctttggtccctgcaacaaccttaggagggagatatcccagtacaaatgaaacagagatgaagtggctagtgcaagggctcttaaagttagtgtcagagcaaagatggcagatgccttgtttgtgtgggggcatgaaatcgtgtttggaaatgctggtttaattaagggattccttggagtgcatatctagcttggcattactccagggtggagttccctgtctgtccagctcagcactctatctaagaaatcctagaagctgggaatttctggggctggctctgaattgatgtaagtggtttcctgaacccactggaggcatggagtgcattgaacattttttcactattttgtatgcctgtgaaaccacatacatgtctgtcaggcagctgcacgagccattaaaacttggaaatgcttagcttttggctggaaatgacagtagctcagtttggagccactaccagctcaactaaagctgactcggaactctgattctgtatatctgtaaaagatctaggtaatgaatattggaaggatgtgagatttagtaaacttccaaagcatagagaaccaataatgatcaacttattgttactgatagtgaaaaggttgggcagtagtggatgatctagagtgacagtgaagttctccatgtgtttaactccctcatgttggccccagaacccacccatgtttctagagaggcaggctggtctcttggcacctctgtgacctggaaacaatgccctcaaaacctctgatctacaacagattacatttaatgagcacatgtgtgctaagagttttacatgtatttctctctctctttctttctctctctctcttaaactttctgttattgaaatttcaaacaggcagaggtagacaatatggtataataaatccccatgtgcccatcaaccaatttcagtaattattagctcatggccaactccatatatatatatatatatatggatatatatatatatatcttcagattattttaaagcaaatcccagacatcatattatttgtgaacattctaaaatgtgtttccaaaaggtaaggacccttttattataattctttaaacttcacaataacactgttagatatcactatatccctatttgacagatgaaggctctgagacacaaggagtttaaattacttgcccctggtcacccaacttgtaactgacggagtcaggattcaaatccaagttgcctaactccaaagcccatcttgtttactgccatgctacatggttgctaccagaccccactgttgtagctaatccttgcattacagaattggatcctgggattaacaaactcccacggacatgactgttgatttctrtgaattcaaccattttcccattgctgcaaattgggttcatttaggtacacagggacagaatagctgtgaaaggcccgtctgaaagaaagaaaggaccagcctgaaatattaatggattctattagggcagcaaaactgataaagcagtcaaacccttcttgtgatagtgttttaaatcttggagaaatccacaatgaaaaggactyaatagaaaatacgactgtcattgggccatagctgccaagggaactaaaaggtttcttttaaatgaattctcctttggttttctcttggcggaaggaatcagccgtcccactgagtcttttcagtttgtttctagcacagctaattgtgtttatttgtctccggaatcacatgcctctctcctctcccttgctttttcttagggtctcttgcctgctgtgtactgcttttactgccagaaatgttctcctcacctgggagccagttggctgccaacactgagtaggtactgggaggctgattctgcctctccagagatctgacctggcctgggtgtccaagattgccttagggtagagggagagattggataagctggctacaaaaggatctgttttttttttttttcctcagatgtgtccacttggtccataacagcattaagaacagagcagacagcaagtaaataaatcgtattgactaattgatcaagatagctttgctagttgatacggtttaratctgtgtctccacccaaatctcatgttcagttataatccccagtgttggaagtggggcatggtgactagatcatgggggcagtttctcatggcttcacatcatccccattgaagttgtcatcctgatggttctcatgagatctggttgtctaaaagtatgtgacacctccccactccctctcttactcctgttccagcattgtgaagtacttgctccccctttgccttctgccatgattgtaaccttcctgaggcctccccagaaagtgggcagatgccagcatcatgcttcctgtacagcctgcagaaccgtggccaattaaacctctttgctttgtaaattacccagtgtccagtatttctttataacaatgagagaatgggctaatacactagtyaagttcaagaaactttggttctccatttttcctatcaaaacatcacattgactttcctgcttaatagtttcctttgtcattgggatcactgcactgatatttactcgcttctttcctcctcctcccctccctcttttcgttttgtttcgtttctttcatttcttcttttgacagggtcttactctgttgcccaggctgtaagtacagtggtgtaatcatagctcactgtgaccttgagcacctgggctcaagtgatcctcttgtttcagccttgttattaggtaggattacagtcacataccacgatgcccagctaattttttgcagggtcttgctrtgttggtgcccaggttggtcttgaactcctgggctcaagccattctcctgccttggcctcataaagtgctgggattataggtatgagcctataggtatttgcttgattcctaaacctctgtttccttttcttcccccttacctgtcctgtcccatcacagaagccatataactgctggagaacttcctagctctttttttaaccatcttactcatagagttctagaagatggtagttgtcaggatgcaattgaagaaaagcctagaaattccacctttggctctctatgggacatgccaaggaggacctcattattattagagataataattaatataatattatattaatataataatattagagataatgagggaaatacattttcagggacaatgtattttatttaaagatatgttattgcaaatattttgaaatagttttttattattgatatgatcactactttttaaaaacgtttagtgggaaaaacagtagacgacaagtcacttagttgtctatagtagagtcagctcgggggtggcaaatatatggctctgtgccactgttccctcctgagccccacctccctcaagagcttgtggcagacattgtaaatccataacaccttgccctctaaactccagtccaggcctggaatgctgctcaacacgtgatttcaggaagccattaccaagcaatagaggttggcatgacaagtgaaatctatttgccatctcctaaataagtagtctataaagcccttcctgcactaaaattcagtgagctctttagcctgtggtcatattaggtccctaacagctagggagcagatctcctcattcattgacattaccacatagatgccaaaccctctctggaaaacagaagagaaagcaaaatttttttgattaatttttttttaagatgcagggtctcactctgtcacctaggttggagtgcaatggtgtgatctgatcatagcttactacagcctcccctcctgggctcaagtgatcctccctcctcagcctcccaagtacttgggactacaggtgcatggcaccactcctggctaatttttatgtatttatttatttattcttttgtagagacagggtctgtgttgcccaagctggtcttgagctcctgggctcaagtgatcctactgccttggccttccaaagcactaggattacaggtatgagccaccatgcctggctgggatgctttaaacactgatggttcatggaagatttggaagttgcaactctccctttgcaacttatagtaggtccttcagtggtttgtcagtaagactaaatcaaatcattcttaaggaagaaaaatgctaatgcagtgctgaaggggaagaaaaggaattgaaacccagagcctgtcctgttcctactctggtatagcagttgtattaaactgaatctagattatgtgtagtttaatgagatgggaaagcaaaaaacttagtgcctggttataactaacttgctgtcacatagtagttctcttttgaagaaatttggagagtattaagataatgcrtatgaagcatcaagacttccttggtgaggttttaagtgttcatgaccatattttagacaatgtattggacagcagtaatggcttaggccagtccgtagtcaccaaaatcattgtgagctggtaggctatgcaggcagaagctgtgtgggctgctccaggcctgcctgtctctaagaggcttgacagaggatgccaggctgctttctgggtggttaagatcagactgtgtatgcactggtgtggttttctcttgttttaatcaacagtacattcttttgcaaggaaaagacaaactgaggctcattttggaatgctctgatttcagagcaaggacaggcagagatacttttccattttggaagtctcaactgaatattggatatggggtgaggaaaagcaggaagaaaaacccatataggttagacaaaatattagattagccaagtatttttaaagtattttctaaaaattagataagatttagagcttacccccaccccattaattgtatacttttgtctagtgatgcgtatgtaaaaatcatacttaagctgaaatcacttctggcttactgttgttctttattttctgcatctttttggatgtcatataaaaagaggccccccaaatcatcatttgcttgttatttgggaatgcgaaagtaattgaattctctggagggatgagtggtggttgaggctgaaatagcaagttgggaatgaatgcaacttttcagtagatactataatcctttgtcaaagggagtgctggggtgatggaaatgaaactgcaagtgctgaccttgaatttctggtaacattgagtgcttgtctcttcccagcccatgtgatctatggacttgcccaaatagcttcttgctggtactgtatcctctgttttctaaaggcaccttagggacttcaaaaggcacacttttgctttaaaatgcatcgtattttaatgttaactcgatggtaaacttatataatattggctgttagacactgaataagcttaaaatggaaaagtgacactttctcgacctgcattcatcttactccttgtaattgcattcattttttttcaactttaattcagaaatcttaagtagttggcctttattattattttcagtttacggcattattggtaccagaaggattgtggtttattttaagtatatgattcatttaatctgatgggactcaggcttggactgtctgctttccagcccactttgcctccaagatcaatgcaacctcaaagaaggaaagttttaagttttttaatggtgtttatgattgatgtaccttgttgatattaataactgtatctgctacattatagctttgattaatcacagtcttcaagtaaactgacttgctgacatattccactttagagaaaaaaatatcaaaacacaggaaaatcaaatgctattaggacttttgtttaagagcaatttcgcagggagaacatccttgggacttgtttaagaagcaacttcccaaaagcctaggaagttttgtttaagagcaaaacttaaaggggaaacttagttttggttaagagcaaaacttaaaggggaaacttaacttcccctttaagttttgctcttaaccaaaacttcctaggcttaccatagacacagtcctatcttcttcgcattggtatctctattagccaaactttatatggaaagagataaaggacctggacaaaattatgttcacttacacatttaggaaagtggactaatacattggtagaatgatttccaataaacgaggttgaaacagaaagcatttcctgaatagcataaaagtttagggtgtgggctctggagccagactacctgggcacagattctggctccaccacttcctgtctggattttgggcaagggacttcacctgtttcctcatcwgtacaatagctaaaaatagtagattccatttcatagagttgagaggagtaaatgttttatttatttaagtcacatgcaatgaccttagaaccatgtgtagtagagagtaagtgctcaatatatgtaagtcattttagtaattatcactggcaactggataaagaacagtaacagtgaagaagaaatgctatatctctggtttctggcttgagcacctgggtgcagccatttactgagataggaacaagaagcacaggacagaagtagggttagtggaagaagcttgattctcttttggtagtgttcatttgaggtatctttgttacagctaagcagagttatcaagtgggcatcaaatataccccattccagatataacaaaattttgtggaatattattcaaccttaaaaaggaagaaaattggccaggcgyggtggctgaggcctgtaatcccagcactttgggaggccgaggcgggcggatcacgaggtcaggagttcaagaccagcctgaccaacatgatgaaaccctgtctctactaaaaatacaaaaattagctgggcgtggtggtgtatgcctgaaatcccagctacttgggaggctgaggcaggagaatcacttgaacctgggaggtggaggttgcagtgagccgagattgggcctctgcactccagcctgggcgacagagcaagattctgtctaaaaaaaaagggggggaagaaaattgaccaggcatggtggcttaaacctgtaatcccagcactttgggaggctgaggtgggtggatcacctgaggtcaggagttcgagaccagcctaactgatatggtgaaaccccttctctactaaaaatacaaaaattagccaggcatggtggtgggcgcctgtagtcccagctactcgggaagctgagacaggagaattgcttgcacgtgggaggcagagattgcagtgagccaagatcgtgccactgcactccagcctgagtgacaaagcaatactctttatcaaaaaaaaaaaaaaaaaaaaaggaaattctggcacatgctatgacatggatgacccttggggatattatgctaagcaaaataagccagtcacaaaaggaaagcactgtatgattccacttatataacggacctagagtagtgttctctgaattcatagagacggaaagtagaatggcggttgccaggggattgggaagagggagccatggggagttgtttaatggatacagagtttcagttttgcaagatgaaaagagttctggagatcggttgcacaacactgtgaattgatttaacactactgaactgtacacttaaaatggtaagatggtaaattttatgttaggtattttactttatttttattttttgagacagagtctcgctctgttgcctaggctggagtgcagtgtcgcgatctcgactcactgcaacctccgcctcctgggttcaagtgattttcctgcctcagcctcccgaatagctgggattacaggtgcgtaccgccacacccagctttcttttttttcttttttttttttttttgagatggagtctcgctctgtcccccaggctggagtgcagtgctgcgatctcggctcactgcgagctccgcctcccgggttcacgccattctcctgcttcagcctccgaagtagctgggactataggcgcctgctaccgcgcccggctaatttttttgtatttttagtacagatggggtttcaccgtgttagccaggatggtctcgatctgctgacctcgtgatccgcctgtctcggcctcccaaagtgctgggattacaggcgtgagccaccgcacctggccgctattttgtatttttaagagatggggtttcaccatgttggccaggctggtcttcaactcctgacctcatgagatccacctgccttggcctcccaaagtgctgggattacaggcgtgagccacccgacccggcctggatttttttaaagtgtgagcagaaaataacatgttaagtcacaaggtgataagtagtactatggaaaacaaagaaaaagtagagcagagttaggtgttgtggaatgccagggagagtagaaatgcagtattaaatcaatagggtggttgggaagcctccttgaagaggtgagatttgagcaaagactggaaggagttgtttgtctcttggctactattaaaatctgtgtctaaatctgccagggtccacccgtggtatggcaatgctcagtcaataatcaagctgtgtatatcttttaaagtacatattcgtgggcagctgtggacgtggacatttcaactcatttggaaaaacaatccaggcagtcaggtagcacttcacagattataatcagatatcatctgagacttgaggttatgttacagtaaggacaaatggttattcttatatgtggccttttctaaaatcaacctataacctagaaacaaacaccaagggtttgatttctttagttattccaaaatttgcatgttgttgtttgtcctgagaagttgyggtgccttgggagctgagaaaacgtacatttttcaatatgagttttaaacgccttcattaagactaggattttccaggcttcaactgaccttcctgtcaacttaaagagggcagcttaaaaatccttacttcatgtattctttatttgatggatcatatggcatggaatggtgagctgcttataaaaatcctgtgacctggacatgttttattacaaatttatgaggctggtataaacaggtatcaacttgctatcatttaagccaatactttgtactcacgaacaaactgaaagaggtttgcatccttggatacttgaactgatttttccacatataatttcttaacctcatttttctaggtctaataaaaagaagtatactgagcataaatctctactttggaacaggaaaaaatctcccccaccctcctcctcccactgaactttgtggggaaattaatatctatggatggacaggcacctttgcttttccccaatcctgtcttctggtcaagaattctaaagctacaacactagcagcaactcagaacacacatggctgtttgtaactctcttgccaggccacatttatagaataattgctaaggtgacaggaactaggtgggggaagaggaaacggattctctctctaagtcctttctacactaatggcaacaagcattggtggattcaaaaagcacagcaatggctgggtgcggtggctcgggcctgtaggccctatactttgggaggccaaggcgggtggaatgattgagcccaggagttcaagatcagcctggtcaacatggtgaaaccccagctctacaaaaagtataaaaattagtcaggtgtggtggtaagtgcctgtagtctcaactactcaggaggctgaggtgggagaatagcttgagcccagaggttgaggctgcagtgagctatgactgtgccactgcactccagcctgggtgagatcttatctcaaaagaaaagaaaaaaagcacagcaccaatctcagaaattgccccctactccaatttttgttaacattcttatccacccaatgtttgatttcttttagttctgaacacaattcttataaaattactggcataaatgtaatattttgggtgatttaacaagaaaggaggagaaatattttcctttatctttatgcatacacagctctctatgggcatttagcctcagctggttgttgagctcagggtataccctaaacatttagtttctcccacatacattagagagccccatgaaaatacataaataataacacatgagaatgtagcagccattaggtgtatattattgtcataagatatatatcattagataatgatagcagtacttggtagcaaaaggagagtttagtggattcaacagatgtttgttgaggggccactctggcaaaaatctgtgctagggtctaagcagggaggtaccatacaacacaatacttgcccataagaaacttatggcctacttgggaatactcaggtaactacagaacaaggttgtatatggtagcatcatttaagtgatacaaactggaggatgcaggagaatggatggaagaagatattgctttgaccaggtgagttggaagtcatggaagaattggcatgtgagaagtgccttcagggacagataaggttttctgacaggaagctattccaggtaaaggsaacaacctgggcaaaagtctataaaggaatccccttctagtcatatacatatccaataagacatgggcaagactagactgcagcctagggtgtcggagcaaatcactagaaacaacctccatgtccatccacaggaggatgaactaaagaattgtggtatattcatacagtggaagtagtcagcaaagaaaatgagtcaactagagaatagcaactaatgtggaaaaacacaaacgtagattaaatgaaagaagaatgttaggtacaaaatttgtatcaaggttaaaaatatccaaaaaaatcttatttataaatttcatgtggttttattgtatcattatatgtagatataactataatttcaaaatgttttcatgtgaaaacagtgggaatgaaaaccacccacaatgcatagagactgccagtggggagggtgggaagggaatgggtagacataggaagctacgtttcagttgaatccatttttttttaagacagggtctcactctgtcacccagactagaatgcggtgtcactatcatggctcactgcagcctcaatctcccaggagcaagcagtcctcccccttagctggggccacaggcacatactaccatgctcagctaattttctaaaagttattttgtagaaacaggatctccctatgttgcccaggctggtctcaaactcctgggttcaagtgatcagcctcccaaagtgttgggattattggtgtgagccactatgcccaggtaattgtatctgctttagagagaagaggacaaacagatagatacactaatatatttatagacacatataaacacatatactatgtacatatctattttaagatctaaagtagacatcacgttaacgtgataaatgttacgttattctctacactcttctacatacttgaaatatttcataatataaaaatgaaggagaaagtcacagttcaggtttaggaatagcaaatggtatagaacagtgattctcaaaccttaacatgacccttggcaagaaatacattttattttagaaaccaggaattcggccgggcgcggtggctcacgcctgtaatcccagcactttgggaggccgaggcgggcggatcacgaggtcaggagatcgagaccatcccggctaaaacggtgaaaccccgtctctactaaaaatacaaaaaattagccgggcgtggtggcgggcgcctgtagtcccagctacttgggaggctgaggcaggagaatggcgtgaatccgggaggcggagcttgcagtgagccgagatcccgccactgcactccagcctgggcgacagagcgagactccgtctcaaaaaaaaaaaaaaaaccaggaattccatgacagtacttatccttaatatactggatgtactctaacatgttaatatttgctcttttattctgcatgatatcaagcagtggttgatgcttacagatgcagataaaggctaggtcctggaaggctttgacggtcaggctcaggaatgtaagctttagttggcaaagaggaaaggcccactggtggctttggggcatgttatgtgagctaaactttagctaaatcaaaaaaggtggaactgaggccagagattggatgatccaaaatcagtcaggaggttatcaccattagtgtaactggaacagggtatgggtctgcaggggaagtgaaaaaaagggacaggttttgcatttgctgtgattaaaaataatacagataatatggatttgatgactggggtttcagggaagcgggagggaaatgagacaaatttcactcttgatttcaaggcttgatgcctgagagattggttacatcaataacaactatgtatatcaggagaaatttggttttaaacactatgtttaaggtgctgatggggacatctacacatacgtagtgaagccatggctgaggttaaaaggaatgcataatggtttcacaatgtactatggctttctatagcagtacacagtacctggtgagggaaaaaatgaaaggtgtaatcaaggtggggccaggcaggcagacctagcaaaggtgtggcgggtggagggtgaggagtgctggttagggcagagtgaaatggctagcactgggttgggtttgtattgggatggcagtgagtccaaatgcaatgggtcactgagagaagaagagttgagagactagaggttatgagacaccaaaaagtatctttagcaggtgtgatgaaatattacaggtggaagttaggagtgttgtaatcaaggaggaggaatttcaaacctgaaatcttggagctaaaataattctaagttagaaaaaaaatactattctgaaattcatatggaaacaaagagcctaaatagtgaaagcaatcctaagcaaaaggaacaaagccagaggcatcacattacccaacttcaaaatactacaaggctatagtaaccaaaaggctacagtagcatggtactggtacaaaaaaagacacacagaccaatggaatagagaacccagaaataaagctgcacgcctacaatcaactgatctttgataaagttgacaaaaataaacaawggggaaaggatatcctattcaataaatggtgctgggaaaactggccaaccatatgcagaagaatgaaactggtctcctacctatcaccatatacaaaaattaactcacaatggattaaagacttaaatgtatgatatggtttggctgtgtccccacccaatctcatcttgaattgtagctcctataatgcctacgtgttgtgggagggacccgttgggagataattggatcatgggggcagtgtcccccatactgttctcgtggtagtgaataagtctcacaagatctcatggttttattaggggaaacccctttcacttgagagggggaaacccctctcattctctctctactggctgccatataagacatcccttttctcttccatcgtcttctgccatgattgtgaggcctctccagccatgtggaactgtgagtcagttaaacctctttactttataaattacctagtctcaggtatgtctttgtcagcagcatgaaaatagactaatacaatgtaagacctcaaactataaacatccttcaagaaaatctaggaagtacccttctcgacataggccttggggaagatttataactaagtcctcaaaagcatctgcaacaaaaacaaaaaattgacaagtgagacctaattaaactaaagagcttctgcaaagcaaaaggaaaactattggccatgcaccatggcgtatgtctggaattctagcactttggggggcaaggtgggtagattgcctgagcccaggagtttgagaccagcctgggcaacatggtgaaaccccactctctacaaaaaaatacaaaaaattagctgggcatctggtgtgcgcaggtagtcccagctacttgagaggctgaagtgggaggatcacctgagcctggaaaggttgaggctacagtgagccatgatcacaccactgctctccagtctaggtgacagagtgagaccctgtctcaaaacaaaaaagaaactttcaacagaggaaacagacaacctacagaatgggagaaaatattcatacattatgcaggggtctaatatccagcatctataaggaactttaaatcaccaagcaaaaaacaactcaattaaaaagtgggcaaaggaaatgagcagacacttctcaaaagaagacagacaagtggccaaaaacatatgaaaaaatgctcaacatcactaatcattagagaaatgcaaatcaaaactacaaccagatactatctcacaccagtcagaatggctattatttaaattaaaaaaaataacaggtgttggtgaggctgcagaggttagggaacgtttatacagtgttggtgagaatgtaaattaatttcagccactgaagaaagcagtttggagatttctcagagaaccaaacacaactaccatttgacctagcaaccacattactgggtatgtactcaaaggaaaacaaattgttctaccaaaaagacacatgtactcatatgttcatcacagcactattcaaaaatagcaaagatcaacctaggaatgaacctcagtgcccatcaacagtgaattgaataargaaattgtggtatgtacacataatggaatactgtggagctgtaaaacagaatttgcagcaacattatcttaagtgaattaatgcagaaacagaaaaccaaatamcacatgtttttacttataagtaagagctaaacattgggtatacatggacatagagaagggaaaaatagacacaggactacaagaagggagaaggagggaccggggcaaggttgaaaaactacctgttgggtactatgctcactacctggatgatggactcagtcataccgcaaacctcagcatcatgcaatatactcttgtaacaaacctgcacatatacctcctgaatagaaaagaaaagttgaaaaatttttaaaatgaagtaattctgagtgataaacratcacaacctttgtagatactacaggttaggcaggtaggtaattgtaatatcatggagatgaaagctgtagctttgtgatagtttacaattactgatctgaactgagtagattgacttttcaaatgaagctcttctatggaataactaatgatttttttttttgagacggagtctcactctgtcacccaggctgcagtgcagtggcacaatcttggctcacttctctgcaactgattattaattactacttctaattacagaaaaggccacactgggaagtggagcagggtcttcaggggtgcccttaggaaagagccctgatgggatgtcttgggagagaaggctctggatagtgctcctgggtcactacagtgagccaggattcctagtccatcagcagctcagagatggacaagcactatcttctcatctaatacttccttttcattcacagctgatagatgttctttcacaaagacgcagtcagttggctggactcttgggacacgggtcagaattattggggtctgcccataccttattgttgatttggtttagggctttgaataggtcacttaaattcagtgtacctcagttattctcacaatcaagtaacacaagctaaaatctttgaaaaaatattttgaataacttccttatgcaacccaatgaatttcacaatttaatataaaggaagacacatgtatagccagttatagcataatgctaagaggatgctataaactgaagtgtctccccaaattaatatgttgaaatcctaacccctaatgtaaggatattagggggtggggccgttaggaggtgatcacctagatcagggatcccccaacccccagtacctgtctgtggcctgttaggaactgagctgcacagcaggaggtgatcagtgggcgagtaagcaaagcttcatcagtatttacagccgctctgctttgctggctttactgcctgagttcctgtcagatcagcagcagcattagattttcataggcgtgccaatcctattgtgaactgcacatgcaaaggatctaggttgtactctccttatgaaaatctaatgcctgatgatctgttactgtctgccatcaccccagatgggaccgtctagttgcagtaaaacaagctgagggctcccagtgattctacattatggtgagttgtataattatttccttatatattataatgtaaaaataatagaaataggctggatccggtagctcatgcctgtaatcccagcgccttgggaagccaaggtgggcgggtcacttgaggtcaggagtttgagaccagcctggccaacatggcgaaaccccatctctactaaaaatacaaaaatcagctaggtgtggtggtgcatgcctgtaatcccagctacttgggtggctgaggcacaagaatggcttgagcctgggaggtggaggttgcagtgagctgagttggcatcactgcactccagcctgggcaacagagcaagaccctgtgtcaggaaaaaaaaaaaaaagcaataaatgtaatgggtttgaatcatcatgaaaccatactcctcaacccccagcccccatacgtggaaaaattgtcttccatgaaattsgtccctggtgctgaaaaggttggggaccactgacctagatgaatgcctagatgaatggtattactgcctttataaaagaaactcaggagagctcccttgcctcttctgccatgtgaggacataacaagaagacagtcatgtttgaaccagaagtgggccctcactggacaccaaatctgctggtgccttcatcttggacttttgcagcctctagaaactgtgaaaaatagatttctgttgtttataagccacctagtctttgatatttccttacagcaccctgaatggacaaagacagagggcttaataagacatgatgagttctacttcaggctgtcgctaagcttcacaggggaggggttatatctgagcctgaatttgagagagaagtgggttttgccaggcacagcaggctacaataacattggcgatgtcaagtgtgtggcttgttcaggcaatcaggacagtctgttctgccttttgtatgcaacaagaataaaaacgagttctaacagtgctccagtgttattttacattatgtttctctgcctggcccctycttttcctaagtctttgcttaggcattcttggtcataaaaatgacaaatggtaggagatgatagaccaaaaacaagctgatggttagaaattcagccagcaatttaaatattggtgcggatacctagcaagtggatgaaccacacaaataaataagatccaactcaaatggtgttttcttttgaaaacccacattttcgttttcttagatctcactggtttttacctttagaagcaggcaaaggatagtcattcactttgtttttgaacaatgatctattgacacattctggggacatctttcctctgactgtttgctgatagaaataaagcataggtaagccagtgttcctgtctccagaggcttgcaattcaataagcagaagagagaaggctctctacacacacagtagtgaagtaatgggcaagcctgatgttctccttaccaaaatatgtggaatagatagataagggttgggggcgggggaggaatcaagatggcctggagaaggctttgtggtgatttggaattgaactaaggccttggagatatctaaggagaaatgaagaataaagtgacttgcttgactctttatagcaaataaaattgctgggtcttagaaccaccaggagagtgtactgttgtcactgcagaagagttaatgtttaattgctagggaacacagctttctttatatggtgctccaaactctagctcgatttgttatctgattttctgctgtggaaagggcatttccaagattgatttcctgccagtggaaatgagcagctctcttcacgttcacccgggttggcccgggtcccagctggtttgcagatcagtgatgaagcttcctgccggtgagaagctagatctagttgagaggttgcctgactgaagccaaaccacacctaacgaagccgatagttacactcatgtagaaagtccagggagacacctgtccctaggctttaattagtgggagtttcagacagcaaagtwtacctttactcaaacaagaagcctcagaagaacatgatcttcacacctgaactgttgattgcctggagactgctcagtgtgttctcccagtaaattgttcccagctcctctgacttctcccactcgacagattaaacacagatactatttattccatgtggcagatgcattctctgtctgtaatgatgcattttgaaaccagtactttctcaagtgagattagctgagatgtggaaagtataggaartgacagaacagacagaaattctagctagagggttctagttagataaagagaaaaaggcactcagaggaaatttgctctgctcatctttcccagggcacagcaacaaattaaggctgtcttttctttctcctcttaggaatattatagggcaccacagaggaaaagattcataagtggagagctcactgagcccagaaggacacatcttgctgccagatctgtggcaaaaaggtgtaccttactttttttttataggcacggttcagccgtaccacaaacccacatggtcaggaagtgactcacgtattaatgccgtttgagtttgtgtgctgtggggaaggtcttttgacaatattgtgtatactggcttttccaatctaagagaacatctttgctgcattaacagtagatgttacatatttttttccctttaaaccccccatgaccaatagcttaccctatggcaagtatagttaggttactcgtaataattaatttggtatgctaactagttgagctcacrgaaaaatgcaagtatgggtgtattcctttataatgctggggtgtttcttggggagggtcttaatattttaccaacttaggttttaccaatttttgcatatttatgtcaaatattcctatttgcagagtagtactaacttttgctttccaattacaaaagtagtaaatgtttgttgttaaaaagtacgataatgatagtatttccagaagaaaagtaaaattccccacaatcccttcatggcaatagctatattgttttgattatatgcacttccatacttcatctgtaccatgtttgtatgattacaaaaatagggctgggcrgaacacatactttaaatttgttttttcctttacatgtctttgactcatttattcattcaagaaatcttttttgagaatgtacaatgtgctagtccatcacttttctaagtgcagtggagactacagtgaaaaaccaatggagctcacatatcatgtgtatctttgtataacaataaatgtaaatatgctagttattttaataagtgcatagtattctattttatagatttatcttaatttacacaatcaaatactccatttttggatgtcgaaattctgtttgttaggttttgttaaatatagggaggaaatatgcactgaccattggtgaatctgaatcgatgttcaaatgatctctgctaataacaggattgcactggtagtgccattctttcaaatatgactttacaaatagtgatatgctccttggaagatgtagctataaagatcagtatgagcccagagttctctcacttaacgactatggagatcctgaggcatgtgagactgtttccaactccacctctggctcaaaggctgcttaaagcacagttccagtccttataaatggacaccaagttgtcattttggctgctattcctttgcagccatttataattatgcagtgatgtgtgaagctgggcttctgtgaattctggaagcatttcttttgcctttgataggaattgctgctcatttgtcctctatccaacaaccagcaggtcactttcctaccatctgtgtgagtcccacacacagtgacatgaagtgatgtcacaggatctgtttgttggtgattccagcatgctgcttgatgttcagtacaaagcaaaacatagcccagatgaattacagaattttacagtattagagcttatatagattacacccccatcttaaggacaagggcaccaaggcatagagaggttgaataatttgcttaaaaatcacttagagcactttgggaggcctaggcgggcagattgcctgagctcaggagttcgagaccagcctgggcaacacggtgaaaccccgtctctactaaaatgcaaaaaaaactagctgggtgtggcagtgtgcgcccttagtcccaactactcgggaggctgaggcgggagaattgcttgaacccaggaggcggaggttacaatgaggcaagatcgcgccactgcattccagcctgggtgacagagcgagactccatctcaaaaaaaaaaaaaaaagtgtcacatagtgatagagctagaactaaacattgggacttctaatttcttgcccagtgttctttccagggaatcagctattccaagtttgtggtagattcacatagcatccttgtaataggtcaggaaacactattgctttggagtgcttctatttgtcatccagataaaatgtcttcagtaccaaacaatgccagtttcccaaatatggagcttttctttaattccccactttgttaatttgggaaaggctttttaggtagcttgctatatgcatagcagatttagtgatctcattgtcattgtgctttccattagtaggctgataaatgacctcaggtttatgattggaatgtctcaytacaccagttctgtaaagctagccacaacaaaccatgtgtctctttaatatgaaagaagcccatcagatttatgatcatatttatctgggctaatagacctatttggattatttgatagattccactcagattttgtggaagtcacattttattctcttagggagtattggaatctgatttacaagtaaactcagtgtcaaagatctgagaaactttgcagtactgattgtttttgtaaggccaactgcaagttatttttgttaatgaagcaaagcagtattgcagcagcatatttgaagttgtatatcaaaaaatrttggggtttagtcatagaggscattttttgaggcatagtggttaagaacgcagactttagagtcaactgcttagtcacctcctggatctatcacatactgtgcagccttggacaagttatgtaatctctctgtaactgtttccttatctgtgaaatgggaatgataatagtactggtgtcaggtattgttgggaagtttaaataagttaatattttcaaagcacccaaaacactgtctggtatgtgctaaacatcatataagtgtttgatactattattctgacactttctctctctttttttttttttttttttttttgagacggcgtcttgctctgttgtccaggctggagtgcagtggcataaccatggctcactgtagcctcaatctcctgggctcaagtgatcctcccacctcagcatcctgagtaattgggactacaggtgtgcgccaccatgcctggctaatttttaaatttagagatagagtcttgctgtgttgccaaggctggtcttgaactcctgggctcaagctatcctccccgttcggcttcccaaagtgctgggattacaggtgtgagccactgtacctggtcgatttggacactttccattcattcattcattcgttcattcagtgatttcttggaatatcaatgtgataggcacaatgctaatgataaaaatattctcagccctcaaaggatcttgcartttagtggtcagagagacatataatgcaaaccatgtaggcatacagtaaggaaagtcctataatgaaggactttaagtgcagtggcagttaggtgaaggagcacctgaggggaagccttcacagggaccatttgagatgggacatgaagcatgagtaggagttggccagtggacatcagtggtgtgggcattccaggcatgcatagaagcacaaagtcctgagaggatggcagaataactggaacacaaagtgtcagagtgggagatgctttggggacagttaaagagacgcacaggtaggggaccaggaaggcctcctgtatcctacagaggttcctgtgagagataataaggactcaaattcagacaggggccaatgagagggaacccagcagatggaggagatggccaggagcagtgagtgcagtgacacggttacacctgtttctcaggtgataggagacgtgcccaggtgctgctctgcttatcgatatagttcctctctgaaagttaaatggtcttttatgggtacttcacgtatttttactgtgttttcaggggataacaactatcaccaaaaacgtgtcatttcattgttttattgaaagttactgaaaaggaaatgcattttaggtagtttccatcagtcagaactacgaaaacaaaaccaaaccttaagaatacagatgatccccaacttaggatggtgtgaaagtgatacacattcaatagaaaccatactttgcatttggggttttgattttttccaaggctagtgataggtggtgaaatactctagcaattctgggcagcagcagtaacctgcagctcccagtcagccatgtgatctcaaaacaaccagtaccctacggtgtcctctgttgccagatgactttccccacctgtaggctaagtgtgtgttctgagcacatttaaggtagtgtaggctaagagtggttacgttcagtagattaggtgcattaaatgcattttcaacttaagacgttttcaacttaacaatgggtttactgggctataacccatcatatgtcaaggaacatctgtatttagcttagttctgtgatttacttttaaaaagaacacctaaatgcacaatttttggctaaaatgtcagatttttaaccatgaacttgggatttttaccccatttttctctttccattaaaaaaaaaatttgaaaggcgcttctaagataaatttttaagattagatcccggccgggcacagtgactgacgcctgtaatcccaacactttgggaggctgaggtgggtagatcacctgaggtcaggagtttgagaccagcctgactaatatggtaaaactctgtctctactaaaaattcaaaaaattagctgggcatagtggcatgcacctgcagtttagtcccagctacttgggaggctgagacaggagaattgcttgaacccgggaggcggaggttgcagtgagccaagattgcgccattgcactccagcctgggcgacacagcgagacttcgtctcaaaaaaaaaaaaaaaaaaaaagattagatccctacataatgcaaggcattattcaacattttttaacactttcttataaacattaagtgaattcatggtacatatactcagtaaatagaacttttaattccaattccattataatctgactctaattaaaaatccttaaaggagataggggagttcaaatatcccactgctctagatgtgtccaaatgaatgtcctccatgggcacttcaaactcaacattttcaaacatgtctttcagcccagacctgacccagggaggcagtattatgatgattcccaggagtgttacaaaacaaataatattcctttttgattttaaaaaattgcattaaaatcaattataaggtagaaaatacgtgtggatagatttatttttactaagttatatccttcagtgggctctttatttgaaatattactaggactttatgtacatgttttgcctcttgaaagtactattccattactgaccattttgttattattcattctgttttcttcctaaaaagtggatagacaggaaatcacctcctctcacccacccacccttttttatgaggacaatgacactgagtaattgattgtcttaggcatagccacacacctgagtagagcaaatactaatagccagacttcctgactcccaaaccattacttcttttttccttcacctttgcagaagagaaagaaattggtgccatgagcctgggcctaaagaactgttcattcagtaaataattataaggtgtcttctatatgccagatattattttcaacatggggacttctgcacctaacagtccctgcctttaaaggagctggtggctaatgggaaagtaagtggagtaaacaaacgaacccagctccatgaatgaagaaaactgggagaggcaaggccagagtctaatgaaggctggagagagccctaagccagtctgggagttaagaaaagcttcctggtggagccgacttctagttagagtgttgaaaatgacccagagttgctgggctagagggtactgagtttgcatgcatgggagatagagtgtcaagaactcccagtattaagagtattaagatctgggccaacaaattggccttagaggtatgggctcygggagaggaggctggaataggaaggaaaacagagaaaggatctgtttgaataattagggcttagaatttgtattgtaaacaaacaatggtgagctgttgaagaattttgaggagggaatgataatcagatttccatttttaaactgttgccctgaagtgatttggagaatgaagtgagggttggggatgtgagttaggagagccattattgatgatgaaaggtcagttatgagactgctattgtcatcattaacataagttaattttgaagacctaaattaagggagagcagtagaaatggaaagggcaaatggcttccagaaatgttgagataaaatcagcaaacctngattctgattagatgtaggggacgagtcaagtctgggttgaaggaaatgtctggagatgagtctgaagtgcccatgggggacattcttttggacacatctagagmagttggatattttaattcaaacctcagaaaagatctggttggaggcaaatttggaaatcagcggatacaggtgtagctgaagctaagggcctgggagaagtacctgtctgagaggcactgtggatggtgaaaagggggcagataccacaattgacagggatggtgggagaagaaagccaaggtggggccagagagggtagtgtcattgtcacttaagccaagagaggaggcattggttagcattgggaatccttgcagagctcaggagagataagcattaaaacagggtaatagtttcacgggagagaaatgactctcatttcctctgtaacatcaaacctaaactttcactaattccactgcacctagcccactsccttcctcattactccccagtagcccctctgctcacagacctaccaggaagtcataccattcctatgctcttattttgcctctttgctagaatgccccaattctcacttgtctgagctctatccagccttctagggctaacacaagcccacttccccccaacgctgccccaggatactccgagtttgttctcttctatagatctatttgtatttcgctctagtttacacttgtttatgtgtgtcatctggtgttgttggctgttgattcatgaagtttgactcttctaagcttcttgaggtaaagggtcttattgtattcttcctctgcggcctttgtagcctggaatagtgttgaatagataatccttgctctgaaaaagatttctggttgatcaaaattacaagacttgagattatccagttaataaaaattcttgaggaagatttaaatttcagctgtccaggagctggagtgaaccctgtgcaaaggagattgttctaaggtagaatcttggtcagctgatagtcacatcaggttaggtaggagggtgtgggaacagaggccagaagtgagggaggggctctcttactcagtgcagccacctgggaaggctgggaggcttcaacatcatgatgacaatatgtggtttcctccaaaacgggctcaaattttacagctggtcctttgaatcatggaagcattgcccatacctgcttggtgaaagtgaggcctaagagggaggggggcagaccccacttgacagtggtttctgaagttaatgatgataaaagaattataactcatggtaccatttttgtagctgtgttagctgctctcaaagggagaatttcatggcagaggaagaggtggttgctaaggaaatgacagaaaaaaagaaaacaacccaaaccctctttctgaccacaagtttagaatttttcttttcttttttctttttttttttttttttttgaggcagagtttcactcttgttgcccacgctggagtgcaatggcgtgatcttggctcactgcaacctccacctcyctggttcaagtgattctcctgcctcagccttctgagtagttgggattacaggagcctgctaacacacccagctaattttttgtatttttagtagtgacggggtttcactatattggccaggctggtcttgaacttctgacctcaggtgatctgcccacctcagcctcccaaagtgctgggattacaggtgtgagccaccaygcgtgaccttagaatttttcatgaccttgcactaccaaagggaaatttaagtcctttcttgttgttgttgtttttgagatgaagtctcgctttgtcacccaggctggagtgcagtggcacgatctcggctcactgcaacctcctcctcctgggttcaagtgattctcctgcctcagcctccctagtagctgggattacaggcaccggccaccatgcccagctaatttttgtatttttagtagagatggtgtttcagcatgttggtcagggtggtcccgaactcctgacctcaagcagtccacccacctcagcctcccaaagtgctgggatttacaggcgtgagccactgtccctggctgggaaatttaagccctttttaccctcagaggacagatctttgcaaccctctcattcctgagaggtaaggaatcatattctgagttagagccyatggtggttgtatccctggactctcaggttcctttgtggctattgggttacacactccagggggtggagttattaagaagaccctgagatctctgtggctgcattttaaagatctcatttgtaagggaaatgatgattctgccaatttctctccccttgtgcaccttttcttttgaagttaaagttaatatccctttggacttgtacctctctgcttcttagttctataaatctcttcctagtttattttctgaaagagtgaagtagaaataatttccagaaaataacttgtcaacataaagtcatgagggaggctggtgatatgagaaatagaaggaactgtcagagctctgcagtcatggtcttctgcagaccaataataaggcagtatcatgttccgtcctttctccctcagaacagacagatgccagttagttcccaggtctgaattgtgctctcttccaatcgctaaactactaaaacccaaagttttagtctttagaaattcagttgagttgtcagtttataagaacctgctatgtgatggatacgctattttaaggatatgaagattagtaggaattgtgtggttatatattatttaactctggatgcaggaatcgtctgattggtttgggttcccaaagatgagagaaatagccttgattttagacagcatgcagacagggatactgggagcatctttggggattccttcttctatagtcactggggttatacccagtgactcaccttgatttctcccagccataaaatcagactggtaatttcatctggtttgctctctacttcacaagaggtagtagaagactatatctaaagaatagagcactttaattccccagaactccaacaagcccagcacccccagattatatgttgctaacagcaacagggcaacttgagaagttatcccacatcccaggcccattcctgtagttcgtccaccaaggtcagttggagaaacttccatccagaactgaactctaaggcactcggatccctctgctggctgatagcagaagcaccacttagctttttcttttctttttgttttcaaatgaattcaggtattctaattagcattttctttctctctcccacactccctctttctgtgtttctctttctggctgactgtaatccttaatacacttctcttggtgtctttaattcctacattgagcttgagttcatagcccattcctggtagaagaccactgtctgatgggtgctggctaaatgaatgcctcaatacagggttacaggggctgccatagaaataggttcaaggtatggaggggacattaggccctgaactcatgaatgattcctgcatctcatatcagtgatggtcataataatggcaagtagttatgcagacttggaaccaagcactttgttaaacactttacagccattatgtcatatagttctttttcagccctgtaaggcagcttctctgtcatttactccacagataacaaagctcaggctggattcatgcagcttgttgatggtggggctcaggatgtgagttcaggtctctctggcaccaatgtcataactgcaaactacaatgacttcagatactccaggctttccaagcccatatcttggcagaagttctttgaccttgctctctgcctagaagtctcttccgcctttatcttttctcaggaattctgatttttccttcaagattcagttcagggtcacttcaagagggctatacccccatcctttccctgttttggttgtttgctgagacctcngtgaaccagtgtttgtctctaatggagcacttattgcacatttttgtgttgattcccctacatgtctgtctccccagtaaactttgatctctttgaaggcaggaagtgtatcttaccagtctttgtatccctagtacctagtacctagcacagagcccagctcatagcaataaaaatgacagcaatatttcacatttactacgcacttaccttgggctgggcagagtgctaagcacttcattttttagaccctctcatttaactatcacacaacccayataatatatagaattatgaagaaactgaggctgagagaattctataacttgcccaaggtcaccccagtaagtggcaaaactggagcttgactccaggtctccctgaacttctttacattttattaattttcatgccctacacttttttacctgattaggtattttttctcttccaatattgattgagacgtatgagtaggaattacattttctttgctaaaattagtaagcaccttgaacagtacttgctgtatgtgctccagtacttgctgtatgtgcttgctgtatgtgctccatttagataaatcagatattaaatttttctgaagaaaaaagcttgggaaacataattacataaggtaactagaaatgatcaaaatctatttctttacctagcaacttcagatgaaattttgcagcagtttyatgaaatattttatgaaataattgctgtattcgtctgtcactgagaaatacaagtgtaagttaagcatttctgaagcctgaaattcaccgagtgcagttttaattacccaagagaagcaaatctaaaactacttgcttttcagagcataatttaaaaaatgaacaacagtctttgcaatgagattttatgttaaatttaggtcacatgttaattttaactgttaggatatcctagaatgtgcattgttctttaccaacctaactgaygagtcaatttgcctgtcttaaatatgaggcttagtcagttgctcacctcatattttcaaagtaccagtgaaattagtggatagtttaagattaggtaggtgctaaagaaatacagtctatcattagctatatcaatatttgtaattcttatacttcaatatgatatttcatgctattaaagcctgtttattacattttaatatcgagaaaagcccatatcctttaaaggttaccttacttataattaaatcttgataatcattaagtcattggtatcactaaattatgttagggtagctaacatttccattttacaagatgtaactttgcctcacactgagtgtagtaaacatagaatattgggacaggccaggcatggtggcttaacgcctgtaattccagcacttttggaggatgaggtgggaagatcatttgaggttagaagttcgagaccaacctggccaacatggtgaaaccccatctctactaaaaatataaaaattagctgggtgtggtggtgcatgcctgtaataccagctacttgggaggctgaggcaggagaattgcttgaacccgggagacggaagttgcagtgaaccaagattgygccactgcatcccagctgggcgacagagcaagaccctgtttcaaaaaaaatcttcgggaggcygaggtgggcggatcacctgaggtcgggcgttccagaccagcctgaccaacatggagaaaccccatctctactraaaatacaaaattagccaggcgtggtggcacatgcctgtaatcccagctacttgggaggctgaggcaggagaattgcttgaacccgggaggcggaggttgtggtgagccgagatggtaccattgcattccagcctgggcaacaagagtgaaactctgtctcaaaaamaaaaaaaaaaagaaagaaagaaaaaaaagaatattgggacagtaagggatcttggtccaactccattattctacagatgaattaaaggaggctcaaagaagctgtctgcagctccttgcttcctctactgtaccagaaagccacgttgcrttaaaataaccacggatcctagcyggcctggtggctcacgcctgtaatctcaacacttggggaggctgaggagggaggagtgcttgagcccaggagtttgggcccagcctgctgtacatagcgacacccctgtctctacaacaacagcagcaacaaaaaatyatccgggcgtgtkggcgtgcatctatggtcctagctactctggaggatcacctgagcccaggaattagaggttgcaatgagctgtgatcgtgccactgcactctagcctgggcgacagagtrataccccgtctcaaaagaaaagaaaatagccatagttccttgtccgtcttagctgcattcgtgtctcactgcggctttgccaattttcctttcttttctgcaggttgcatmccctgtcctgagggcgcggcacggagtgcatgcgggccgckgccatgacgaccgccatcttggagcgcctgagcaccctgtcggtcagcgggcagcagctgcgccgcctgcccaagatcctggaggatgggcttcccaagatgccttgcactgtcccagaaacggatgtgccccagctcttccgggagccttacatccgcaccggctaccgccccacggggcacgagtggcgctactacttcttcagcctctttcagaaacacaacgaggtggtcaacgtctggacccatttactggcagccctggccgtcctcttgcgattctgggcctttgccgaggctgaggccttgccatgggcgtctacccactccctgcctctgctcctcttcatcctgtcgtcaatcacttacctcacctgcagccttctggcccacctgctgcagtccaagtcagagctctcccactacaccttctactttgtggactatgttggcgtgagcgtttaccaatatggcagtgctttggctcatttcttctacagctctgaccaggcctggtatgaccggttctggcttttcttcttgccagcagctgccttctgtggctggttatcttgtgctggctgttgctatgccaaatatcgttaccggaggccttatccagtcatgaggaagatctgtcaagtggtgccagcaggtctggcttttatcctagacatcagccctgtggcacaccgtgtggcgctctgtcacctggctggctgccaggagcaagcagcctggtaccacaccctccagatcctcttcttcctggttagcgcttatttcttctcctgccccgtgcctgagaagtacttcccgggttcctgtgacatygtgggccatgggcatcagatcttccatgcatttctgtccatctgtacrctctcccagctggaggccatcctcctggactaccaggggcggcaggagatcttcctgcagcgccatggacccctatctgtccacatggcctgcctctccttcttcttcctggctgcctgcagtgctgccaccgcagcccttctgaggcacaaagtsaaggccagactgaccaagaaagattcctgaggctggcaagtggggcaacgtgtggaggaagcccctcataatttggagaaaacttgatacaatagaagctgactnttaaggcattggcttttaaattaatacatatatccaaggatatgttayagctgcagtgtttgaaagccaaaggatttaagagttttgttgttgttaataaaaggaatactccttttccttttggatcatagcttaacaaggcacaggaagggaagggatcttgactaagattcatgagacattgaattaaggagaatcatcttcatgcctgaaaatttagcaaaattccgactatggcctccaggggcaattcctaaaagctgaatggataataaaattggactggaaagtaagtaggtggctggtcctcaccctgttggaatggctatcctactatgctgttctttggtaatggaataaattgacccaaggaccgaatttcatttggatttcaarttgtccagagtggaaaagccttcaagatgacatgatgaattactcagttcatctgatttctggtccctcctttctcgacaactataatactaacccttttctcaggataactgtctacacctggcagttttctctgamgtgctgttcactcacatccctaccttgcatggtaatataaaggactaggaagcagtcatacttccaggaaatgcttggattcatgtggacattcaggaagcttattctcatataatactaatctaaacagtactagaaattacagtgccaagagccaccaggaggcccagccaataagcatagatactatatggtatcatgggacccatctattttttaccagtggactacaggattacttgagagttatcagggctgcctaacagaccaggagatctgggggttgcaccagggaatcgccatatttgaccagcatgttttaaaagctcttggtaggattagttggttctaaggatccctctagggacctcattatttcaagaggaacccaaagtccagcctcctacatagatgctgccccacgaaggacccacaaaactaacctagttcagggttctcaggcaggcagttctgcttcagcttagagcagaacccataaaatactcaagtactgggataggcaagcatgtgtgtttactgtggattggtccctgaaggctcctttgggtgagaacatgtgaaccaggcaccctggtttgtttggagcattgctgcccagaagcttctatgggataggtggtgcttgggattgatgtgttgtggccatgcagycctccctgaggattgacttctgcactaatccagtgaaggaggctgtgtcaaaagaagggctcagaagccctcttttcagaggcaatgattcctgtcagtatgaggtcccttagttactaaaaagggacatgatttaactccagtttgatgaacctcctccgagtttactttattgtcttcaaatcttttgttttcttcctttttgtgagatttgtgggttttgtgccttataaatggaaatgtatgaacacaatatatgctcatgtrgaattttctgttctgggttattgggataagaaaaaatatatattgctcttcaactagtgaatgaaagaaacttcagaaagctagaattgcttatcaatcaaaagactttctcaatctattttggccacaaacaaacatattcaactgaagctttccaataatctttatatcaagaaagcatgcgtcttgtcagctacattgttttcttagatggatttctcctgttaatcctcaaatatctgaacttctgtgttacccaagtgtcttatacaagcttctggtgtctaggacaaatttatggcaaataaaattagcaaaactgaactgggttgaactgaacaagaggatgggggaattgtgcaaatacrttgttagtagaaggtcaatttaaaatagggactagaaattatttgaagttttctttattacggattcaaagacttattttgaaagttggaaggagaagggagggaagagagcagaagggaagaaggtgtaagtcaagctcttgaatataactggtggtattgtgggcagagatctttagttcaaatccacgtattttttaaaagagagaaccggaggtagagcaatgatcagatgggtgcacagaccagtgccaatctgaacattgttaatggcctgtgacatgatgagcacaggaacaggcatgaagatattgccatacaattttaatttatacaagtattggcccctcaagtggttggaaattttttttttaatctctttttctgagacagggtcttactctgtcgcccaggctggagtgcagtgatgcaatcacggctcactgcagcctcgacctccccagctcaagcaatcctcccacctcagcctcctaagtacctggtactacaggcgcgtgccaccacacctggctaatttttgcattttttgtagagacagggttttgccacgttgcttaggctggtcttgaactcctgaactcaagtgatccgcccacctcagcctcccaaagtgttgggattacagacattagccatcacgcctgccctagaaacagttttttaataggagatatttgagaggcattgaggtagragactctatgacatgccctcagaatatcagaatcttcttagaaataaactaggaaatgcagatgtttttaactactcagacttttgaggaattaatccttttaaaacatttttgttaaagttagtgtatcagtaagaaacagacctagtttaaaaggaataatcaacaattttataaaggagatggcttattcaaccatagcccctccaacatatctactggaaattctgctggttaactttatctctctctctcttaatttagactttcaacctatgaaaatgtaaatacctttgaaaaaactaaactatcagtcatttacatcytctcatgaatgaaatgcagtgtagggagaggagatggcaggacacagcaaacaggacacatttgcctgcttctctcttgcctaattcttcctgacctgtatttactgatgcttaataatacttgtaagactctaggggttcatttcccatttcagcggaaagtacttcactcaacaacaatattctcaagagtcttctactggaagctagaaagaaataggaatttaagtccatagaatgaaggtagttattcctgcctgtgttgcccacctgttcacaraaagtacctttatgcttgaaaacattaggttctttggttactgcactgtagtttcaaatggatcctccagatggcattcatgtcttactcagaaagggcactgccattgtccccaaggcttctgtctactaattctattggtcttgtgttttgcttgmttgcttggcaaaaaaaaaaaaaaaaaaaaaaaaaaaatggagctattttctgtctatataaatctacttatatgaataaccattaaagtgattttgtatatgcattgttgtagtgtcagcagtttaaagaaacagctactttgtttctttgacaaggtcttaacaaggactaccctgaagaggccccctctgaaaggttttatttatacaaacattgtcaggaaaaggaggtcaggacactatctctaccaagaagcaggaaagtataaaaacttttaaaaaatctccatgccttatcccccatacacatatcccccatacacacaccctaatacctacttgtgagtagaacaaattgcttccccacaaaatgctatgaagttgatttctctgaagatttcaatgtaattaaataaatattcctagtttcatagatgatagtgtaaaagatttcaacatttttaattcattggctacaattttataaatgtaaaaattatgaattatactatgatttaactatagcaggtactacaatgtacgtgttgtgaaatgtggcatctattaaccaactaattatgtagccttcaaagttagattaaaagagctgtgtaaaaggtgattctctaggcactgctgaagctgcaactgcagcttcaggctatagtactatcataatcactaagaaaacagcatttctatggctagaggctccactggtcgaattatggttgtcactcttgcccaaaccctttttttttcaccagcaggggccccaggcagtttgaaaatccttctgttgttactgttactagtttaaccactcttcagttattaatttagcaagaatttattgagcacctattggtgaaaggtaccaccttggctctggagacaccacagtgtggaaaaacacactctgtgggcagagagtctgccgtctgctaaatgaggaccagtatcttttccttgggccatgagggtccctctccccggatcgtggttccaatcacagcctgagggccaggaggctgggacctggtttgggccagaacttcttcataaggattaagccctctctcccctttacctccagaggttggaaacatcttcccctgtagcaaggcagtcaccttaaagctgcctctacttcccgttactcctgctacttctccgacccttctcactaccctctagttgttttaactcagtcatggggatccttgacacatccagacagagagagagagaaggcctaaatttccacaagcagtagcgacttcccaggtacataaagtcccatccttcaaggaagaggatgtgtggttccaacctgaatacaggttcctaacttggtaagttgaaaacagcatgctgcactctggctacctccttaaaacaataaccatatcctttgtggaattattatagaagtaatttaacatggaaggaaaatcattgcattaaaaagataattcatttaaatattaactttgggagcatatctatctatggtaagggcttttcttacataacaggattctcactggaagaggtattcactatattttaagattccaagaggcctggaccatatggaaggctacagaataacagctcaaattttattgtgcattatgatttctaaaacatttccacatcaatatgagcttctaaactgtatgaggtaagtaaggccaaacaggtctccattgaactaggaaacactagaaaggtcaagtgactggtttgaagccacacaactagttataatgtttaaactcatttttccttcagaaaaattcacggtccagctaatcagaaacatcagcaccaaatacttgcagagctttttacagcaaatgaagcacttttatgcattatgtacactttgacataatcttttaacttttgatcctaatatctcatgcatagccagggttgcatcatttcttttttgagttaaagtgacttcactccacccacatccttggatgcagaataaagcattcattgcatcacagaggcttctcagaaccccaaagttcattgtccatgggcccttggggactggattataaagtcaagtcctactctccagtcagtttcctgaaaatatgtttggatccttggatgagaaagtcctgccaaatctcaaatcctcccttttatcttttgatgggattgtcagttctttaaacaatcacctttccccgggattttgacaagagatatgaacttgaacatgggatttaaaaaatgtttctctgccatatgaaagagttttgcagacttactagaaagcacaaaaaagtctttgattatttcttaaagcaatatatgcttattaaagaaactagaaaagtagtaagaaaagataatccttggatccatcagtaaaataaaatccctgttagggaaaaataaggcttatgtcaaaatattgtcaatgataaaaggtgtagcagtgtcatgtaaagattcctgaaaaaacagatattgtaaactagaaattttaagcagcctagtattttattctttaagttacaaaatcaaccgtctggctcagtttacaggagtaccgagaatgacattacactcccttctgacattatattatgtaggtaatttgatgttgttgtggctgatactggctcattaatccaagccaatgatacattgtctctcatgttgaaagaattgcatggaatgtttctcctgaatcaagctctcagagaggactgtgctagaaatacctttactggaggtaaggactggcctgctgaacctgtgagtatgtggattcattgtcagtccttccacagtgaccactgctggataccaggctctgttctaggcacctgggatacaggaatgaataaaacacacaaattcctgcccttatggagaaacaatgaaccaaatcaataaattatatattagaagataacagtgccaaggagaaacagagagcaaggaagagagatagactggagaaattggtaagtgtgccattttaaacaggatcagggaagaataccaaaaaaggtgatggagccagctctgtttctcacccaggcaaagggaagaagtgcaagggctctgagcctagggcatgccaggaatggccaggagggaaaatgcagagagggaaaatacagcagaagatgaggacaagttgtataggtcttgtgaagaattgcttttactgtgactttgggaatggggtatgtgaggaagaattctgtccaaggaaattcagggtagctatctatcgatatggattaattactaattgcacattactttgcctttaggaaatagagcaaattctgtttcctgcaatatgcacaaaaccagattgacatcaagttattccatgtgtaggccgggcccagcaaactctgtgttcctgtggccacactctcatgcttgcagaattcttcccagattcctcccagagcatttttaaagtgcccagaatgttgacctctgcttctgacataggctttgaatgttttctcattctttggacactagtttgtactctggataatcctctgggcagaaatgacatgacatgtctaaggcagagcctataaattggggataataacagtttacattatctagtactcaccacttgccaagaactgagctgagctgttttcctagattccttcatttaaccctcatagtagccctgtgaggtaggcactaatactgcctccattttgcaaatgaggaaactgaggcataaagtaaatttgcccacaactacctggctcttaagtaatggaatctcacagacactcaggcctttgaatccagagtctatattcttagccactaaaattaagtgaatgtagaagattctttcctctaacttctcacattgtcacttgtgtgaaccataaaaagtttaaaattaagagggaagtgtaatgtagatttccatctccccacccctgataaatgaagtaaacctaaggatgcagttctcattttatttctagacactttagccaagcaaaagtccttatactgttattgtcgaatggtaccaaggctgagattcctaagtgtattttgtgctagaatacaacatggcgctactcacattacaatctcagaagccctctgtaatgacctgaaggatctgaaggacagaaactcactttaagaaccactgacttcaaattatttttgcatgcttctctaatgtttataaaatgactctagtgaatactttctcatctttaggaccttttaatatatcttattcctcattaaaataaatttgagcatgattccaggctaaacaaatttcttaaagacagcaatggcaacatgcaaaatatctccatctagtgttttctcttttctaaacaagaacaaattatcttggaatctgactaattttgctccaggaaaaatacctttgcacacagtacccggcacaaagtttgtgttcggaaagtgctagtggtaatcacacagtcattatttctttttctattttttttttttgagatggagttttgctcttgttgcccagggtggagtccagtggcgcaatctcagctcaccacaacctttagctcccaggttcaggcgattctgcctcagcctccctagtagctgggattacaggcatgtgccaccacgccccgctaattttgtatttttagtagagaccaggtttctccatgttggtcaggctggtctcgaactcccaccctcaggtgattcgcccgcctcagcctctcaaagtgccgagattacaggtgtgagccaccgcacctggcccacagtcattatttctatcacttcacgctgagcagggtgttgtgagttctgcacaaattcatccacactctccaagggctcccagacgtctctcaccagaacaggagctctctgtccttgggagggatttttctccacccacaacggaataagatgtagttcatcttccctgggaaatgggggatttcttgctttcctccacattccttccctgacattcagtctgcatgatcaaagactctctcaggcatcaggaagaaccttccattggtacacacacacaccacccagacattctggcagcaccgccctttctcactatggtccccaagtgttctcagactacagaagaaaccctactggtccacatactcattttttctaccttttgattcccatctattatgtgtttgtgtcccttagatatattgaagtcctaaaccccgctgcctcaattagtgaccttatttggagacagggtagttgtacatgtaagcagttaagatgaggtcatactggacaatctcttaattcaatatgactggtgtccatataagaagaggagaagacacagaggaaagacagccatgtgaagacacatagacacacacaggggacagcatcatgtgacaatgtaggcagagatgggagttatgtatctgcaagctaaagagtgccaaggatttctggtaataagcagaaactgggggatggggtgtgtgggttagggtggcggggcaggcagagagagagaatggccttgccagcaccctgatttcagacttctagccttcagaactgtgacagaaaaaaaattctttttaagccacccagcttgtggtactttgttacgatgaccctagaaaacttaatacagcatcgcagggccaacctcagttttaacctccctatgaaattgacagttttttctaaccagtggctcttggtctctcaactcagcaagcacaggtagagaatgggacacgaagacccctcccttcccccccatctataccctattaaagggagaaatgggatttgcagatctcagcagagatacagatgggaagcttatcatgtgtgtgaatacaatagaacctctgtggtagggagttaagtacagagaaaatgttgtgaacagccagtttcagtgtggctgtgtttcccatctgagtctaccctgtgtaagcaggtgctcctg

SEQ ID NO: 96338 - DNA, 13201 bp, Homo sapiens
gacccatcttcctgatgcacatttgctgtgcgagccagagtacagtcataacacggtattcgcatttcgttttctctgtctcactgagacaacaatctatactgttttggcaagtttgcattttagtattaatttataattagggattgttcaaacttcagatctgtttacaggttgtaaaaataaacttcggtatcagtgcatctacagaagtgttatttggtaatccaaatattagagttttcccaaatccaaaaacggtcagaaataagtccattatcaatataatttgaagaagatttttagtagtactgtgaagttcgtgcttacctggatgagaagaataaatgacacggatacactcctgagaagacactcgttaaacattgcatcggagagctgcctttgataaatgtgctgttaaacacttgaatgaagagaatggtggcagaatgagtgagcaagcagattgccccagaggggccggtaataatcacgtgagggataatcagattcctgcgtattcagcatcttctctattcatgtggagtgaaagctggtttttatacaggagatacgtaaagtaggccccacaaataatatttttaaaatacaaaggatcaccacaatcctctattgaacatataaggatcctcagatttaaataagtactttttttttttttaatcagaagaacattgttgtttgattatatgtttttaaaaacctgaagcttttttggtggcaggacctttcaataaatatttatttggtcaaaattttttattttgattttattaaatgggaagaaagcaagcagaaatagtaaaattcagtaggtttaaaacaatctataaatgtattttatttccaagaaaacttagggtctcaaagcaagattttaaagtgatttttgagaagacttgggggggacaataatagacattcatgtcagatcccatatgggggatttttaaacatttctttgaactttgaggcctgatttaggggtgggattttattgctttttgttttaaaggatgaaattttgtggggttttagtctttgattcagtcagtatttggtttatgttaaataaaaaatcagtatcatggaaaagatatgaccataatttagtctcctcaagtgaaaaacaggagtaatgtttcgttgcactttgaaagatctgcttcaaggcataactcgtgtagttgtctggtttcagggatagctgtttgaattgtcattctaaagtaggtcatcaggttcacttattatccgaccttaatctgggataaaggttttggtatttgcccacttctagatagaatgaatgaaaacaacacaagcgttttatgagcactctttatcagaaaggtatttcctggaccagaaatgggcaatagttacaatagttgatcctctgttctggaagctttgaaatttatcagagaatgaagtcattcagtacatctgataaagttttgttgttgttgttgttgttgttgttttaattgggcaaccctcagaactgaagaggttcagagaactttccaggtttatactatacctcaagaccacatagattagctactgcttattctttcacatgggctaggcctgttctcctcctccagacctagtattctaagttattaccacatagtatttttatgttacccatcatctttaaaaacattataggctgggcatggtggcttacgcctgtaatcccagcactttgggaggccaaggcgggcggatcatgaggtcaggagatcgagaccatcctggctaacacggtgaaaacccatgtctactaaaaatacaaaaaattagccaggtgtggtggcgggcgcctgtagtcccagctactcaggaggctgaggcaggagaatggtgtgaacccgggaggcagagcttgcagtgagccgagatcgcaccactgcactccagcctgggcgaaagggcaagactccatctcaaaaaaaaaaaaaaaaaaagactcatttatccatttacatttattctcagatgataaaatatatactgatactataactttcttatggtatcagttttctttattttcttgaataaaattacttctaccttcatttggtctttataatccactgtccacagcatcttcctttaaaccaatagtcccagaagagaccctctgaaattctaggactggatattaaaatgcctgaacctgttatctaaatcctttttaagaaacttaatgttccagctcttgaactacactgtggaacagtaatttgtgcccaatttagtggaagataatgaggctcactgtaaacactacattgtcctgcaaagtaattctgatgagagtttactgacttctagagccattctctttaaccgtctgcaggtctaaggattaactatatttgtgatttgtaataaaactgagttgtacaacactgcctgtgtttgtctggccaagacatttgcttcacttttaaaatgcacgttatctttggagaggtgaattattctacaaaatgcaccctaaatctcattgtttaaaaccttactgatctaataccatctacacaaaaaaatgttgtacttgcagaacttagtttataaaaacaaagaatgtgtatttcttcaatagccgggtatttggattgttctcttgataatatttgaatgtgactcttggatttaagtgcactattattcatggcttatacaataaaattgcactgtatggcaaatatgtctataatgtatgctttgctgaaacctcaagagtgctgtaaggtacaggtttccatattgtgaacctgtgtacgcacacacacatatacatacagtcttagggaaaaaaaaaagcagaacttttgtaagtctgtgtaacattttaatattgtttgtaatattcactaggtgataatttcccctgtaccctataactgtaatcattcaccttgggttggccggtttgtcaagcttggtttactgaatcaagaaagagtcttgtcgaatgtggtactgttcttagtgtgtaatatttgcgtatggtgttcctctgcctcagaggacagttgcacagatggctagtgttaaatttctatagacgatggtaataaaatctgaatatatttaagtgctaataaattaaatctgtgggcttatttgaattttttttcaaatattggtgaaggtttggatggtgtttcaattaaatctatatattttttaccttacattttgaaaaaattgagatctgcaaaaaggctgcaaaatagtacactgatctccctagattgttcctatattgaatgattggtaaaattttccatatttgctttaataccacgtgtgtgtgtgtgtgtgtgtgtgtgtgtttgttacactgttattttgctgaaacatccgagttagctgcagacattgtgaccctgtcttctaaatacttcacaggaatctcccaagaattaggaatatgtattctacatattattgatttagtatgtattaatataaacacatgactcattgagggtaaaaggaaagctctttcttagagtagaatgccagctattaaatgtagaaagaaaatggaattaaaaagccactatttggcatattattacagtaatcattgacttaggcaatgcctaacagtgaatggcaaaactagcaggtgaaaatttgtgaagaacagaatataatctccaaatagccttccacaaaatagttactagttacaaaggagaaaatactaactttatagtgaaaggaactggtagatatcaccttatttcaggaaaagttaacatcattagtaatgggacatatcaacatcatgtgccttctgatatgatccatccagaaacagcaccactgttggagggaaaaagcagtcttaggagttttatagtttaaaatcttacatttagatcttaatccattctgtattaatttttgtataccgtgtaaggtaagggcccaatttcattatttgcatatggatattcagtttttcccaacactttgttgaagagactgtccttttcccattgtgtggtcttggtatctttgttgaagattatttgaccatatgcatattcatttctgtgcactctattgtgttccattggtgtatatgtctgtgttaatcactggaaggctgaggcaggaggatcacatagggccaggagttcgagaccagcatgggaaacataacaagatcctgtctttacaaaaaataaaaaaattagccaggcatgatggtgctcatctgcagtccttgctactcagaagctggagtgggaagatcacttgagcccaggagttccctctccctctctttccatggtctccctctgatgccgagccaaagctggactgtactgctgccatctcggctcactgcaacctccctgcctgattctcctgcctcagcctgccgagtgcctgccattgcaggctcgcgccgccacgcctgactggttttcgtatttttttggtggagacagggtttcgctgtgttggccgggctggtatccagctcctaaccgcgagtgatccgccagcctcggcctcctgaggtgccgggattgtagacggagtctggttcactcagtgctcaatgttgcccaggctggagtgcagtggcgtgatctcggctcgctacaacctccacctcccagccgcctgccttggcctcccaaagtgctgagattgcagcctctgcccggccgccaccccgtctgggaagggaggagcgtctccgcctggccacccatcgtctgggatgtgaggagcccctctgcccggctgcccagtctgggaagtgaggagcgcctcttcctggccgccatcccgtctaggaagtgaggagcgtctctgcccagctgcccatcatctgagatgtggggagcgcctctgcccggctgcgaccccgtctgggaggtgagaagcgtctctgcccggccgccctgtctgagaagtgaggagcccctccgcctggcagctgccccgtctgggaagtgaggagcaccccgcccggcagccgccccgtctgggaagtgaggagcgtctccgcctggcagccgccccatccgggagggaggtgggaggtcagcccccgcccggccagcagccccgtccgggagggaggtcggggatcagcccccgcccggccagccgccccgtccgggagggaggtggggggtcagccgcggcctggccagccgccccgtccgggagggaggtggagggtcagccccccaccggccagccgccctgtccgggagggaggtggggggtcagcccccacccggccagctgccccgtctgggagggaggtggggggcgcctctgcccggctgccccttctgggaagtgaggagcccctctgcccggccaccaccccgtctgggaggtgtacccaacagctcattgagaacgggccatgatgacgatggcggttttgtggaatagaaaagggggaaaggtggggaaaagatagagaaatcagattgttgctgtgtctgtgtagaaagaagtagacatgggagacttcattttgttctgtactgggaggggttcttctgccttgggatactgttgatctgtgaccttgaccccagccctgtgctctctggggcatgtgctgtgtccactcagggttaaatggattaagggcggtgcaagatgtgctttgttaaacagatacttgaagacagcatgctcgttaagagtcatcaccactccctaatctcaagtacccagggacacaaacactgcggaaggccgcagggtcctctgcctaggaaaaccagagacctttgttcacttgtttatctgctgaccttccctccactattgtcctatgaccctgccaaatccccctctgcgagaaacacccaagaatgatcaattaaaaaaaaaaaaaagaaagaaagaaagaaagaaaagaagcagagttggactcagcgggaaaataggcgtgctaccacctcaggagagttccagggaagaaccccacccscactccagtgaggtcacaatggctggagctctgaggggcccaggctccctgagccaggaggagaggagaaagtccaaggaaagatggctggcagtcacccctacttcaacctgcctgactccacacacccatcgccgccctccgctccacccagcctccgctggcaccagcgctgccagccctctggtgccaccaatggcctgctggtggccctgctgggtgggggcctgcctgctggcttcgtgggccccctttctcgtatggcttaccagggttccaacctgccctcgctggagctgctcatctgtcgatgcctcttccacctccctattgccctgctacttaaactgcgtggcgacccccttctgggacctcctgacatccgaggctgggcctgcttctgtgccctgctcaacgtcctcagcattggatgtgcctacagtgcagttcaggtggtgcccgctggcaacgctgccactgttcgcaaaggttcttccaccgtatgctccgctgtcctcaccctctgccttgagagccagggtctcggtggctacgagtggtgtggactgttgggcagcatcctaggactaatcatcattctgggacctggactctggacactacaggaggggaccacaggtgtctacaccaccctgggctatgtgcaggctttcctgggaggcctggcgctgtccctggggcttctggtctatcgttctctgcactttccctcctgcctcccaacagtggccttcctatctggcttggtggggctgctgggctstgtgccaggcctctttgtgctgcagacscccgtgttgcccagtgacctcctgagttggagttgtgtgggggcagaggggatcctcgccttggtctccttcacatgtgtgggctatgcggtcaccaaggcccaccctgccctggtgtgcgctgtcctgcattccgaggtggtcgtggcccttatactgcagtattwtatgctccatgagactgtggcactttctgacatcatgggggcaggggttgtgctgggcagcattgccatcattacagcccggaacctcagctgtgagaggacagggaaggtggaggagtgagatagaacttgggagcccgggggttgggagggacagggataaataaagacaaagactgaagacaaaaaaaaaataaaagaaaaaaaataattataataaatcctaggaaagagtgaaagtctaacttccatagcacattataatattgagatgttcagttataataaaaatatcacaaagcatgcaaacaaatgagaaatctggcttatttacaggaataaaattaattgaactatccttaaggaatcccagactttggacttactagacaaagactaaacaattgtcttaaatatgcacaagagttaaaagacaactaaatgaaatcagagaaatgatgtttgaacaaaatgagaatatcaataaaaatataaaaattatagaaaggaaccaggtagaaattttgtagctgaaacgtgcgacaactgagatgagaaattcactagaagggttcgatagagtttgtttgttttttgttttttgctttttttttttctgagacagaatcttgctctgtcacacaggctggagtgcagtggcatgatctcagctcactgtaacatccgccttctgggttcaagcaattctcctacatcagcctcccaagtagctgagattacaggtgcatgccaccacacgcagctaatttttgtatttttagtagagatgaggtttcactatgttggccaggctggtctcaaactcctgaccttgtgatccacccgccttggcctcccaaaatgctgggattgcaggcattagccaccacgcccagccttccgtagagtttttgatcaggcagaagaaaggatcagcaaatttgaagataggattattgaaattatccactctgaggagcataaagaaaaagaataaaaatagtgaatagacttcaagacttgtaggataccatcaagtggaccaacatatggtttatgagagtcctagaaaaaagcaaaaaagtgttttaaaaatgagggctgaaaacatcccagatttgatgaaagacataagtgtacaaatccaagaagcctctacaacaacctctaataccataaactcaaagagattcataccaagacacagtatatgaaaactatcaaaaatcacaaagaatcttgaaagtagcaagagaatcaactcatcacattacaagggatcctaaatgagattatcaactaatttttaattagaattaatggaggccagaagacaatgggatgatatagtttaaatgttgaaagaaaataacctgtcaactgagaattatatatccagcaaaactgtccttcaaaaaataagggagaaattaagacatgcctagatttttaaaaagcttagggatcttgttactgcgagatatgcctgacaagaaatgctaaagggggtccttcagtgagatgaaagaacactagacagtaacttgaacccatatgaagaaagaagtatctccacgacagataaattctagggcaaatataaaaaccagtattattataactttagtttataacatcagtttttattttccataggaattaaaagacaaaaacataaaaaagcaattataaatctatgttagggagcttgttaccagtagatttgccatacaagaaatgctaaagggagtccttgaaggtgaaatgaaaggatggtagacagtaactcaaacctgagtgaagaaataaatatttctggttgctatggtttgaatgtcccctctaaaatgcatgttgaaatttaattgccattgtgatggtattaagaggtggaacctttaagagatgattaggtcataagggctctgccctcatatatggattaatgccattatcatgggagtgagttagttatcatggaagtgggttcctgataaaaaagattctgaaattcagccccggtccttttctgtctcacacactgtcttgtccttccaccttttgccatgggatgaggcagcacaaaggccctcaccagatgctggcaccatgctcttggacttcccagcttccagagccttgagccagataaacttgtatataaattatccagtttgtagtattctgttatagtagcagaaaaatggactaagacactggtaaagtaaatacaatggcaaacataaaaaaacagtattaatgtaattttggcttgtaactccactttttattttctaaggaatcaaaagacaggcataaaaataaatgttattgagcactcaatgtataaagatttgggacatcaataacaaagggcgtgggacagagctgtataggcatacgtttttctatactattaaagttaacttggaataagtttagattagactgtttaaactttaggttgttatgtgtaatgcttatggtaaccacaaggaaaatatctatggaaaacacaagaagaaatgagaagggaatcaaaagatatcactaccaaaaataaataaactaagcacaaaagacagtcattatggggaaaatggggggcaagaaagtaacaaaacatacagaaaagaagtaacaaaacagcagaagtccttatcagtgattacattaaatgtaatcacttttcaatcagaaggcagacaatgacggaatggaaaaaagaatgatgtcccatgtatgcaaggctgatttaaatgttaaatgttaaatcagccttcagttcagccagtcagttaatgtaatccataacatcaacagactaaagaagaaaaaccacatggtcatatcagtaaatgcagaaaaagcttttcacaaaatccaaaactttatgctaaaactcttagtaaactaggaatagagtggaacttcctcaatttgacaaagaacatcttaaaaaaattctgcagctaacatacttaatgttgagaagcttgcctgctgatatcaggaacaagacaagcatgtgcactctcacgactcctttcaacattgtatgggaaattataactaatgcaatgagacagaaacagaaaaagtatacagattgggaaggaagaaacagaactctttgttcacagatgatatgattttctatgtagaaagtctaaaataagcaaccataatctcctagaactaataaacagttatagcaaggttgcagggtgcatggttaatttacaaaattcaattgctttcctatctgtcagcaatgaacaaatgaaatttgacatttaaaaatatcatttacattagcagctccccaaaattaagtacttagatataaatctaacaaaatatatacaaaatctacatgaagaaagctacgaagttctgatgaaggaaatcagagatgaactaaataaatatagagatattctatgttcatggatgggaagaatcaatattgtcaagatatcagtgcttcccatcttgatctagattccatgcaatctcaatcaaaatgttattttgtggatagtgacaaacttcttctgaagtttatgaaaagcaaaacccataatagccaacacaatattgaaggagaagaacaaagttgaggactgacaatactcaacttcaagatttattataaagccacgttaatcaagaccgtatttcttgcctagcttctggtactttgctggcagtctgtggcattaattggcctgtagtagcattaccttgatctctgccttcatctatacatggcatactccctgtgtgcatgtctctgtgttcaaatttccccttttattttctagtcttactggattatatcgcaccctaatgacctcatctcaactaattacatctgcaataaccctatttccaaataaggttatgttctgggagttaggacttcaacacgtgaagttggggggaggacacaattaaactcacaagaaataacatggtagtgaataacattctatcctcaggtagcagaagtattacagacaaggaatgcatagctgcatacagaatatatacattttggtgaggacaaatcactccttcatgataaaagaggtacaatgtaatcaaccttctaccaggtggctggctgcttccaaccctcagaaaagagtgccatatcaagagctcagcattagattctggtgttgataggttgggtagtcagcagtggcagtagccagattggtcttgcccagaggaagtccatgttgctgagtctatgcatagcctccatccctaccacatgactactttgtatttggttccatttaccaggacctggggtggctggagaaagaggctgactgatcctttggctctatgacccataggctgtgtcaacgtgtccacctgattattgaaaacctcctctgtattagattccctttggtgaacattcacaccgaaatataaaatcttcacactctatgcccagtctgaaaggtgtatttaaaatacttctttagtcttccttgtcattaatcttccaatcttgttctttacaatttcctgggcagccagccaaaccattattcactgtccatgaattgatgtagataagtacttttttggccatctccaatgccaggaaagtaagcaaatatacccttaaagttatttggaatatttctgctcgacaggtccaatatttttcttcctctgtgtgccggtcataaggaaatcttcaggacgccagtgatgccagctaaacgagagcaggcaatgcagcagaagtaagtgtgaaagggatcggaatcacctgcacatacaacattctagtgcattctggacttgctcaagcaccatccactataccatttccacttgggatggattgctattgtatgcatccaactgtttagcttggaaagtcagataactcccagttcataatgagtacctcaggttgccggagttcttgatgactcatggtctaatagcaagccagaagctgtttttcaaagaaaaaatggtaatctgcagaagggggcgttgttttgctgcaaaatcttagagttctggactgttatctactgggacttgtcagaggctacatacagcattcttacttgccacagacaccaaatatcactagatcgctgagtagcaatgcagcttgcactgcattctagacttgttgcctaggcttctcttgctctcgtagccactcagaaccagcagactgttgggttactttatagtaacttaagtagctctaagaagtatactcaaatgtgacatatgttgcctccaaaatccaaaaagggtcatgatgcatcactgcacttggtttttagtaataggtggtacaaggtgcagcaacttctctttcaccttggatatcttaacgttctccagaccatcactcaccaataatttcatcaaattggcagggccctgaatttttgtggggtttttcctctaccctctgccttgcatttgtcttcctcagacatctcaggtacttgtcacttcctgttcatcagatccaatcagcttcatgtattcaatgaagtggtccggtgtgatagtctaagaatgtcaaaacaattgagatttctgcattctatatatggcagaggccagtagtgttgacatagccctggggcaaaactgtgaaagtagactcggtcctgctagggaaaagcaaactatttctcatgatccttgagaaaataaatttttaacacatttgccatatctctcattgcattctaggtaccagtgactgaattcatgtgctccggtaaaggtagagagacagattcctgtcacttcctactctgctgtcttcttgatgtcactcttgaggttgagtcttcacaagatagtacctgtcctcctaggatttactgccaccacctctcaaggattctatgacaatgaatataaatagaatcaaatctcaacatggttcctgctgtagttccccaaggaattgttcacagcagcttcaggacttggctaatatgtccaaggagaacatgtctgggaatggatcttgagggagcattcggacttgtggggaaaagattgggaaaggaggagcaatgatttggagacactgtcccatgactcagaatttagcgtcctggcaaggacatctggagctgatgcttggaaaaatgatggtctttagtaaa

SEQ ID NO: 96339 - DNA, 81793 bp, Homo sapiens
  misc_feature (1)...(81793): n = A,T,C or G
ctgggagtaggagggactcctcagtaatgaccctcacctgcttgtggccacgtgctgtctgccaggtgcccaccagctgccctgacgatgacctccggggctgcttgggcttagccccaggtctgtcgcaaggcctagctgtggtctccacagccccgctgagtcccacaggccctgatatggtctttctgcctctcagctacttggagccactccctgttttgggaatgcaggcagtgaggaaggatttgcaggaggggctgcgtctggacacccaccccgcctcctgctagtttctgggcccagtggacactctgctctgcagctgccctgaggggcaggcacttcccacaggcctctccatcccaggccaggacagaggcagggctggaggccggttctgagctcccctccgagcacccacccagagactgcagtggcaacatggtgggcagatgtgggcccagatgtggacaagtcacaggcacagcctccgtcctacctcgaagctctgatgtgggtggaggggaaagggcccccccgactgacagcagctttgggaagagggaacagactccacctcggatccctgccaggaggggatcactgggctgggctgctctgtccccaccccctgcacgggtgccctctgtgaagaccgggccaactgcctgccccaggcctgggggtgggaaggaatacaggacagcccctggcccctggtgacccagttcccagcccggtgcatgtggatttcttcttcctggacacacccttctcatgcctgggccgtttcaggggctgctcaccatcatcccaccacctcttttgttctacagtgagctctccgcatggcagctggagggccgtcgcggaataaaccagatcctattgttttaaaactctctgatccccaccttttccccttattgcttctaggatgaaaaccaaactccagatcacagctgttacagccctctacggcttgcccctccgtcctacatgcgctccttattccagcacgcccaccacactggcacctgccagctccttccacctgccgtggcctgtccaacctcatgggctttgcatgtgctattccctctgtctggaatgcctttccctgcagaaggtgctgacgggatggaggggcagctgctctcactgaggctctgctactttcctccctccgtttagagttccttttctgagtccaccaaatgaccccattgtttccgtcccgacacagagctgtgaggggtggggcactggtttggctggctttggggcctgaacccagggcctgggggggcagactctggaagcagcgaggggtgggctggcgtattctgcacccgctgagcaggaactccgcctaaccaccagcactcaatgcgggtgaggtgcccagctgggcctccgaacacacggagggcagatgtcggtggggacctacgggctgcgtgcagggaggcgctccctgggagagtcatcagcctttaattaaagtccctaaattgcttccccagccgctccgtgggttttccatgttggaatgttccagatggggcgagaagcgctgattcaattaccctcttcctgttccgcccggtggaggggaaggggcctgggagcccatctccagccctcctaccccagccagaccaggatggcgtgggccacgggttggggtcctcacagccctgggagtccaggaaggggctcggagaagcctggggaggaggctgcttccgcctcgagggttctcacaaagcccctgccctcctggcctgctgggatgggtgggtgggaccaggtggccgtgctctccgccctaagccttgcacacacgggcatggaagccctgagcatgccctggtcccagcagcccagccccaaaggggacacagggaagggtcagcccctgcacccaccctctccacaggcctgaaaatatttatgaagccccgtcgtagaggaagagaggagactagagagggccagcagcttgcccgcctctcactgcaccagcgcttcctgcgaggcccaaccctggggagctctgagatcccccgtgtgcagggagtcggcacgtgggggcaacctggctccctccctcccctggggcaggggtcctcactgggttgatcgcctgactggggggtcctcagagctcagttggggctgctgacccctgccctctgtggggggacaggcctggggcccctggttctggacggcctctctgcctggggcatgcctctctgcccggggcatggggctggagggtcagggtgaggcgggctctggcttcctccctcccgggctcctcagtgtggccgtgcagggcagagccagggaagggaaggggaagccggcctccggggtgaagcctggattatggggtgccatgtgggcagcgcctgtgagtcccctttgtccaggaggaggggtgctttggggaaaggcgtgtttcccctgggccatgtggccagatctagaggcccctcacaagcctgagatggtctagatcccaggctccaggagggggccgggccacaggtgagaggggcttgagtgacttaaaatgaattgagtccccttggagctcctgtcctcactcctttcctggctccccaggcctgagccccttctcctatctgccagactgtcccgggcgccttgttcccctaaggagctgcggggttgtgatttccacatgggtccctctgcaggggctcggccatggcccaggagaggccagggaccccatgaaggcctgagatgctttctccagggcggccacagcagcccgctgctacactagtctctgtccctgcagaagctatgcagggaggggctgcaaatttgctgacctcaggaatgtggtgtttcatttctgcgagatgctccctttctagaaggttcctctcaaactggcaagggctgacttctgaggtctctgtcattgggaccaacacttatgctggagggtgaggtggaaggcaggggtgcaggagcagcctcgggttcctggatgaatccgttttattctgctttatccattgtagccctgggggcagctctgggcagccgggagccatcagtgcccctgggcagggccagcgccagcgcccctgcaggaagtccccactcctgaggcccagactcctttcgtgtcctcaggggctctcgggttctgagcttgcccttcctgtgtcctgcatgcctgccttattcccttggctggcacgtgagcccctcctccgtctgtgctcccgggtgcagcgctgaggctctaggagtcggggtggagcccgactgagggtctggagaaagaggaggaggctcagggacagtggctgagagagccccacagtggacttccttccaccaacaggcacccagggctagagtgtgtgcttctgagaactcacagggcaagctggggggaccacacggaggcccagcattggcgagacgagcgaaccgcccagctgccaagaaagcaaagcatgaactgcagagggacacggcacagggctggggcggggagctgaagctgggaagagccccggcaggagagcctggtgcagagatgacgtttacctgcaccctggagtgggaccagccatgacggtcaggcagactgccagtgcatcaaggtgccggggagacggacaaatggggtggggtgatggaggctggctaagaaacattctgggccgggcgcggtggctcacgcctgtcatctcagcaccttgggaggttgaggcgggcggatcacttgaggtcaggggttcgagaccagcctggccaacatggcgaaactccctctctactaaaaatacaaacattagccgggcatggtggcctgtgccggtaatcccagctacttgggagcctgaggcagaatcgcttgaacccaggaggcagaggttgcagtgagccgagatcgcaccactgcactttagcctgggcaacagagtcagactccatctcagaaaaaaaaaaagcaaagtggggacggaagggctggcccaggtggcataagggacccacttttccagcacgctggatagggcacatctgagccccactgcgctgctggggcacttagtatttctgaaggcaagagttttgtttcctgacttagaattctctgcagatactgcctcaagatggttctttctcaggactatccatctgacagtgaagatcctgggcccaaaatgagggaatgagggccagagacctaggttaaaaaccaggatctcaaaatgcaccctccagattttaatttatgtagccaaggtgtgtagtaggctatgccatataggatttttggtttttctttttctttttctttttctgaggagtttcgttcttgttgcccaggctgtgagtgcagtggcgtgatcttggctcactgcaacctctgcctcccaggttcaagcgattttcttgcctcagcctcccgagtagctgggattacaggcgcccaccaccatgcccagctaatttttgtatttttagtagagacagggtttggccatgttggtcatgctggtctagaactcaagacctcaggtgatccacccgccttggcctcccaaaatgttgtgattacagggtgagccactgcgtctggccttttcttttttctctgtagagacagggtcttgctctgccgcccaggctggagtgcagtggtgctatcgcagctcagtgcagccttgaagtcctgggttcaagcaatcttcctgcctcagctttctgagagttggggctacaggcacgtgctaccacgcctggctaattttttctatttgtttctttttgtagaaatggggtctcgctctgttgctcaggctggtctcaaactcctgggctcaagtgattctcctgcctgaagtctcccaaagcgctgggattgcaggcgtgagccgctgtgcctggccatctaaattcatgccagtgaactctgtgatgttttcatgacacaaagtcacctcatgatgcatttttcagaccataacctgtcgttaagtgaggcacttaattggaggagggtgtgtgaggcacttaattggaggagggtgtgtgaggtgtgaggcacttaattggaggagggtgcatgctgggctgggctgcccggggccagtgcagggagctccagggctggtcaggagcagacacgagccaggcaagccaaggtcagagcctttccaggggtttccaggggaaaggcagggcagggcggggaaatagcttgggcctggtcagtctgagtaattccggtgggctctgggacctcggctctccctacttgtttggtgcttggcccttggtgactgagggcaggggacatgagcttgtggtgtgagagttagataaggaggtggttcagaggcaggttctggagggcagggaagatagaaacaatgtagctgttagttcggccctgtgattaatggatgccaaatggacaaatgccgcatctgagaaaacacacaacaccaggcttgtgtccaaggctctgtaccggaagccattccctctgtagccccggccccttgccaaaccatggaccgcagcccccgtcccggggacgcgtctcagatgtgaactgtgctcaggttcattctggtcccagggctgggcccatgttggtagggggcggcccctccctgagcagggctggtcctgccataccccatcccactggtggtctcccagggcgggggcagggagtccagggaagaccgtgggtgagttgggggcatggcttgtgccgagcacgctggcctgggtaaaagaggtttggtcaaaaccctgggtgggtgaggatggatatgccaggcagggcccacggtggtccctggaggctgcctgtctgctggggttcacaggcagggctccaccctctggaccagggtgccaagccctgcatctccacctgggctgggggtaggtcttggctctcagaggactccggcatggcggccactggggaaacaggacaaagagcagaccaccgaggccacggagaccctcaggtgcatgtgccacctgcagacgataccctgctctggagccctggggcctggacgttcagccccacctctttttttttttgagacagggtctcactctgtcgcccaagctggagtgcagtggcgcgatctcggctcactgcaacctctgcttcctgggttcaaacgattctcctgcctcagcctcccgagtagctgagattacaggcgcccgccaccatgtctggataatttttgtattttcagtagagacggtgtttcaccatgttgtccaggctggtctcgacctcctgacctcaagtgatccgcccacctcggcctcccaaagtgttgtgattacaggcgtgagcgrgccagccccacctcttgaggaacgatgagactcttctgatgcagtcgccaacaacgagcgctgctgaggcttccagggacatacaggacaagatcctccctctcaaagccaggctctggctcggaggcagaggaattcctttcatgctgcctaatctcagccacattgtgtatggttttcactggagaagcccccgaaaacagtcggtcaaccaaaacagttaacacaaaactattgccagaaggatgccatactcaagtgttctgatgacgggaggcaagctccaycgtggggccgcagagaacaattgyggatcttgttctcctggtctctgctcccagcrctccgtgagcgggccccgcgtgcagggggattgctggccagacctgacagcctcrcacggtcagatactatcatcttttctgtctcccacaagggaggacgacggcctatctgatggaaagccagtctcctgctgaggatggatgcgcagctgtgcagcaggggaggggactcctgtcaagcaygcggagtttttggggagaagcatctggagactggcccctggtttcacagtctggactctggttgggaaggggggcagcccccttttgtgggagtgatcagaggttctagggcgtccatcactggctggccctgttggggtgcacagttgggggacgcatgcaggcctggggagagcacggcaaagggcccagaattgctggcaagccttggacgagccaaaggacgcatattcaggactcccctggtctcggggaggtcactgcctgactctcggtgagctcagaaagagcccagaatggccaggtgtggtgactcacacccgtaatcccagcactttgggaggccaaggtgggtggatcacttgaggtcaggagctcgagaccagcctggccaacatggtgaaactaaaaatacaaaatttagttgggcgtggtggtatgcaccagtaatcccagctacgtaggaggctgaggcacaagaatcacctgaatctgggagacggaggttgcagcgagctgagatygtgccactgcactccagyctgggcaacrgagtgagactctgtctcaaaaaaaaaaaaaaaaaaamagaaaagaaaaaaaattactggaagccccaaagagcttttgtgtgtgaattatatccaaggctggctacataaataatcttcagggcctagcacaaaatgaaagaaaaaaaactgctgtgaaaggtgctaacagaaagctttgccctttttccatgatccctttttccttctctccttcctctctcagcttgtcatggtggttctgtttgctacttaatgtcattctaagtaaagaaaaataaacatttaaaatattaacaaacactttacaattcattttttttttgaggcggagtcttgctctgtcacccacgctggagtacagtggcgcgatcttggctcactgcagactctgcctcccgggttcaagcgattctcctgcctcagcctcccaagtagatgggattacaggcrcctgccaccacgccaggctaatttttgtattttttagtagagacagggtttcaccatcttggccaggctggtctcgaattcctgacctcatgatccaccctcctcggcctcccaaagtgctgggattacaggcatgggctaccatgcccagccttttttttttttttttttttttgagatggagtcttgctctgttgcccaggctggagtgcagtggcgtgatgttggcttactggctcactgcagcctccaccttccgggttcacgccattctcctgcctcrgcctcctgagtggctgggactacaggtgcgcaccaccgcatccagctaattttttgtatttttagtaaagatggggtttcaccgtgttagccaggatggtctcgatctgctgamctcaggtgatccacccgccttggcctcccaaagtgctgggattacaggcgygagccacctcgcctggcccatcctttttttgttttgtttttttgagacagggtttcactctgtcacctgggctggagtgcagtggcgcaaactcagctcactatggcattggcctcctgggctcaagcgatcctcctacstcagcctcctgagtagctgggactacaggcgcacgtcaccacgcccagcacccttttttttttttttttttttgagacggactctcactctgtcgcctaggctagagtgcaatggcgtgatctcagctcactgcaacctctgcctccccggttcaagcgattctctcgcctcagcctcccakgtagctgggattatgggaacctgccatcacgcctggctaatttttgtatttttgtagagatggggtttcaccatgttgttgggcaggctggtcttgaactcctgacctcaggtgatctgcccacctcagcttcccaaagtgccaggattacaggtgtgagccactgcaccccagcctggctactttttaattttaatttttatagagatggggtctcactatgttgcccaggctggtctggaaccccttggtttaagtgatcctcctgccttgcccttccaaagggctggatttacaggcgtgagccactgtgcctggccattgggtctgaattaaccccgggctccacgccacaaggccacgggtgaccttggcctgtctgtggctggtttgtggggtgaacaggggctggctgctgggtctgtgtgtgaacacaggctgtggctgctccctgcaaaagctcagggtgtggggctccatgaggctcatcctctcctccccagccacccgcatgctacatttgacttccttttctaaagtgttcacctgtgcaaatatttgtggtcagcccagcctgctgctgccatgtcccttcggccgcctggggttgccgccggggctgcgttctggagaagagcmtgtctctcaaactccgagktttaattcttttgctctccgcagggacaggcaccatctatgttcacctgcacagcacgcacacacaggttctatttacaaagcgactaagaacaacacagtgcaatcaggaacacatcacaactgtcaggaatggttcacagtcagtcatgagagtgtgcgtttgccagccaggagctytcagtgcacacgtgggttgcagcctcacctggtgcttccagccagcagcacagccrsctgctgccccgcccggtgttctggtgctcactggcctccagggctcaggcccccymaaaatggcaaaacaaccctcctgtgattccctgagatcctctttggaccaaaggtgctttaccctttctttccttcgttttcttttttttgaaacagggtctcactctattgcccaggctggagtgcagtggtgcgatctcggtttacttcagcctctgcctcccaggttcaagcaatcctcccacctcagcctcctgggtagctgggaccacaggcttgcgacaccatgcctgactaatttttacatttttggtagagatarggtctyactgtgttgccyaggctagcctcaaactcctgggctcaagcagttcacctgcctcaggctcccaaactgctgggattacagacatgagctactgtgcctggcctcttyytttttttctttttttgagatggagtcttsgtctgttgcyaggctggagtgcagtggcgcaatctcagctgactgcaacttccgccccctggattcaagcaattctctgcctcagcctcccaagtagctgggattacaggcrcctgccaccacgccggataatttttttttgtatttttagtagagacagggtttcatcatgttggccaggctggtcttgaactcctgacctcaagtgatccacctgcctcggtctcataaagtgctgggattacaggaatgagccacyatgcacggycttttttttttttttttttgagattgagtcycacgctattgcccaggctggagtgcagtggtgcaatcttggctcactgcaaccttcacctcccaggttcaagagattttcctgcctcagacttccgagtagctgggattataggcgtgcgccaccacgccggctaatttttgtatttttagtggagacggggtttcaccatgttggttggacaggctggtcttgaactcctgacctcaagtgatccgcccscctcagcctcgtaaagtgctgggattacaggcrtgagccaccacgcctggccttgcctggcctctttcttggaagttacactgcaccggaatgcgattcactggggagagaacgtttcatccaccctggctgggaccagtgctgggaggggttctgggttctggggctggtccctccagttctgatcctggccaccgaccggcaactggtcagtttgtgccctggacgggtgggcagaaaaatcaatggttttgctctgctgatgaaagtggtccggacaactcctgtgccggagaccaataaagccccatggacacaattatttactataaagacgtagtatcgattgagcagttatgaggatgaagtgcaggaaggcactgacatcaggtggcctgctttctccagaaggtgatgggaaagcctagctgtttttctttctcttttgtaaacattttaaaacctttttctggccaggcgcagaggctcatgcctgtaatcccagcactttgggaagccaaggcaggcggatcacccgaggtcggaacttcaagaccagcctgaccaacatgggaaacccatctctactaaaaatgcaaaaattagccgggcgtggtggctcgcgcctgtaatcccagctactcaggaggctgaggcaggagaatcgcttgaacctgggaggcggaggttgcagtgagctgagatcgcgccactgcactccagcctgcgcaacagagtgagactgcgtctcaaaacaaaatcaaaaaacctttttcttatgcagtgcagttgacctgtgaccaacacaggtttgaagtgcctgggtccacttagacatagcgttgtttcttttctttctttcttttttttttttttttgagacagagtctcgctctgtcacgtaggctggagtgtagtrgcacaatctcggctcactgcaacctccaactcccrgattcaagtgattctccccgttcagcctcccgagtagctgagattacaggcacccaccaccatgcccagctaatttttgtatttttagtagagatgggtttcgccatgttggccgggctggtctcgaactcctgacctcggatgatctgcctgctgtggcctccaaagtgctgggattacaggcgtgagtcactgtgcccagtcacactttttcttttcttttcttcttcttctttttttttttttttgagacaagctctccttgtgccccaggctagagtgcagtggtgcaatctcagctcactgcagcctcgacttccctgggctcaggcaatcctcccacctcagcctcccaagtagctgggactataggcrcctgccactacacccagctcacttttgtattttttgtggtgacagggtcttsctacattgtccaggctggtcctgaactyctggcttcaagcaatcttcctgccttggcttcccaaagtgttgggattataggcatgagcaactgtgcccagcctcaaagaagatcaatgtcttttttgtttgtttttgttttgagacacagtcttgctgtgtcacccagsctggagtgcagtggcgcagtctcggctcactgcaacttccgcctcccgggttcaaggaattctcctgcctcagcctcctgagtagctgaaattacaggcatgcgccaccacgcccrgctaatttttgtatttttagtagagacagggttttgccttgttggccaagctggtctcgaactcctggcctcaggtgatccgcccacctcagcctcccaaagtgctgggattacaggtgtgagccaccgcccccggccagatcactgtttctgttttgatactttggtatcaggtgcacrtcgtgtttctccttgaacttgagcccacgatcttagcattcattggtggattgagtggttgaattctggaagttctcrgaatggccttgttttcctcgtctgcagaatgaaactycagctgccagagggcttcaggcagagtcatcctatggarcatcatggtttaagggacccaggaaaactgtcactatgtggctacctcaaggtggtacaattaagcgagcggctccaataagtcacccatccagacattcctggargagaagtgacctttgggctcctctctgtcttaggttcgggtcacaaatgtgactttaggcttagatcgaaaggcaccctcgtcttcaagcccacaacgctgccatcggcatgtcactttcgtcaagaggaatatgtkcaattaataaaggagacagggctggcgggagccaattataacaaacacatcagatgccaatagcgctgcacaaacacgctttcccattgattcctgacaatcattgttggcatctgtgcctctcggggcctgttttctgccccttcagagaccttggtaaaatgtcagttcctgcgcctttcccgagcgtgcacactttcactgtgtttgctctgcgatacacctgggtcgtgtgtacagagaagcaagggggtgctttctgccrctaattttgctttgtttgactcttctctggtgcacaatgtaagatttaaaagccgtgtaggccaggtgcagcggcgcacgcctgtcatcccagccgctcaggaggctgaggccggagaatcgcttgaacctgcgaggaggagggtgcagtgaaccgagatcgtgccactgcactcacagcctgggggacagagcgggactgccaccgccaygcacccagcctgggggacagagcgggactgccaccgccacgcacccagcctgggggacagagcgggactgccactagcacaccctcagtgatggttccctcactccagaactttccaagggggcccattgatcccatgacggaacagactgagtgaacccagcttctgaacgtgcctccgacaacccgggctctgcccaccaggcacaggcagcaccagtttgttctctgccccacggcagcgaccccctgtctgtgtgtttcctccctggatccccttgcggggcctgacccaagcttgtgctcagtgcagctttgttgagtcacagcaggtgcttggggagagctcctggcacagaaacacgggtgagccccaagccctgccagcttctggaacctctggaatgttctccaacagaacaaacagctcygcacctgatgttgagtctgrtatcactcagctgtgttccaggtcagtkgcacatctgggtccacaatgccttccgggtcgggggcattacctgtggggccaggacaggccagacacaggccccacgggagggaaaccattgagagcaggtcgggctgaacatgtgggtgtggattcttcccttgcaaatgtcaaagggaactcttaacagcggttattccagggactaggacacttgcatgtgtcttaatctaattagagcaaatggcagatgttcttccaggyggctttcaggsgaggggccagaacatttttcttttctttctttctttttttctttttttttgagatggagtttttgctctgtcgcacaggctggagtgcagtggtgcgatctcggctcactgcaacctccacctcctgggttcaagcgattctcctgcctcagcctcctgagtagctgggatcatagrtgccaccaccacacccagctaatttttgtatttttagtagagatggggtttcaccatgttggccaggctggtctcgaactcttgacctcaggtgagccacccacctcagcctcccaaagtgctgggcttacaggtgtgagccactgcggattgtccagaacatttttcgaattagttgatggaatgagttgatgttsctgggacgggtgtggagggagagctgtgcccctcccttccgtggactggagaggctcacggtagagcaggcctagaacccagctaggccactgtggtagcaggccaccaccagagtctactcactgcattgggagttccctttcgccaggctgggcccagtcgtctgcasctgaaccaaagcatgttgctggccagagctcctgggctaatttcaggaccatcagagtaaaggggcacttctgtcttcagctcyccttggaccttggctcttctgcctccttcctactgataaaggcctacctttatggcctttataaagataggaaattacttttttttttttttttttaagattggctctttctggctgggcacagtggctcacgcctgtaatcccagcgctttgggaggccgaggcaggcggaccacgaggtcaggagatcgagaccatcctggctaacacagtaaaaccctgtctctaccaaaaatccaaaaacaattagctgggcgtggtggggggtgcctgtagtcccagctactcaggaggctgaggcaggagaatggcttgaacctgggaggcggagtttgcagtgagccaagattgtgccactgcactccagcctgggtgacggagtgagactccgtctcaaaaaaaaaaagactggctctttctctgttgcccaggctggagtgcagtggagcaaacacagctcactgcagccaccacctcctgggatcaaacaatcctcctgcctctgcctcccatgtagctgggatcacagcatgcaccattgcacccagttaatttttaaattttttgtagaggtgaggtctccctacgttgcccaggctggccttgaaaccctgagcttaagtgatcctcccaccccggcytcccaaagtgctgggattacaggtgtgacccactgtgcccagccctaattccttccttaaacaattccttgtttcaagatcaactgaggggtatgtaagcaacagaaatgcctttctcacgctctggaggccagacacccacactccaggacaggcaggtccgtgtctggtgagggccccctcctcgatggccatcttttcactgtcctcgcatggcagaaggggcagatgagggccttggggcctttttttttttttttgagacggagtcttgcctgtcacccaagcttgagtgcagtggcatgatctcgactcactgcaacctccacctcccgggttcgagcgattctcctgcctcagcctcccgtgtaactgggactacaggcacgagccaccacacctggctaatggtttgtatttttagtagagatggggtttcaccatattagacaggatggtctcgatttcctgacctcctgatccgcctgccttggcctcccaaagtgctgggactacaggcataagccaccacgcccagccgcctgcctaattttttatatttttggtagagacagagttttgccatgttggccaggctggtctcaaactcctgacctcaagtgatctgcctgccttagcctcccaaagtgctggaattacaggtgtaagccaccacacttggcctttttttaaaaaaattaaattttattttattttctgagacagggtcttgctctgtcacccagtctggagtgcagtggtgcagtctcggctcattgcagcctccacctcccaagctcaagcaattctcccacctcagcttcctgagtagctgggacaataggcgtgcaccaccacgcctggctaatttctgtgttttttgtagagatgggagtctcaccatgttgcccaggctggtcttgaactcctgggctccaagtgatccacctgcctcagcctcccaaagtgctgggattataggcatgagccgcggcacctgactgtgatgaactgctacagtgaattttaccaactggtttggagacatcagatgccgtcgatactttgtaaatgttgtgcatgagagacacctgtgacctacttctcacaccggtgctgggtcccacycctagaaattctggttctattggtctggggtgtgacagtgggtggtttaaagctcccaggtgattctaatttgtagccaaggccaagaacctctgccctggagcctgctcctcaaagtctgctcccgagagtcctcgcagggcagagagcaggcagtcaaggaaggtttcctggaggaggagtgaagaggtggcagagagcattccaagcagagggcagggcttaagagaaggcacagaacaaaaagcaccaccaaggggctcaagagaagacacagaacaaaaagcagcatcaaggggcaggaaagaacaagcttgatgtttctgaatgtcatagctgggatactgtgtgtgcaaattggagaagacccagcctaaacaggcttgtgtgcaaagggagtttactggtgtcagcatcagccccatctgggagctggtttgaaaggcaggacctcaggctcctcccaggccccttgaatcrgaatccrcattttaacaagattcctgggtctgctcactcatgtttgagaagcayggctttagaagatgagaaatggaagctaaaatttaagcatgtctttttcattttctttttttgagacagagtctcgctctgttgcccaggctggggtgcagtggcacgatcttggctcactgcaacctccacctcccgggttcaattgattctcctgcctcagcctcccgaatagctgggattacaggcactcgtcaccacgcaggctaatttttgtatttttagtagagatggggttttgccatgttggccaggctggtctcaaactcctggcctcaggtgatctgcccacctcggcctcccaaagtgctgggattacagatgtgagccactgcacccagctattctgtctttttccacaagccagcacagcccatactgtatctgcacatcacatctcccaggctttctcgtctttgcatacaagtcccaggaatgctacttgatgctcgatgatggggcaacccaaattttccctgctttaccctctgatcagtaagaccatgtcttttttttttttttttttgagatggagtctcgctctgtcgcccagactggagtgcagtggcacaatctcggctcactgcaacctctgcctcctgggttcaagtgattctcctgcctcagcctcccgagtagctgggactacaggcatgtgccaccacatctggctaattttttgtatttttaatagagacggggttgcaccgtgttagccaggatggtctcgatctcctgacctcctgatctgcccatctcagcctcccaaagtgctgggatgacaggygtgagccacygtgcccggccgagaccatgtcttattcatctttgtacatcagcatagtgtgttgcaagaatcctggaatgagttgggtataaaatcagtacagtaccctaaaacttaaagcatgataaaataaaataaaataaataataataataatgaaaaaaaagaaaacactgataacaacaacaacatcaacaacaaatcagtggccgggcgcagtggctcacgcctgtaatcccagccctttgggaagccgagggaggcggatcacaaggtcaggaattcgagaccagcctggtcaatatggtgaaaccccatctgtactaaaaatacaaaaattagccggctgtggtagcgggtgcctgtaatcctagctactggtgaggctgaggcaggagaatcgcttgatcccagaaggcggaagttgcattgagctgagatcgcgccactgcactccagcctgggagacagagtgagactccatctaaaaaaaaaaaaaaaagtcagtttgcaattgatcatgtggaattcgaaatcatgggctcaaacgattctctcacttcaccctcccaagtagctgggactacaagtgtgcaccaccatgcctggctaaagtttaactttttttaagagatgagggcttgctatgttgcccaggttggtctcaaactcctgggctcaagtgatcctcttgtcttggcttcccaaggtgctgggattataggtgtgagccaccatacccagtgtaattcttatttttttattttttagaccgagtcttgctctgttgcctaggcttgagtgcaatggcgtgatcttggctcactgcaatctcygcctcctgggttcaagcgattctcctgcctcagcctcttgagtaactgggattacaggtgtgcaccaccacgcctggctaattttatattttagtagagacggggtttcaccatgttggccaggctagtcttgaactcctgacctcaggtgatctgcccgcctcagcctcccaaagtgctgggattacaggcatgagccactgcacccagcctcctgattctttttttaagggaygattagtaaaaataaatgtcagcaacttgggagcagtgctaagccaagccctgtgtttgctctacttcctaacccccaaccaaatgtaactaagccactggggacctccaccgtgtggatactcccctcccttccaattgtgagctcctcaaagatgagggcaatgccggctccaaaaagcacatgacgcatgaatgaatttgtgagtgggtgcagacaacctgtctacacaggtgtcagctttcctactagtgaagcaagctccaacaaaagattttttttaaggcaaagaaaaaagaaaaaagagaaaaaagtctsccataggttgcttgcctcatgtgtccacagaagataatggattgcgttgaaatccaggagccttttctctgaaacctaaggtctgtgagcagcagaaagcggatggtmggaagatctgataaaagagtctaatattcaaaacagcctggttaaatgtgcacagcctcgaatgcagacgtgagccacatgctctcaggatgcactgacattgtttygttatcgagatgargcactaatgttttagaagagtgatggtggaagacagctgaagatttcctgtcatttgagtgtttatttataatccctcccagtctcagtccttgttcctaaaagcgtccgcatcaagatgatgattaaacacaaatacctcatcaggtgtcccmtaaatcctggggtacagatgggcaatctgcaggtaccttcccccctgcacagagggagcatcgaagctgcaacccaggctggaccaaaggaggacacgccaagcgttctccttggggatcccctgatagggaggaacaagatccgtccataactgagttgagcttttcctcaggaattcagctccatccacctgtaacaaaaaacccaatttagggctgtgtgcagtggctcacacctgtaatcccagcactttcggaggccgaggtgggtggatcacttgaggtgaggagatcgagaccagcctggccaacatagtgaagcccctgtctctactaaaaatataaaacttagccgggtgtgatggcgcatgcctgtagtctcagctactcaggtggctgaggcaggaggattgcttgagcttgtggggttgaggctgcagtgagccaagatcgcgccactgcactccagcctgggtgacaaagtgagactccgtctcaaaaaaaaaaaaaaaaaaggaaagaaaaacaatcaagctatttagaggaaataatacacacgttatttataaaagtctgaaaccaggctgggcgtggtggctcatgcctgtaatcccagcactttgggaggttgaggccggaggatagcttgagctcaatggttcaagaccaacctgggcaacatggcaaaatcctttctttgcaaaaaatacaaaaattagccaggtgtggtggtgtgtgcctgtagtccccgctacttgagaggctgagatgggaggatggcttgagcccaggaggcagaggttgcagtgagccgagatcacaccagtgcactccagcctgggcaacagagccagaccctgactcaaaaaaaaaaaaaaaaaaaaagaaagaaacaaaaagtctgaaaccaaattgcaacttgtgcatcttatgcaaattgtacagamgtcgtacgctactgattacactgagtggctttatgcactcactgtagggttacccttaggaatttctgattcgaaacccaccgaggcagctctgatttcgctgagaactccatcgctcttctccaccttctccaccgtggctcggcagttggcccatccgtacctggctgctcaatggcttgactttgacacaataaacgggaactcrttcacaatgaagccatctcacgccaaatctatgtgttctacagtgattccaatgctagtcggggaataaaagtttaacacagactttacaaaacaggagattgccagaaacaatatttaggtgtttcctttaccatgaattcatgttggaaggttctggatgcctaggaaaatataattcgacataacttaatttttttgtttgtttttgagatggagtcttgctctgtcacccaggctggagtgcaatggtgcaatctcagcttactgcaacctccgcctcccaggttcaagcgattttctgccttagcctcctgagtagctgggattacaggcatgcgccaccacgcctggcttattttgtatttttagtagagacagggtttcaccatgttggtcaggctggtctcgaactcccracctcaggtgatccacccacctcagcctcccaaagtgctgggattacaggcgtgagccaccacgctggacctcgcacgtccttcttctaaagcatcagccgttggcggcagagcccgctcgaatccagcacgtcctcttcttcactaattacagccagtcctcactataggcttttggaaactgcaactttaaggaaaacgacatgtaacaaaaactattttttttccttgttaacattataatgaaacaacaaacaacctaatctgaagacctgttttactttgttttgcttaaagtcagtttccaaagatccactgatgatgttaaatgaaaacttcacatcttattttgtagagatggggtctcgctatgttgcctaggttggtctcaaactcctgggcttaagtgttctcccccacctcggccttccaaagtgctaggattataggcgtgagccaccttgcccggccctttttaayttttagttaattaattattattttttatttttagagacagggtctcgctctatcactcaggctggagtgtagtgatgcaatcatgggtcactgcagcctggaactcctatgctcaagcaatcttcccgcctcagcctcccaagtagctggaactacagggcgccaccacagctggctcaggaaagggcgttctaaggaggagacatttaagctgaaaccttgtgagtgagaagcagccaggcatgtgaagagggttccagcaatacagaacatgctgcccaaaggccccgggccgggaaagaacttgaattgttgccagcactggaagaaatccagaatgctgggcttgctgagctttggtgaggaagtcacagaggcagggcgtcccaggccttgctgggggaggtcctgagcccaggttgtcggataaaatgtagggctcccagttaaatttttttttttttgagacagagtcttactctgtcacccaggctggagtgcagtggcgagatcttggctcactacaaccactgcatcccaggttcaagcgattctcccgcctcagcctcccaagcagctgggattacaggcacccaccaccacgcctggctatttttttgtatttttatagagatagggttttgtcatgttgatcaggctggtcttgaactcctgacctcagatgatctgcccgcctcggcttcccaaagtgctgggattacaggcgtgagccaccacacccggacaactcaaaattttaaaaacattaaatggtactttacatgtagagaagttgaataaaacgtagttattcccccatgatgttcttttagaagtttttttttttcttttgagacagggtctcactctgtcacccaggctggaaagcagtggtgccatcttggctcactgcactccagccagcctaggcaacaagagcaagactccatctcaaaacaaaacaaaacacaaaaaacaaaaaacagcacccctgcataggacagcttcatctgacagcaccaccgtcttctacgtggactgaaaaaaatttaattacaaactgggcggggtggctcacgcctgtaatcccagcactttaaaggccaaggccgggtggatcacctgaggtcgggagtttgagaccagcctgaacaacatggtgaaaccctgtctttactaaaaatacaaaaattagccgggcgtggtggcgggtgcctgtaatcccagctacttgggagactgaggcaggagaatcgcctgaactgggattacaggcacacaccaccaggcccagttaatttttgtatttttagtggagacaggatctcaccatgttggccaggctggtctcgaactcctatacgatcccacaccagcattcctcaaaaccgtccaggtcaccagaaacactgtcacagcccwgaggagcccagtgagacatggtgaccaaaggcgatgtgggggcctggagcagaaaagaaaattaggggaagagtaagcaaacctgaatcaactaccgactttggttagtactaatgtagcaatatgggtttattcattgtaataaatgtaccatactaatatattttttttttattttatttatttatttatttttgagactgagccttgctctgtcgcccaggctggagtgcagtggctcgatctcggttcactgcaacctctgcctcctgggttcaagtgattctcctgcctcagcctctggagtagctgggattacaggtgcatgccaccataccgagctaatttttgtatttttactagagatagggtttcaccatgttggtcaggatagtcgaactcctgacctcaggtgatccccccgcctcagcctcccaaagtggtgggacgacaggcgtgagccactgtgcctggcccacactaatatgttaataataggggaaactgggcatagggcatatagaaactccctgaactagcttctcaatttttctataaatctaaaactcttctaaaaaataacatctatttttaaaattctattagacaattctcatatcaactttctgtaaaggactgacaaagattcttctatactacatttttactttttttttttttttttttttgagacggagttttgctcttgttgcccagtggagtgcaatggcacgatctcggctcaccacaacctctgcctcctgggttcaagcaattctcctgcctcagcctccgggtagctgggattacaggtgtgagcaccatgcaccacaactcctggctaatattgtatttttagtagagacggggtttctccatgttggccaggctggtctcaaactcctgatctcaggtgatccacccggctcagcctcccaaagtgctgcgatgacaggcacgagccgccaccgtgcccagccctttttttttttttttttttttgagacaaggtctcgctctgtcacccaggctggagtgcagcggcacaatcacagctcactgcagcctcaacttccctgggctcaggtgattgtcycacctcaggctcccaagtagctgggactacaggtgagccaccacccctggctattttttgtagagatgggatttcaccatgttgcccaggctagtctcaaactcctgagctcaagcaatccatccgcttccacctcccaaagtgctgggattacaggtgtgaaccactgtgtctggcccatttttacattttcaaaaaatgtattgaatattatacacatagaagtgcccaagccatcagtgtacaactcaatgaattttcacaaaggtgaccatttaccattgctcagaccaaggaacagaaggtaaccagcaccccagaacccccctcactccccttcctctgcctacccctcctcagcaagagtaaccacgactggaccttgtaaagctatgtatttgttctgcttatttttaaatcttatgtaaatgaatcatagatgatctcacactgcattttaatagacaccaccattctctttctcctctctagggctttcagcacttctcaaatcttacaagttgtgagaaaatgtatcattcttttacactcaactgtgtcaaacatcctaaataaagttcccaaacccaggaaagccagggacygtctgcgatttgctgttcccaaacccatgaaacccagggaccgtctatgatttgctgtggcttcacctgtatgggtccaggttgctcacgcccacctgttcacccttatgagaacccatcacattaagaagatggaaaacaggccgggtgcagtggctcatgcctgtaatcctagcactttgaaaagctcaggccaggatcacttgagaccaggagttcaagaccagcatggccaacatggcgaaattccatctctactgaaaaaacaaaaattagccgggcgtggtagcacatggctggaatcccagctactcgggaggctgaggcaggaaaatcgcttgaacccgggaggcagaagttgcagtgagcagagatcgtgccattgcaatccagcctgggccacaagcgcgaaactctgtctcaaaataaataataaaagtttatcatattttattatttagtcatagcttatttagacgatacttgtattgatttgcccacagagtcactctgggttgagacagaaagcagtcagaagcaattcgtgctctctgttggcattagcgctaagaataaaataagtcaatacagtcgcttccacagtatgacaaaaggttccgtcttgatcagtcattttctgacccaaggtcacagctcttgcaaaattttactgtagctygacaaactctccatatcaactccacattacaagatctttcrtttcttcaattaaacaactggaaatggataccatccatgctctcagatttatgatgtcaataaagcccattatgatcacaccctgctgttgaaaaatgggatggcagggaactgacaggctgtttttaggtcaccgtcttacacaataccaaccgcccatcaggttgtttcaaaggctttcagccactgactaatagaaaaagagactgcatacaacgtttcattcatgttttgctaggctagayacatttgttgtagcggtctcatatttgtaagtccgtggaaaaacctgaaagtatttttttcttgaaaatttttttgaaaaaaaaggtattctttgtacaataactatagagaaaagatgttaaaatgtcacaacagtgattccatataaattcagtttcttttttttttttttttttgagacaggatctcattgtgttgcccaggctggagtgcagtggcgcaatttcagctaactgtagcctcgacctcctgggctcaagcgatcctcctacctcagcctcctgagtagctgggactacagacaagctccatcacaccaggctaatttttgcattttttttatagagacggggtctcactctgttgcccaggtggaactcaagctcctgggctcaactgatcctccctcctcggctttccaaagtgctgggattacaggcatgagccgccgcattcagcccaaattcaccttgtttttcttttttcttgagatggagttttgctcttgttgcccaggctggagtgcaatggcttgatcttggctcactgtaacctccacctcccgggttcaagcgattctcctgcctcaccctcctgagtagctgggattacaggcatgcgccgccatgcccagctaattttttgtatttttagtagagatggggtttcaccatgttggccaggctgatctccaactcctgatctcaggtgatccacccacctcggtctcccaaagtgctgggattacaggtgtgagccactgcagctggctcaaattcacttttaaagtattattttatgatgggaaatactgatagagggtacatgttgcatttataagttttaatataatttttcatttattaactcattggacaacccagtaaaatgtcattaggagtgagaatcaggaatgatggattcacggtctagttgcaagactcatcacaggccattaacctctgaaaagcctttatctgcttcggtgagtgcttccagagtttgcaacacgaatatatgtccacgaatataagtttgatatgatagtgagagtctgcctattcagaagaaaaagttgcccagctggatttagtttatcttcgtctcagtgttctttattttaattttaaaatatttgagtattaaagattgaattctatttgggatgatggaaacattctggaaatagacaatgatgatggtgatacaaccttattaatgtacatagtggcactgacttacgcccttaaaaatggtttaggccagtcgggcgcggtggctcacgcctgtcatcycagcactttgggagaccgaggcgggtggatcacctgaggtcaggaggtcgagaccaggctggccaacatggtaaaatcccgtctatactaaaaatacaaaaaattagccgggcgtggtggtatgtacctgtaatcccagctactcgggaggttgaggcaggagaatcgcttgaaccccggaggtggaggttgcagtgagccgagatcgcgccactgtactccagcctgggtgacagagtgagattccatctcaaaaaaaaaaaaaaaaaagtttcagtggtacattttgttatgcttttttttttttttttggtagcgacagggtctcactaatgtttcccaggctggtctcaaactcctgggctcaagcatgttagcatattttatcacaatttaaaaataaaggccaggtggctgggcatggtggctcacgcctgtaatcccagcactttgggaggctgaggcgggtagatcacctgaggtcaggagttcaagaccagcctggccaagatggtgaaaccctatctctactaaaaatacaaaaaaattagctgggcgtggtggcgggcacctgtaatcccagctactcaggaggctgaggcaggagaattgcttgaacctaggaggcagaggttgcagtgagccaagatcatgccattgcactccagcctgggcgacagagcgagactcggtctcaaaaaaaaaaaaaaagaaaaggaaagaaagaaattatctctgatccttagatagtttgtgaatcagtggccgctttcgctccccgtggggttcgttttagtgttctatttctcccccacatcactaccttctcccaacagccactgcacctgcctcacagttgcaagataaaatacaggatgccgaggccaggtggagtggctcacgcctataatcccagagctttgggaggctgatgtgggaggatcgcttgagccaggagtttgagaccagcctgggcaacgtagcaatgccttatctctactaaaaataacaatagtaggccactgcagtggctcacacctgaaatcccagcactttgggaggccaaggcaggcagattgcttgagcccaggagtttgagactagcccaggcaacatgacaaaaccctgtctgtacaaaaaaatacaaaaattagccgggtacagccaggcacagccgggcgcagtggctcacacctgtgatcccagcatgctgggaggccgaggcgggcagatcacctgaggtcaggagtttgagaatgacctgatcaacatgacgaaaccccctttctactaaaaatacacacacacaaaaataataactgagtgtgttggtgcatgcctgtcgtcccagctacttgggaggctgaggcacgagaatcgcttgaactcaggctgcagaggttgcagtgagcagagatcacgccactgcactccaccctgggtgacaaagcgagactccatctcaattaaaaaaacttagccgggcatggtggtgcatgcctgtaatttcagctactcgggaggccaaggtcggaggatcacctgagcccaggagttcaaggctacaatgagccatgttcgtrccactgcactccagcctggacaacagaatgagaccctgtctcaaaataaaaagacattttaaaaaaggaaatgatttaagggacctagcagagactataattaccttttctcttgtttaattaataaagagatgtctagaacattttactgtggctaatattcccagagagaatcacttctttatttgctgataacacaaatacagggtcccaatagcatccagtaattcacaaagtaattttttcargattagcaccatgttcccacgggagctcacgttgctgtcatccacactgcacactttgcaggcaagaattttattcacctgtttattctgcctcttagaaaatatattttaattatttaggaaacgttaccaagtaaaattttaacctcaaaggttgatcaaagtcacattacaaagttgtatttgcctcatgtgctggtgaaatactttgacacttgtctacacttcaaacgagaatttacaaagtgaaatgagaggactcgtaatttaatttttttttttttgaggcggaatctcactctgtcgcccaggctggagtgcaatgacctgatcttggctcactgcaacctctgcctcccgggttcaagcgattctcctgcctcagcctcctgagtagctgggactactatatactgaggaagcttttctggttttttaagaaaaaagtggctgggcgtggtggctcacgcctgtaatcccagcactttgagaggccaaggcaggcggatcacgaggtcaagagatcgagaccattctggccaacatggtgaaaccctgtctgtactaaaaatacaaaaattagctgggtgtggtgacccatgcctgtaatcccagctactcgggaggctgaggtaggagaatgatgtgaacccgggaggcggaggttgcagtgagccgagatctcgccattgcattccagcctggcgagagagcgagactccgtctcaaaaaaaaaaaaaaaaaaaaaaaagaaagaaacaattgagatgcctcctgaaaaaaagaaaaaggtggagaaaaataaatttttttttttttttgagacaggatgttgctgtgtggcccaggctggagtgcagtgctgcgatcacggctcgctgcaaccttgaactgctgggctctggggatcctcccactgcagcctcccaaagtgctgggattacaggcacacacaccacacccagctrattttttgattttgtggagatggtgttttgccatgttgccaaggctggtctcgaactcctgggatcaagcaatcttcccgccttggcctctcacagtgctgggattacagcgctggcatgcctggcgaaaatgtgatgttaaaagtgttagaarccaatacaagggaaagaatttcccactttgtgagctgtgggtgtcccttgagtggaactaggacacctatagaacgctgctgtggccatgagccctctggggccatttgcatgtgagccccaagaaggaaggtgrtkggaggaatggacacaccgaggaagctggtctattaacagtgactattctctgcttcttttgtttttttttccctacttaattgaaggaaaatatgaactgaaagaggggaatgaatggtaaagccagttcagcaggtacagtcttatgcaacccatgttagtaacagttatccacagaatgtagcctttcatattttcccatccattatttcagagtatgctaactttgacctttatgagctttttaagggagttatgtttatctacattttacacattgttttaaggttctagggaagtaacttctaagatcttacagcaaattattattattattattattttatttatatttatttttttgagatggagttttgctcttgtggcccaggctggagtgcaatggtgtgatctcagctcattgcaacctgcgcctcccaggttcaagcgattctcctgcctcagcctccttagtaactgagattacagacgtgggccaccacgcccggctaattttgtatttttagtagagatggggtttcaccatgttggtcaggctggtctcgaactcctgacctcaggtgatctgctcaccttggccccccaaagtgctrcgattacaggctcgagccactgcgcctggccaaattattattactgttattttttcagacagggtrttgctctgtcacccaggctggagttcagtggtgcgatcacagctcactgcagcctcaacctccccagctcaagtgatcttcccacctcagcctccagagtagctgggactacatgcgtgcaccaccacgtctggctaattttttttttttttttttgtagagatggggtctcactgggttgcccaggytggtctcgaagtcctgggctcaagtctcggcctcccaaagtactgggattatagacatgagccaccacacccagctgatcatacagcaaattaaattaagggctaaaactagcagcaagcgctatggtaccaatctgccagtctccctgtcatagcatgcagcaacctagatatgccctatcaagtgaatttaatgccttctcccctttttttgcagctttgttacatatcagacgcggatattacttacgagtattgaatgatcccctcagtaaacaccagctatgcaggaggtgctaccttagcaataggagcttcagtctgggaggagagtgggacatataagcaaataaatacatcacgtttcccacagggcgcgtattttgtgttcaycttcgtcccactggatctgtccaaacttttcatttttgacagataaggaaaatgaagttcagatgcttgagtgacacagctaattagtggcaaggctgagacttttgaccagacagcctgacttttagtttctaccatgcatgttaactcctcctaaaccccatttattttctcatttcagacaactgcgcaataacactgctaagataaaagcactctgattaataaacactgaaattaagcaggttaagaaatatctattgtccttttctcagagtgataattttaaaaactgaaattggtcttttgcactcgcagttttctcttgcttccttaaacatttgcgaaatatgagaacaatataaataggttctcaagctctgagcaaacccttaaccatgtaaataagccccataaagaacaaagcctggccgggtgcggtggctcacgcctataacaccagcactttgggaggcagaggtgggaggatcgcttcakcccaggagttcgagaccagcctggggaacctagggagatcctgtctctacaaaaaatacagtaaattagctgggtgtggtgggggcacgcccgtagtcccagctactcgggaggctgacgtgggaggatcacttgaacctgggagtttcaggtcgcagtgagctgtgattacatcactggactccagcctgggtgacagagcaagaccctgtctcaaaacacaaataaataaatacatacataaatacataaaataaaataaataaaagtagagtagagttggttcattgcaacagatactgtctggcccacaaagccctttacatatagcaacttacagaagaatttgtgcccctgtgatagatagcattggaggtttccgcctagggaaagctgtggtgcagccctgagaagcgtcatgtggtaagattcatccctctgagggcatgagatgggctggggcaggggagatgagagcccctgcagcgtgctgctccatcccctgacaacactgccagagccgcaggagggtggcagcaacagacgtggagagacaagggcaggtgctaaggaaaaacagaacctggctcctgatgatgacagtggaggagaagggaggattcaaggctgcctttgagacgctgagcttcagttaccaggtgttttccatagaattggaaggttctgagctggcttggggtgagcctaggagctgaactttagatacttggcaatgctgcagacggctggcaaggtggggctggaacagctcrgtcagagatgttgttaatggccacatagctggcaaaggtacgctgcaatgatttaggagggtttaaaaaattatatgtgtttatggctgaacgcggtggcttatgcctgtaatcccagcactttgggaggctgaggagggcagattatttgagatcaggagttcaagagcagcctggccaacgtggtgaaaccctgtctctgctgaaaatacaaaaattagctgggtgtggtggcgcgcacctgtaatcccagctacttggaaggccaagacaggagaatcgctggaacccgggaggtggaggttgcagtgagtcaggattgtgccactgcactccagcctttgtgacagagcgagactctatctcaaaaaaaaaaaaaaaaatatatgtgtgtgtgtgtgtgtgtgtgtgtgtgtgtgtgtgtttaatataaatggtgctgaaacatggccatgacagcactcccaagacatgggcccttccttctgttgtcacctcagtaaatttcccatgggataggcttccaaaggtcaaagcctgtgccttgtgtgctcatgccctcttctgctccctctagtacggggtgccagacatgcagcacgcaggaaccactccaggtccctgggcacggactacggatgctgagttatttcaagcccagcacgttactcacttcagctcagcacctctcaccttgtcctgaggctttcagttccagtttcaattcaccgttcaaccttttttaaaatttttatttatttatttatttttttgagacggagtcttaaaagagcttaggagctgagctttacatacttggcaatgctgcaaatggctggagcgcagtggcgcgatctcggctcactgcaacctccacctcccaggttcaagcaattctcctgcttcagcctctcgagtaactgggattacgggcacytgccaccacaatacatttttgtgttttcagtagagacggggtttcgccacgttgcccaggtaggtatccagctcctgacctcaggtgatccgcccacattggcctcccaaagtgctgggattataggtgtgagccaccacgcccggcctccagtagctcttaaattgcttctttttggccctaaacacgatttccacatctagttcttccagtcccttttgcaggttacctcactcctcttctctacataaacttctgcaaaagtttacaaaaaatctgtaaatgttagtgtatctacaacctatttatttatttatttattattattattttttctgagatggagtttcactcttgttgcccaggctgcagtgcaatggcgcaatcttggctcagtgcaacctccgcctctcgggttcaagtgattctcctgcctcagcctcccaagtagctgggattacaggcatgtgccaccatgccggctaatttttgtatttttagtagagatggggtttcaccatcttggccaggctggtctcgaactcctgacctcaggtgatccacccgcctcagtctgtcaaaatgctaggattacaggggtgagccaccacgcctggcctacaatctatttaaaacatgattaggccaggcacagtggttcatgcctataatcccagtgctttgggaggctgaggcaggaagattgcttgagtccaggagttcaagaccagcttgggcaatatagcgagaccccatctctacaaaaaaatacaaaacttagccggcgtggtggtgtgcacctacggtcccacgggaggctgaggtgggaggatcacctgagcccagggaggtcgaggctgcagtgaactgtgatcgtgccactgcactccagcctgggtgacagagtgagaccctgttttgggagaaaaacaaaaaagatgatcagtcctttgatggagtgacgagtgggggtgagactaattatgccagtaactgatctattagtatttcagctcctgggaggaagaccatagtcacgggatcaatgytggaaaagttatagttttgttaaataaataaaagcttatcttgtaattcattaaaataactgtcaatttttaatgaatttctatcttgtaattcattaaaataactgtcaacgtttctactgattagaacgtgtaaagtttatgactatatattttgcctgtcactcctttgtgacagctcctagatgttttgacagctggcatgctctggggagctgaccatgtagccaactaccgtttctttagccagacatgtgagctatttcagctctgacccttgttcgctcacccttgacttctgcatcaagcggcaagggcaagctagcatttctagtccttatttctgttcgtgtacatccaaaatatattgacaagtcaatcctattgttaagagcaagccaatttcacagaactgctataaaaaatggaagaaacaaattccgtacacaacaagggagacttaatttcacgagcgtgaagcaattccactcttttaggcttgtattttgaagcrtcrtggcttatgagaagcctgttgtgtcctggcaaggctgacactgtttgcttaaccttatgtagctttctgcaaaaattaatttactaaaacgtgacaaaatttaaaaaattttagaatattattgcttcactgaggctcaaatgaaaaatgcatgaaaactatttttatattttttcctctcctttaagatggacttaaaatgctagtttattttattttgttattttgtgtttttttttttgagacagagtctctctctgttgcccaggctggagtgcagtggcccgatcttggttcaatgcaacctccacctcctgggttcaagcaattctcctgcctcagcctcccgagtwgctgggactaaaggcgcatgccaccacgcctggctaattttttgtgttttagtagagayggggtttcaccgtgttgcccaggctggtggccaactcctgagctcaggcaatccgcccaccttggcctcccaaagtgctgggattacagacgtgagccactgcccccggccactagtttattcttttggaaagataaagataggttttttttttttgttttttttttttttttttttttgagatggagtctccatctgtcacccaggctggagtgcagtggtgtaatcttggctcactgcaaactttgcctcccaggtttaagcgattctcctgcgtcagcctcccgagtagctgggattacaggctcccgccaccatgcctggctaatttttgtatttttagtagagatggggtttcaccacgttgggccagtctggcctcgaacgcctgagctcaggcaatctgccctcctcrgcctcccaaagtgctgggattacaggcatgagcyaccaaccccrgccaaaaatatcttcttttaaaggcagagastggaaaggaatagggacratttaaaaacccaactcttcccattatatttgaaatggtgaaatgcaggtactttattttgcttcccagtattatttgggaaattaaaaaaaaatgaggaaaagaaaaactgtattttaataataacataaaacttggttctacagtggtatttttcttttataatatgtgtgtgttatatgcaccaaagttgttcttctctttttaaagagaaacttaaataatgctacatgtggacagtagtaggtgacaaatttaatggacttagtttttggatcttacttgccctgggttggtactctgttaacaaaaattagtataagtcattaaactaaaaagatttctaaatggaagtaattaaaaacatgaagagctgagaaaatttttgtcagattcacctaagtccaatccttagcacatctaattatatatatwtttttcatacatagatatacacatctagggttttttctttctttttcttttttcttttcttttgagacggagtctcgctctgtcrcccaggctggagtgcagtggcgcggtctcagctcactgccagctccgcctcccgggttcacgccattctcctgcctcagcctccggagtagctgcgactacaggcrcccgccaccacgcccrgctaattttttgtatttttagtagagatggggtttcatcttgttagtcaggatggtctccatctcctgacctcgtgatccgcccgcctcggcctcccaaagtgctgggattacaggcgtgagccaccgcgcccagmccatctatgggtattttcttgatgtactacatgccaaatctatcattagatgtagatatattaattaattaattaattaattttgtagagacagggtcttactcttgcccaggctggagtgcagtagcgccatcatagctcaccacagccttgaactcctgggctcaagcgattctcccccctcagcttccccagtagctgggactacaggcatgcatcrtcgtgcctggctcattttttcttttttttttttggagacagagtctcactctgttgcccaggctggagtgcagtagtacagtctcggctcactgcaaccttcctctccygggttcaagcgacctctcccgggttcaagcgattttcatacctcagcctcctgagtagctgggactactcgggtgggcgggcggcgccacaagacaaccaggmactcaccaccacgcctggctaatttctttcgtatttttagtaaagacggggtttcaccatgttggccaggctggtcttgaactcctgagctcaggtgatccgcccgtctctgcctcccaaagtgctgggattacacgcgtgagccaccgcgcccgcccttcataatattatagatagagagatatgtttatttttttccggcgcaccgtcttttggaatccagcgaccacagagacacacgcggctgtgagagcgcacggagacccctccccgcgcctgcggctgtcttgtccctctractcccaagaaggargaaacgggaaccgggctccccctcccctcccccgagggctgagtctgagcgcgttgggggcggagccagtgagcggtgggggcggagccagtgagcggtgggggcggagtcagtgagcggtgggggcggagtcgctgaggacggggcggggcctcgcgctaacggtcgcgcggccgtcgcacctgcacgaggctgtggcccgagcgtcctgtggagaagccgcgaagcgcgggcgacccgggggtcgggcgggccaggtccgcgaggccgcggcggcagctgtgcaggcccggggagcagccggccgggcgagcctcgggtaagcagcggcgtggacggccaggtggcgacgcgggccaggcctccagctgtggggcggcgtccgaggaagggagcccgcgcgggtcagggcccggctcctcctccctggttcaaggattcccctgcctcagcctcccgagtagcagggattagaggcgtgcgccaccatacctggctaattttttttgtatttttagtatagacggggtttcaccatgttggccaagctggtctcaaattcctgacctcgcgatctgcccacctcaggtgcaaccccatctctacaaaaaatacaaaaattagccaggtgtggtagcaggcttctgtaatcccagctactgtggaggctgaaccaggagactcgctagaacccgggaggtggaggttgcagtgaaccaagatcgcaccattgcactccggtctgggcaacagagcaagactctgtcaaaaaaaaaaaaaaaaaaaaaaaaagggccgggcgcggtggctcaagcctgtaatcccagcactttgggaggccgaggcgggtggatcacgaggtcaggagatcgagaccatcctggctaacacggtgaaaccccgtctctactaaaaatacaaaaaattagccaggcgtggcggcgagtgcctgtagtcccagctactcgggaggctgaggcaggagaatggcgtgaacccgggaggcggagcttgtagtgagccgagattgcgccactgcgctccagcctgggcgacagagcaagactctgtctcaaaaaacaaaacaaaacaaaattgtagggtaaaagagacagcagttgttgaatgaagtcatctctgaattctcagattgagctctttagttcatgttaattttgtatctgttaaagtgrccaggtagagaagcaagtcatattttttgtgggcagacactaacgtctattaccatatacctctaacggtagcagacaaataagggaattcagagagataataggataccatgtccmaccaagagatgctraggggtaraaatgtggagaaatcscttggtgtgtaggtagttgtgtttgtacagaatattcagccactgagtcaaatgtctgactcatcctctcgactcacatgtctggcactttgggctgtaaataaatattagttgaatggttgaatgagygaatgaatttgtcacagttcggcaagtgttttagatagtgacaytgcattgtgagccacatcagaccaggccaaagaaygaatgaaaaacttgacrcagcttaattcccaaatgtttcttctggcactgaaaggccttgaatacaaaaactggtacaytggataatattgacaagcagggccatcattgactgtgagcctgtgaacrtcgaggcatcttgtatacactgtttctacttttcactgccaggtggatgktatccacaatttaaggatgaggaaattaatgtttagtaatgttaaaacacacgactacaaactagtggtgttgcaattcaaaatcatatttgactaactccacaggctgcctgaaattcaggtgtcatgagacacgtccttgaactgsagcgggtgggtgtgggcattcccagagttaaagaggccctggattataaagtgaagtcaatctgtttggtgtagcttacaatttttctacaatagaaccttttagagtgatgatrttgagggacaaaccaccatttcgttcatctgatatttatggttttcagttatgaaatacatacataaaaatacgtaagatgccacctctgccctcatgkagttttactatgtagaggtgtgtttaaaatcaatamttttcccgggctgggctcagtggctcacgcctgtaatcccagcactttgggaggctgaggcgggtggatcatcaggtcaggagatcgagaccatcctggctaacacagtgaaaccccatctctactaaaaatacaaaaaaattagctgggtgtggtggcacatgcctgtagtcccagctactcgggaggctgaggcaggagaatcgcttgaacctgggaggyagaggttgcagtgagctgagatcgtgccactgcactccatcctgggcgacagagcgagactccgtctcaaaaaaaaaaaaaaaaaatcactacctttcccttcacacagtataatcaaatgctcaatatgaggtgtttacgtagatttttgctgtattttttgaggtaagcttgatgctaatatatatttaaatcyttaaatgtcccattgaggccgggcgtggtggctcatgcctgtaatcccagcactttgggaggccgaggtgggcggatcacgaggtcaggagatggagaccatcctggctaacacggtgaaaccccgtctctactaaaaatgcaaaaacaaaattagccaggcgtggtggcaggtgcctgtaatcccagctactcgggaggctgaggtgggagaatggcgtgaacccaggaggtggagyttgcagtgagctgagattgcaccactgcactccagcctaggcaacagagtgaaactccatctcaaaaaaaaaatgtccyattgaatcatcttgcatgtraaactctaaatttggctgggcttggtggctcacgcctgtaatccagcactttgggggcggscggatcacttgagatcaggagttcaagaccagcctggccaacatggtgaaacctcgtctctactaaaaatacaaaaattggctgggcatggtggcaggygcctgtaatcccagctatttgggaggctgaggcagaagaatcgcttgagcctgggaggcggatgttgtggtgaactgagattgtgccactgcactccaccctggggcacagagtgagactgatgtctcaaaaaaagaaaaaaagttaaaacaaaattaaaaaataaaataaaactaaatttacatggtgctcaaaaactactaaattttacatggttttagaaatgaaagttaaaaattgaaacctataatagctatatcattcaaaattataaaaggacattctgaacatgttttctataggtttaatcgatattaatttacattttaccattataataaaaattttccaaagcagtaaactatccagtgctttcctaaataatattttattttattttatttatttattttttgagatggagtgtcgctctgtcatccaggctggagtgcagtggtgccatctcagctcactgcaagctccgcctcccgggttcacgccattctcctgcctcagcctcccgagtagctgggactacaggtgcctgccaccaagcccagctaattttttgtatttttagtagagacggggtttcaccatgttagccgggatggtctcgatctcctgacgctgtgatccgccctcctcggcctccaaaagtgctgggataataggcatgagccaccgcacctggccaataatattttattttattttgttttatttatttttgagacagagtctcgctctgttgcccaggctggagtgcagtagtgcgatctcggctcagtgcaacctctgcctcccaggttcaagcacttcttcctgcctcagcctcctgagtagctgggattactggtgcccgctaccaygtgaggtttcgccatgatggccaggctggtcttgaactcctgacctcaggtgatccatccacttcagcctcccaaagtgctgggattacaggtatgagccaccatgtccggccctaaataagattttaaactcttggaattttttaaatgatttatttcatttattcaatttatatatctaaattatattttctaaaatgcagattaaaaaaatggcaaactcctttgcagcgaggattttcactaccctttcagatctgcagmcaaatatggctaatctggtaggtttcaataatgtggtgatttgcttactgatgacattttatgtgataacattacatcaatgttattgattcattcaacacatgcttttataattggcaagtatatrgatactcattgcattggtataattgttagatattaagtatacctaaatttctttgtatttatgccacctagatgaaaattaatctttatttgtgtgtagagtagaagatatgattgtagatttgactagtaattgttcaaaatgatcaatagatgtattattttacttaatattttataaagtgaaaaatttaataaatgctcaaatttagcattgtaaaattaaaccaggccaggcacagtggctcatgtctgtaatcccagcactttgggaggctgaggcagctggatcacctgaggttgggagtttgagaccagcctgatcaacatggagaaaccccatctctactaaaaatacaaaattagctgggtgtggtggctcatgcctgtaatcccaggtactcaggaggctgaggcaggagaatcgcttgaagccagaaggcggtctcagtgagccgagattgcaccattgcactccagcctgggcaacaagagtgaaactcttctggaaaaaaaaaaaaaaaaaaaaaaattaaaccattttgttcagcagtagcaattttctgaccaaattatccaatttatggtctaagtacttgacattatgctgcttttatgatataggtttataacatgtgtgttttctacaatgatgatgtgaaaattgactctttgagtaggagttataggggaattcaatgattttgaacayayctcgactgttacttacttaaaagaaaactaagtggaatcatcttataagttaaagaacttattgtaaagcagctaccacacacccttaccttccctgcccctgagcastctgctatttatattttgcttttgcaaactagatttcttacaatgggatacatttacatataactttaataatttaaaatttwaaaatattaaaaaataacaattgttgttatagtttttcttgaaaggtaaactatttgctaataatggtctcttcagatagaaagttttactcaacatttccattaattggattttccaacaaaattcagtgagatctgcaagtataaggaattgaagaaataatatcaatgtgtctaaataagcaataaagctagctaatagctcagctagaatgtaggagtcttaaaagcctgattgtaatttaaatgtcaagattattgtaaggttaaaatcagttgctgcaattagcaaaataagtttagtttttttcctttcagaaaaggtattcatttttattttttatttttattttttgagatggagtcctgctctgttgcccaggctgaagtgcaatagtgggatctaagctcactgcaacctstgcctctgggttcaagcgattctcctgcctcagsctcgcgagtagctgggattacaggcacccaccaccacayccggctaattttttgtatttttagtagagatggagtttcaccatgttggtcagactggtctcaaactcatgacctcaggtgacccacccgcctcagcctcccagagtgctgggattacacgtgtgagccaccacacccggcccatttttatttcttaaaacacatttaaaatttttcttcagtagtcactaaagagaacattaaacattttgaggagatgttaatatctctaagktttaagatctaggactttagaatttagatttattagcagcaaaatataagttttgttacagtctaatttatattactgtccagcatgtttggattaagaagctaagtgattttatgtggattgttagaaaaccctatataaaggaaagctttgaagactgtggcaaattaaattgcattatacatgtgctttggatgaattcagtaaggattgatagcatagggcagttattatgctccatctrgtgattgaaaataaagtagaaatatgctaagtattaaatgattatatttgtaatagtagttaacttttggattactttatactattccttgtggaattgaacatttatgaacttcttttagatgtttgcctggaataaatacatttaaatggttcctagtcagaaatgtttgttagagccagtaaagtataacaagcccatgaaattaaatttatcaagtacatctgtgtttaatattggtcttctgtgacctttttgtttttcagaaagttatcggtatagttattgggaaaacagatgtcaaaggctttccagacagaaaaagctgagttctgtttaactcttggtttcatttttcatcaactttggcttatgactacaacaaagtatattgaagtgattaatttttctatgcctgtttaactccttaagagcaatggtcatgctctctattggatggtcaagtacctgattcaaggctttctctctccctccctcccacattctctctctctctmtmtmtatatgtatatatacacacatatgtgtatatatgtttatgtgtatacacacgtgtgtatgtgtgtgcatgtgtatgtgtgtgtatatatgtatatttgagcacatgtgttctctcttttttttttttttgagatggaggctcgctctgtcactcaggctggagtgcaatggcatgatctcgactcactgcaacctctgcctcctgggttcaatcgattctcctgcttcaacctcccgagtagctggaattacaggcacatgccatcatgcccagctaatttttgtatttttagtagagatggggtttcaccattttggccaggctggtcttgaactcctgacctcaagtgatctccctgcctcggcctcccaaagtgctggaattacaggtgtgagccaccatgcccaacccctggttgatttaaaaaaaacaaaaatttgtagagacagagtcttgctctgttgcccaggctggtctcaaactcctgggctcaagtgatcatcccrcctcatcctcctagagtgatsagattacaggcatgatgcttttatctttaaggtaaataaccaagctgtcatctggtacccatatcatttgtgcctgcactttatttcatcttaactaattagatcagaaatactaaataaatagtttgaggaagtctatatctcyttttaccaaatttcagaaggcatcacttaaaatgtgtgaattagaaaaaagtagttattaaaatacttgctaaaattataaaaatgaaatacacggtttttyrccaggcacagtggtcacgcctataatcccagcagtttgggaggctgaggtgggcggatcacctgaggtcaggagtttgggaccagcctaaccaacatgtagaaaccccctctctactaaaaatacaaaattagtcaggcatggtggcaggcgcttgtattcccagctactcgggaggctgaggcaggagaatcgcttgaacctgggaggcgcaggttgcagtgagccaagatcacgccattgcactccagcctgggcagcaagagtgaaactctgtctcaaaaaaaaaaaaaaaaaagaaaagaaaaagaaattcacagtttttcacctatcagactgtgagggaaggagaaaaacttctgtgttgtttgacttctttttatgatgacatctgtggtattccttttttggaagaagtatgcttactgacttaaaacattgtacatataacattatatttgtatcaaaaattccagcagtaccaaaggtcacagatttgaaaagtgaaattcccctttcagctcctcactcttgccatcctagtcctctccycagaggtaracactaatagacagttcagaatatgtctataatttacatgtatgttgagttatattactttttttaaaaatttgagatagggtcttgctctgtcactcagcctggagtgcagcaatgtgaatacagctcactgcagcctcaaccctgggctcaagtggtcttcctgcctcagcctcgcatgtagcccagacaggtccatgctactatgcctgaataatttttggagtttttgtagagacagagggtctcactttgttgcccagtctcgaactccttggctgaagcaatcttacccccttggcctcccaaggtgccgggattataggcaggagcaactgcgcccagccaggttgtaatttttaattagcaaaaccaatatgaaatttctattttggaaaaaaagtatttgctgacccctagtggtcctcattaagtagcacataatttgttttgaaataacttrttttaattatttttaaaatttattwttttttttttgagacagggtctcactctgttcttccccacctctactaaaaaaccttgtctcatcaggcacggtggctcatgccagcactttgggaggctgaggcaggcagatcaygaggtcaggagttcgagaccagcatggccaacatggtgaaaccccgtctctactaaaagtacaaaattagccaggcatggtggcaggcgcctgtagtcccrgctacttgggagggtgaggcaggagaattgcttgaacccgggaggcagaggttgctgtgagctgagatcgcgccattgcactccagcctgggtaacaagagcgaaactccgtctcaaaaacaaacaaaaacgaaacccgtttttactaaaaaaaaaaaaaaaaatacaaaaattagcctggcatgrtggtgtgcgtctgtagccccagctgctcaggaggctgagtcccagctgctgggaggcaggggttgcagtgagccgagagatcgcgtcactgaactccagcctgggtgtacatttcatgaacaccctgaactcattcttcccaggctggagtgcagtggtgcattcaaagctcacygcacacttaaactgggctcaagcaacctttcctcctcagcctcccaagtagctgagactaaagatgagtgccaccactaattttaaaattttmtgtagagatggtgtccttctatgttgcccaggctggttttgaactccaggcctcaagtgattctcctacctcrcctcccaaagtcctgggatcacaggggtaagctgttgtgcctggccaatttttatttttattttattattatttatttatttatttttgagacaagagtttttctcttgtcacccaggctggatcttggctcactgcaacctccgcctcctgggttcaagcgattctcctgcctcagcctcccaagtagctgggattacaggcggccaccaccacgcctggctaagttttgtatttttagcagagacagggtttcaccatgttggccagrctggtcttgaactaacctcaggtgatccacccgcctcggsctcccaaagtgttaggattacaggcgtgagccattgcgcccggcctatttttacttttatttttgggacggggtcttgctctgttgcccaggctggagagcagtggggcaatcacagttcgctgaagccttgaacttttgggcttaagcagtcattctgcttcatcctcctaagtagctgggactgaaataactatttagatctgaattatgacttaggttgaaacaacagtaagagagaaaaggagaacctaaggtaatacctggatggctcaagtttacatgtttttccctccaaatacacagatcaccagggaagggagcaagggggcaacctgttaccacttcagyttgaaattcatagaagcatgttatagaatatacatctgaaagaacattttgtactatgtatttgagtatttttattatcataatcaatagttatttgattaaacaaataatcatttgtttataattgaartgaaacttttcatgtaacacttatcaaaaggcagagaagcgattgaaactcttcatttgaaaaatraaagcattggttttcccttagatattggatcagaaaggtacactttcagcttcaccattcgggattcaccagcacattttgtaaatgcagcttcctggggcaatgaagattacatcamgtctctttctgacagctttagggttggtgactgtggtaagttggcattgattcttaaactttttccatcatagtgttattcctgtggtatgtttatggtaactatactgaaggagttgaaatgagacacagttcgtaattctcaagaactttatcagaaaaagtcaagtgttaagagtataatgcagtggggcacggtggctcatgcctgtaatcccaacactttgggaggctgaggtgggtggattgcgtgagttcaggagttcgagaccagcctgagcaacatggcaagaccccatttctacaaaaaattagctgggtgtggtggcgtgggcctgtagtaccagctactaaggaggctgaagcaggagggtggcttgagccctggaggtggaggttgcagcgagccaacatcgtacctctgcactccagcctgrgtcacagagtaagaccctgtctcaaaaaaaaaaaaaaaaaaaaaaaaagactgcaatgcgaggcattcagaatgttatttgaagcatacaaatgtgatagttatrtttttactaaataaccttactgtctttggtttattacatatttcartttgcaycaacccattktattgttataattggttatctttctatagacatataatacagccactgaatakattttgataaaagttgacatttgaccactgaatagattttgataaaaactgatatttaaattgttaatgggattttaaggaactttacttttagttgaaataccaaatcttttacatctactcaccccagtatctctttgacagaacagcctcatatagtagraagaacaggagactttgaaaacacagaggtctagattcaaatcccagttccaacattkacttacatyatggctttgagaaaatttcttaatcttgttgggtctcaactatgaaataatacctcattaggttcttgtaaatattaaatgagatggtgtacctagtataacgtgtggaacttagtcactcaacagataacttttatgagccctagcctcataaaaggaacaagaaagcatgtatactagttcttcacgatagaaaaagagaaaagagtaatgcaggtaatgaaaacactcctctttaatactgtggtctcaagcagctgactccccataccggttatttagaacctaatcatatattgccttgtattgttaactttcaggacaatgtrtggtatctctctagttgaataatagggtcattgaacatatggactatgaaggcagaaagcttcacaaacttcatagggcccagtatagctatagacatcccttgaataaatgctggaatattagttacatatggagataaagatttcaattttgacatctcagtatcaaaatatgttatatgttgatgatggagaagatgaatgaggtgaggaatttttaaagcctagagtcgatgatgatcataaattaaacaggatgttatttaggatgttagtgtttatcttgttactgttttgtaatatcatcatactttgccctctgttttagtgataattgaaaatcctctgatccaaagaaaggaaatagaaagagaagaaaaattcagccctgcaactcctaggtaagcatctgtctagcacagagattgtgcsagaatgatcattactaataatgttgtatcagattagcagagatcttactaaaagtgttctgtttctatttcaataaaaatgaggagtttaattttctcttacaaaattcwtctttgattatgacataatttactttgatacagagtcacatgawaaatggctttggttttagtactttgattctcattcttagatttacaaaaatttgactttgtcatgttaaaactgaatgaggagaaaagataaactttggaaattacatctgtcttttttcatgtcaaggtatccttctactcacaggcttaccatcttagggcagattccttmgaagcagagcttgagaggaggactcttgtgggagtggttggttgagggtgagctctcaggggaaccctgcgaggatagaccaggaagcagctgagcagagaagtgggttcacctggagcctcagcaggagccgggagggagctctggagtgggagtggccccttagagcagtgccctggctgtagtccatccactccccaaacccscaggatggggcggggcatcagctcaaaggcgggtctggcagttctggagagaagggtgtagctgtgccctgtaccagcctgtaaagggctcttggtgggcacrgcagtctacrgcatttacactcgcatcaactgtgacccgttcccaccttcttttctgacctcatcttatgccagactctsaagcctcatttctctgtagccacagtgaatttctttatatttcatgaacaccgtgaactcattctgcactaagaacgtttgtatttccttttatttttattttttattttttactgagacagagtcccactctgttgcccaggctggagtgcagtggcacgatctcggctcaytgtaacctctaactcctgggttcaaaccattctcccacctcagcctcccaagtagctgtgattacaggcacacgccccacacccagctaatttttgtatttttagtagaggcggggtttygctatgttggccaggctggtgtcgaactcctgacctcaagtgatccgcccgcctcggcctcccaaagggctgggattacaggcgtgagccaccgcgcctggccaaacttttgtattttctattctctctctgcatagaactttctcccatctgtttgactatttgcttctttgggttattgactcacagcttaaatgtcatcttcttcaaccttccccatctactctgtttgtggtagcgctaatggtcaattactkggattttgccctggcttttgtcascataacccaagtcaccgtctgagattgtttgattcattgttcttgggtctccccctcacatatgtgagcctcatgagatcaaaggtcttgtctgccttcttcaccaccatatcccttgtgcctagcatagggtctggtatataacagattctcagtattcatggaagtgatggatggatggttagatggagagaayattcttggtagagggaagaaacaggaaacctcctgtcttttccagaacagttaatattagtttgagccatatgaaactgctgatgttttactatttttcatctagaaataccaatttcataatgtaatagtctgatayggctggaatgcagggcaygggcaggaggagaagcttaaggtggaagcagagatattttacagacagctttgctttcatacygagttatttcctttgtgactggtagccacaatgatggtctttgagctgggaaataatattttcatatttgtggtttaggaagatcactttgcttayggaggatggactgtaggggaatgaagcttagttaggatagcaaggcagtggcttgggagagaagtgatgagrtaggtaagtgaggccgagcagtggggaggaggtggggctgggttagagractgctggggcacagagtgsaagggccgggagggactcggtgcaggagggagagctcctcagttcgggctcactgtgccagtgttctgcgtctgctccatgcagagctcagyaggggtaggaaaaacacagtccctgacctgaggcactaaggcagaacagccaggtccataagagagagaaacaaccagtcctygggtttgtataacccctgaaagtttcagagcgcttttwtgctcctatttttttggagaaggaaacaagcgcagagtcttgggcaagatcagacaaatggtatgtttagaaccccgacacgaatcaattctcaaaacatttccttaatgaaagtgcactgtaaacaaaaaatgttttgctgtattattcaatgtttctaagagtaaaaagtatatattagtattgtctaaayttcaatgaaaaatgtagtttaaatgtggacctggaaatatttttctttccaaagatcactttcaaataactttcttgtrtttttgcaatttagcaactgtaaactgttgctcagtgagaatcactcaacagtaaaagtttgttccagttatgaagtggacacaaagttactttctttgatacatttacctgttaaagagtctcatgattattattcactgggtgacattgttgcaaatggacacagtcttaatgggaggattattaacgtgcttgcagctgtgaaatcggtaagttaaaaccccsacaaagccaagtgcaatykggcaggggaggtgcagtcacttgatctgtgtttgggatggagtggtcaygatcagctggggtaacttttcttctctatcttggtagtatgctgaattaagaaaacagtaacacttctcattaaagggraactagctttttatctgtggrtgagtagtaaaataaaattgtatttgaatgctaaatgcagtgttccactctgctcgtaaatgatctgctaactataggagaactttttatacattgcttaaacaaagatgtaaatggaaagggtaagcttattgactcgaaaatctccatgaccttccttgaaggggcgtagttgaataagttaagggatcagttctgtgcctttgtgctcagagctgcccagcaaccagggagggagtgggaatacacrctgccctgctgtagggctccatggtctaataggtgcagtgggaccatgctggtgaggtgcacgggaggatggccctccrtggggcaccaggggggtgttcccttctggtgcatcagcgtctgtctgaattactgtagcaagttctgagctctgtagttggacagaccagagccacaaggcggagattgagatgtagacctcaacggtaaagtttcacaaaataaagtacatgaaaattagtccaggcacagtggcttacacctgtgatcctagcactttgggagaccaaggcagagggatcacttgagcccagttcaagaccagcctgggcaacatggtgaaactccatctctacaaaaaatacaaaaattagcyggatgtggtggtgtgtacctgtartctcagctgcttgggaggctsaagtgggaggatcacctgagcctgggaggttgaggttgcagtgagccaaaatcatgccactgcactccagcctgggcaatagagggagaccctgtctcaaaaaaaaaaaaaaaaaaaggcctggcgtggtggctcatgcctgtaatcctagcactttgggaggctgaggcgggtggatcacaaggtcaggagttcgagaccagcctggccagtatggtgaaacaccatcgccactaaaaatacaaaaattagctgggtggcctggtgcggtggctcacgcytgtaatcccagcactttgggtggctgaggcgggaggatcacgaggtcaggagatcgagaccatcctggctaacacggtgaaaccccgtctctactaaaaatacaaaaaattagccaggcgaggtggtgggcgcctgtagtcccagctactcaggaggctgaggcaggagaatggcgtgaacccgggaggcagagcttgcagtgagccaagattgcgccactgcactccagcctgggcgacagagtgagactccgactcaaaagaaaaaaaaattagctgggcatggtgacaggttcctgcagtcccagctacttgggaggctgagtcaggagaatcacttgaacctggaaggtggaggttgcagtgagccgagatcgtaccactgccctccagtctgggcgacagaacgagactccgtctcaaaaaaaaaaaaattagctgggcatggtggcaggtacctgkagtcccagctactcaggaggctgaggcaggagaattacttgaacccaggagacagaggttgcaatgagctgagatggcgccactgcactccagcctgggcgacagagcgagattctgggttgataaataaataaataaagaggcaagagtaatttcttaatatagagagggatgatagtcaagagacaaaaaaaaaaaaaaggaaaaaacacacatgcttatgatagttcatgtaagtaaatgtgaattgcttgttataktaaatggtgactgagagaacgtgaccctttcagatggcagggccctggctgtggaggacatgcctgccacctggggagcatctgtatactttagggagaaggaataagccygctatatgatcatcttgaaaaacaggagaagtcactttgtaggcagtttatgttcaatcctattcagttgttcaaaggagtgctcaattgtttgcgatttccccaaattctagacagtgctattacgtttataatgaagtaagaattgtctacaaccctgaatgaatatagtagtataagcaggaaactgcggcagctttcccaccccctcagtgagtctggaacctttcatgtgtcacgtcacttcttctcatgcctttcatctcccctttggctttcagccctcttacattttcttttcttcatactttttttttctttttgagatggagtcttgctctgtcacccaggctggagtgcagagtgcagtggcgtgatcttggctcactgcaacctccacctcccgggttcaagcaattctcctgcctcagcctcccgagtagccaggactacaggagtgtaccaccatgcccagctaatttttatatttttagtagagacaaggtttcaccatattggccaggctagtctcgaattcctgacctcgtgattcacccacctaggcctcccaaagtgctgggattacaggcgtgagccaccgcgcccggccactcttcacactttcatttaacctgttgtttcttcctctcacccccactggcgtttcatgttaaaactcctttttaatacagtgttctccacctycccaaccccagatgttaggctgacctctcagcctctggctgtcctttctagrtccctttctctgggcaccacagatgcagtggtggcagaggtgggggyggccagtgactgtccatgctgggcctgctgctgtgcatctctcagaggtgcctgccgttcccacatgagaagccactgggtggagagaagggtcctagtttsaactcttctttttttttttttttaacttgctttaatgggcaagagsatttccacttctttgatcatcttaccccacaatggacagaattggacagtgtcaaagtttcctgtgtatctcgcatgtggctctcaccatggtagccctgtggagaaggcaaaggacatatcctatatttgtttgtttcctgtggacactttttataccacagatatgctrtatttgatgttcactaagaagacggaggtgctgagccccagagagcctgagttcattcagtcacatgagttccacgctgagccatggggatacaaaggtgctggaaacacagtccytgccctcgaggagtccaygtagatgccccagaggggcctgtcatggagctttgttgtgacatgttaaaaagactttcagtctctacttcaagcacctgtctccctgtgtctcttcaaagtgttgtgtgacttacaacttcagctacgtacatgtagtttagagatagatgctttaaaataatcaactatatattactggttsttgctagtttaatatttctaatttggtgtttaaaaggtgaacatttgagtattttcatcaacaaatacttaagaacttctacatataggtgaagagtaatgatttatttccatttctaaggttggagagccaaaatactttacaacttcagaccggagaaaaggccagaggtgtgaagttagactctatgatgaaacagagtcgtcttttgcgatgacatggtaaacaccgatgtctgttccaaactgtgaaatccctgtagttatcaccaggacattttcattttatcaaaaatatgatggacttcatatcaagagaggataatgataggagatgaatgatattttaaaaaataaatctcactcttgaatgttgagttgttayggayaccaccttaaaatgaggtctttagatggcatggaattgcttagggggactccaccgtgcccagttttattattgaattctgtcgtgtaacaaatgatgttttattaggtcccatggaacaagccagagtttccctctgtgcttcctgggaagtatcctggagcagggcaggacacaggggcacgtgggccagggtggggactgcaccctgaagcactgccaggtacaacaaggcattgtctagacctctgatgcctgggtaccaaaggaactgatttcaaaartgtcttcaacccatcaaggcccctgagcagtttatccactgggggacactcaccttcatggtctgaaagtgtgagtttaaagtcttcaggctttagttctaactagcctggagtgattaagtgttggaaaaataaattaagaattggcagagcagagtattactagaggagagtgtgtgttgaaggaatgttctctcatggagttgttaaattctccctaggaggaagctggcatgcttaagactaggaggtctttgaccaccttggggatggctgaccccagccactgaagctttcttttattgttgtaaataatatgtcactatcagttttttctagtgtattcaatttgtattacttctttttaaacaaatgcagttggrataatgaatccattctacttgcacagagctggatgccacgagaaacaggtattatcattcaatgattgtgtccaatatttgtcatttatatcctcccatgtaataattttaaatggcttttttcccaaacagtaatatttgcctcagatgtaagaataaattttgacaaatttcggaactgcatgacagcaactgtaatctcaaaaaccattattacaactaatccaggtaaaaaactttgtgaaaccttttatccctttggaaatgactgaacacatttcaatatttatacagtatatttaagaatgaaaattcagcctggatttaattcaaattagaagtaaaaattgctttatataacttttttaaaaacttacartgaactttgatatctttactaaagaaatgtgaggtcggacgtggtggctcatgcctgtaatcccagcactttgggaggccaaggcaggcggatcacctgaggtcaggagttcaagaccagactggccaacatggtgaaacccagtctctactaaaaatataaaaattagctgggcttggtggtgggcgcctgtaatcccagctactcgggagactgaggcaggagaatcacttgaacccaggaggcagaaattgcagtgagctgaaatcgcgccattgtactccagcctaggccacaagagcaagaccctatcttaaaaaaaaaacaaggctggcgcggtggctcacacctgtaattccagcacttygggaggccaaggtgggctgctcacgaggtcaagagattgagaccatcctggccaacatggtgaaaccctgtttctactaaaaatagaaaaattagccgagcgtaaaagtgtgcgcctgtagtaccagctactcgggaagctaaggcaggagaatcacttcaacccaggaggtggaggttgcagtgagccgagattgcaccactgcrctccagcttggcgacagagcgagactccgtctcraaaaaaaaaaaaaaaaaaaaaaaagtgaaaaaccagattaattttaaagtataattcattgtgataatttttgagagatcgattttattgcttggatgctaaattattgactaataggtaaattcagttttgctacattcaaataacttttactgctaggacattgataacacaygcatgcgtgcacacagtactctctgtgtagtatcattagctcataactgcacattaaatgcccagatgatcccctggagtggttgttgaaggagttacagtttattacagcatgaaatcaaggaagccagattggggagatgagggattagtgcctgtgagcattcccagggtgctttatagtgcagacataaccgtcaagccagtactgcyaaagaaatggagtaatcaatcctttgccatctcatgaagctatgagtayagtatgtagtgtatcatttaaaacatacgctcacrctgctggtctgtaacamagcatcagcagtgmcagaattataaagcaatgtgtgcttttgaccaaaccattatcagcatttttaaaagatagaattactatgaggaatggtgtaaaatactgagactctggtttttatatgagtactctgaatcttgcacatccaacacatggatgttgtctccttgaaggcagcaccatgggaggagatgtgcatgccccgaattgctcttcactgaactaatttactgagcatgtgctgtatgctgggtgctgttctggggtgcaacgacaaaatggataaatatttccaccctcatggagtttaccctycagcagggagagacagagaataaataatgaagataatatgtccgtgaattatgaaatatttaaggagaacaggtggaacagagtcaggaggacctagagagccacaaggtggtcgggcacgctgcatgggagagtgacgtttgagcaaagacttgatgaggaggctaaagggataaccaagggaaagccctgtgcctatgtgtgggaggaacacccaggggctggtgtggctggagcccaggagttcaaggccagcaggagctgttctgagaagagatggggcacccaggaagaaggcctcggaggctgttagagtgcactggcttctgctctggatggggtagcaggctggggtttggagcagagcggtgacagcatctgactcggctctgagaggtttgctctgactgctctgttggaaattgatggtgacacacgatagtctattatcaacacttaggacaacagtgcaacactcttcagttttttctttcctggagggaggtactatgtatggtttatttattttaatttaattttatttattttattttttttgagacagtctcactctgttgcccaggctggagtgcagtggcgtgatctcggctcactgcaagctccgcctcccgggttcacgccattctcctgcctcagcctcccgagtagctgggactacaggcgcccgccaccatgcctggctaattttttgtattttttattagagatggggtttcactgtgttaaccaggatggtctcaatctcctgaccatgtgagctgcctgcctcagcctcccaaagtgctgggattacaggtgtgagccactgcacctggcctatgtatggtttattattagaaataacttattaataaaaatagtttattattcttttttttttttaaatggagtcttgctctgtccccaggctggagtgcagtggcacaatctcggctcactgcagcctccgcctcctgggttcaagcgattctcctgttccagcctcctgggttggttgcccaggtgcccgctaccatgcccagctaatttttatgcttttagtagagacggggtttcaccatattggccaggctggtcttgaacttctgggctccagtgatccgcccgcctcggcctcccaaagtgctgggattacaggcatgagccaccacgcccggcctgttatttttacatttagtaataccagtgatagtaaaatcttcatcctctaagggcaaatttgagctggaaaagtttctaaaagacagatttgtctgatggaaaagatgatcaagcttgactgtacaatggtataaaaaactcmagatctmattaatgagacagatattataggatgttgtgcatttggctctgatgacagattcaaagaaaaaaatgtcaaagtattttgagcaataaccaacatcattagaaaaaatgccttctttctcaaggagacacatttttaaaatttattatttattgcttaactttttaattgacaaaaaattgaatacattttatacamtatgttgttttgaaatatgtatacattacagaatggctaaatcaagctaattaacatatgtgctacttcacatacttatcattttttttgtggtgagaacacgtaaaatctgttctcagtacttttcaagaatgtcatacgttgttactgatcatagctactacgttgtacagcagatctagatttcttggatttattctgtcaaggaaacagatttaaaggagaatactcgcgagaatgcacgaatttgtstgcttgtttatatcagctttacttttttttttagttttactttaagttctggcatacatgtgccgaacatgcaggtttgttacataggtatacatgtcccatgatggtttgctacatctatcaacctgtcatctaggtgttttttttttttgagacggagtctcactctgtcacccaggctggagtgcagtggcgcgatcttggctcactgcaagcttcgcctcccgggttcacagcattctcctgcctcagcctcccgagtagctgggacgacaggtgcccgccaccacacccagctaatttttttgtattttttagtagagacggggtttcaccatgttagccaggatggtcttgatctcgtgatctgcctgccttggcctcccaaagtgctgggattacaagtgtgagccaccgygcccagccttttttgtatttttagtagacatggggtttcaccatgttggccaggatggtcttgatttcttgacctcgtgatccacccaccttggcctcccaaagtgttgggattacaggtgtgagccactgtgcccagcctaatttttgtacttttcgtagagacggggttttgcagtgtttctcaggctggtctcaaactgctgggctcaagtgatccactggtcttggcctcccaaagtgctgggattacaggcctgagccaccatgccccacctgagcatcttatataccttttgcctatctgatgggagcttatgaccctctcccctgagaagtgctattcccatgtgtagaatttgcataaactgtcatattcctggacccgaaatccatgaagcctaggctgaggctcttcttttaaaaggattttgccggccaggcgcagtggctcatgcctgtaatcccaacactttgggaggccgaggtgggcggatcacttgaggttaggagttcaagaccagcccggtcaacatggtgaaatatcatctctactaaaaatacaaaaattagccgggcgtggtggtatggtgcctatagtcccagctactagggaggctaaggcaggaggatcgcttcagccggggaggtggatgttgtagtgagtcgagatcatgccactgcatcccagcctgggcaacagagtgagactctgtctccaaaaaaaaaaaaaaaggaaaaaaaaaaaaaggagaagggataagatgataggattctccttattgctattgctggcttatgccagacatgcgggagggaccaggaggaaaagagggaagttttagatcactccctgaaggcatgttctgtaacatagttctaggagatgagttacctagttatcatagatgatgcttaattcacctgaagagatgaagagagtaacaatggaatttagcatgaaataatgtattctgcaagccacattacattgtgtggaagaggaattttgctattgcttttgtggaggatatttaatgtgtttaatatcagtagcagtcactgatagaaaaagatactactggatcaaaatttatcatctttttgcctacaagaagggacaagccataagtgagactccatctctacaaaaaattaaaaaaaaatagctgggcatggtggcrcgtgcctgtgatctcagctactcaggaggctgagataggaggaccgcttgaaccctggaggtagagactgcagtgagctgtgttcatgccactgcactgcagcctcggtgacagagcaagaccctgtctcaaaaaataataataataataaaataaagccatgattgttactttggaaacattttttaaaatgttggcattatcatttgtagataatgccatttcaggaaacttgagagagcacacaggcattcagcgagctgtgaggtaaacttgatagagtgtatttcagtccctgccctgccacacaaccctaaaacggggacaggaatgatagtgtctacagccgtttttaggctactcaagggcagcccgatttatatgggaactttgttttctgatcagtaggtcatattaaagtaatcacaaagtagttccttctttctctctctttctttctctgttttttctttctcccctcccctcccctcccctcttctcttttcttcttttttttggggggtctcaaactcctgacctcaagaaatcctcctgcctcagcctcctgaaggattacaggtgtgagccaccttgcttggcccwaaaataggctttttttgtttgtttgttttttgagatggagtcttgctgtgtcacctaggctggagtgcagtggcatgtgctcagctcactgcaacctccgcctccagggttcaagcaattctcctgtctcagccccccaagtagctgggattacaggcgcgcaccaccacacatggctaatttttacatttttagtagagacggggtttcacaatgttggccagcctggtcttgaactcctgacctcaggtgatccacctgcctcagcctcccacagttctgggattacaggcgtgagccacagcgcccggcccaaaaatagctttttctctttttttgaaatggagtcttgctatgtcgcccaggctggagtgcagtggcgtgatctcggcttactgcagtctctgcctcctgggttcaagttattcccctgcctgagcctcctgagtagctgggactacaggtgtgtgccaccatgcctggctaattttttgtattttagtagagacggggtttcaccatgttggccaggatggtcttgatctcctgacctcgtgatccgcccgcctcaccctcccaaagtgctgggattataggcgtgaaccaccaygcccagcccatcatctaggttttaagccccacatgcattagctatttgtcctgatgctctccctcccctcaccccccattccccaacaggccccagtgtgtgttgttcccctccctgtgtccatgttatctcattgttcagctcccacttatgagtgagaacatatggtatttggctttctgttcctgtgttagtttgctgagaatggcggctttcagctttatccatgtctctgcaaaggacatgatctcattcctttttatggttgcattgtattccatggtatacatgtaccacattttctttatccagtctaccactgatggtcatttgggctggttccatgtctttgctattgtaaatagttatatcagttttacttttaatttcctgggctacacctgccttatagaaattaagaagctctaaatggcttgtgttcatcctagccaggtgtccagattcccttgtttctttctctgccctgagagtgcttatcagatagggagggcacaattcctgcctttctctgacagtcaggataacgctattgtcagtgaggacctgcagtgctggtacccacccatccctgccagcccccatcacaggaagctcattggctggatttctgtggcctcactccagcagatgttcccatctgaagcacagcaattcatgatgcatatctctccaagttaatagagttctgcattcattcattcgcccatgaccttatcagtatttttgaatgccttttacttgccaagaattgagataatatacatttctggaacaaggaaggagatgagtggctggtcagatggatgtgaggatagtcatcacgtgggacactgcgtgctggcaaggatttgacaacctagttctgagaaagaacaggtaggagacttgtattctgggagcaaggaggaagaaatgcccagatcttcccaggggagttaggaagtacagacattgtcaggacaatttgtaaaatattcaggggggcctggggtacttaatcatatgccggaggctggggtcctggggtccaagggcatcatgggggagctctttccaaactcgcgttcctgccttctggcacagcacccctgacccttgagcacactcatgtgccaatgtggggagctaggctttttatagagcctattttatatatttcaattgccttttgaaaaccttttttttatgataagtaaagaaatacgtataaaattcagaaaaaatatatagaaacataaacaaggaaaacaaagatcacctacaatcccactgtctagagagaatcattttttcgtatatattcttccagataattttgcatttatatatgtatttttttttttagacagagtcttgctctgttgcccaggctggagtgcagtggcgctatctcagtttactgcaagctccacctcccaggttcatgccagtctcctgcctcagcctcccaactagctgggactacaggcgcccaccaccacgcctggytaatttttttgtatttttagtagaggtggggtgtcaccatgttagccaggatggtctccatctcctgaccttgtgattcacctgcttcagcctcccaaagtgctgggattacaggcgtgagccactgcgcccggtcccttatatatgtagattttttaattaaaagggtattgaaccacataggttagtaagctgctcttttcactaacatctgttttagatgtaatgtggtgtacatctctctatgtttacagaattctacatcacattgttaatggccacgtaatattctatttgattgtattcttacatgtcttcactttttactattaaaatgattttgswtgatttaaatgtgatttaaatgataatcagtttgctttttacttattatgcattttcaatttaagatayaccagaagctaacattctgctgaattttataygagaaaataaagaaacraatgttctggatgatgaaattgacagttatttcaaagaatccataaattgtaagtgaccstttaaatatatttggatttttttaaaggccgaaattgggcctgtaaaggtttgtttgacatggtaaaagataccagattcctattctgtaactactatatttctactttctaaaggtagcttaaaatagtgggcatctttttctttttcttttgagcccaggagttcatgagaccagcctggccaacatggcaaaacgccgtctctactaaaaacacaaaaattagccaggtatcatgggatgtgcctgtaatcccagctgctcaggaggctgaggcaggagaatcccttgaacctgggaggtggaggttgcagtgagctgagatccagcctgggtgacagagcgaggctacactccagcctgggtgtcagaacaagactgtatctcaaaaaataaaaaaataaaagaaacacaatacagaatgcttggccaggtgtggtagctcacgcctgtaatcccagcactttgggaaaccaaggtggagggatcacttgaggtcaggagtttgagaccagcctggccaacatggtgaaatcccgtctctactaaaaatacaaaaaatgagccaggcatggtagggggcacctgtaatcccagatactcaggaggctgaggcaggagaattgcttgaacccaggaggcggaggttgcagtgagccaagatcacaccactgtactccagtctgggcaacagagcgagaccccgtctcaaaaaaaaaaaaaaaaaagaaacataatacagaatgcaacaaagagccccaaatagttatttggttaacatcttttaatctatctttttgtgcatatatactaatagaaggataaagacataaaaatattatagataaatagatacacatcaccatctttttattgaagaaaattaaatttcatgcactagacatcaacaaaagaaaagaaaccaatgaagtgctgaaggaaccggataagttctcataaaagttttctnacccaagtaatattagttcctggaagattcttctaagataaagaaaaataaaaatgaataataggttattgtctttagttttgtaaagtttatttttgttgttgcttcacatcctcactaatgttgtgttattactcttttaaatgttaggtgtttagtggaattctctttttttttttttttgagatggagtctggctctgtcacccaggctgggatgcaaagccgcgatctcggttgagtgcaacctccacctcctgggttcaagcgattctccttccttagcctcccaagtagctgggattacgggcacacactgctacacccagctaattttttatttttagtagagacagggttttgctatgttggccaggctggtctcaaacccctgacctcaagcgatcgaccagtctcaacctctcaaagtgttagaattacaggcatgagccaccacatccggcctactcttgtttaatttgtattttcctgatgattattgaggcccagtacgtgtattggccattttgataacttttkttttgtgatgtactttatttatttattatttttttttattttattttttgagatggagtctcgctctgtcgcccgggttggagtgcagtggcgcgatctcggctcactgcaagctccgcctcccgggttcacgccattctcctgcctcagcctctggagtaggtgggacgacaggcgcccaccccacgcccgactaattctttgtatttttagtagagacagggtttcaccatgttagccaggatggtcgcgatctcctgacctcgtgatccacctgcctcggcttcccaaagtgctaggattacaggcgtgagccactgcgcctggctgtgtgatgtacttttaaattctcttccccatttaaaaaattgagtcagtgtcgccgggcgcggtggctcacgcctgtaatcccagcactttgggaggccgaggcgggcggatcacgaggtcaggagatggaaaccatcctggctaacacggtgaaaacccgtctctactaaaaatacaaaaaaaaattagccgtggtggcgggcgcccgtagtgccagctactcgggaggctgaggcaggagaatggcatgaacctgggaggcggagcttgcagtgagccgagatcgcgccactgcactaccgcctgggcgacagagtgagactctgtctcaaaaaataaaaaataaaaatgaaaataataataaaaaaaatcgagtcactgtctttttgagatggagttttgctcttgttgcccagactggagtgcaatggcgccatcttggctcaccacaacctccacttcctggattcaagcgattctcctgccttagcctcctgagtagctgggattacaggcatgcaccaccatgcctggctaattttttttttttttttttttaagtagagacagtgtttctccatgttggtcaggctgctctcgatctcccaacctcaggtgatctgcccacctcgacctcccaaattgctgggattacaggcatgagccactgtgcccagctgagtcactgtctttttctaattgatatttaagaattctttagataattctggatgagtcctttatctcattgtagactgctagcatctcccactctgtggcttgccttttcactttttaatggtgtcttttgatgaacagaaattcttcattttaatgaagactaatttcatttcctttttttccttatgttttgcttttatgtccatttatagaatcagtgtttatatagccaacatagtaatttttctgttacttaagctactgcatgttctcatttgtcatagctttccattcggatgtaaccttttatattttttagaatatatacagaactgtaatayttctttctgtttttagtaagtacaatagttgatgtctacacagttgaacaattaaagggaaaagctttgaagaatgaaggaaaagctgatccttcctatggcatcctttatgcctacatttccacactcaacattgatgatgaaactacaaaagtagttcgaaatagatggtaaggatccgtgtcacttttagcaaattcatttttgtaagaaataattattgttaataaattttaagctctctaaaagttaaagctgtttgttgayrtaacaggggttatgtattggagataaatgtgtaaaaaactrtactgaaaagtttccatagcaaaccagattaaaatattataattgccttttaaaatataatctgtatttccataattctaacatataaagatayaatgtgagaaacttttgacaaacttgtctaatgatttggcagaaagctattttggttgctaggccctatagcaatgtagtgacagcattaaaaaaaaattattttcaagccaggtgcagtagcatgcgcctgtagtctcagctactcaggaggctgaggtgggaggatcggttgagcccaggagtttgaagagtttgagtccagcctaggaaacatcaaacctcttgtagatcgaagttagtatttacttgcatagaaagtaaactgcaggccgggcacggtggctcacgcctgtaatcccagcactatgggaggtcgaggcaggtggatcacctgaggtcaggagtttgagatcagcctggccaatatagcgaaacaccatctctactaaaaatacaaaaaattagctgggtgtggtggsgggcacctgtaatgccagctactttggaggctgaggcatgagaattgcttgaacccaggaggcggaggtcgcggtgagccgagattgcaccattgcactccagcctgggcgagaagagtgaaactctgtctcaaaaaaaaaaaaaaraaaaagaaagaaaagaaagtaaactccagtagatttaatactcttagctaaaagatgcttggcaagaaatgtgtaatattattaggaaagtctctctatggatttttataactgaattttcattgagataatcctagattcacatggatgtataagaaataataagagggctgggcgtggtggctcacgcctgtaatcccagcactttgggaggccaaggcaggtrgatcacgaggtcaggagattgagaccatcctggctaacacggtgaaaccctgtctctactaaaaaatacaaaaaaattagccgggcatggtggtgggcgcctgtagtcccagctactcgagaggatgaggcaggagaatggcgtggacctgggaggcagagcttgcagcgagccgagattgcgccactgcactgcactccatcctgggcgacagagcgagactgtgtctcaaaaaaaaaaaaaataataataagagagatcccttgtggcttttgccccgtttcccccagtgttaccattttgcaagtgatagtaccatgtcacagccaggatatcaacaccattcaatccactggtcgtattcagattcctccaggttcacatgcagtcgtgtgtgtgtgttctcattagttttatcacacttgtaagtttgtgtatctattgccacagtcaagatattgacctctgaatttttaaaacattttatgatgtggtattaaagttgaaaaaagtaatgtggaggatgctgtgtaaggccttgtattcattttttgaaaaatagttttcaaaaattgaaaaactaatttttttcctgtacatttattattgatatctgaggaaaagcatctaaaatttgctagaccaagtgatctgtggctagataagaaaccactatcttcagttcatttcccctatttgagaaatttgaattagtttccctgtttaaaattgctaamgtaaggcttgcttcagaaatatggaatagcataaatcactgaaagagaggagagtgtatcaccagcagtgttaatagcatctgggtgctacccggccagccttgcaaggctttctgtatttgtagagaaggccccgtgcaggcccatcyagtgagcagctgttgaactcgtgctttccaggcacaagacacagttcctgccctcagaactcccagccagggaggtgagaataagkagctgatgcaacagcaccagtcagtcctgaggcgtgcactctgctgctgttccaagagagaaaggctgcaggctgggatacgagaagggagggccccagcaaggaartgagactgggatggacctcgagggcttggcagagggagggaaggagggcaggcagaggactggtgtacrcagtttcagatgactcctgagaatggctkcgtagaaagtgtgttttactgttttttacgactgtcttgtagaccgcatagcactgaacactcagtaagttttccacacactgtcgtagagtttttagtgacaattctttttctgctacagatgaaatttgtagcttagggcatcacattttatcattgtctttgtttcttttcagttccagctgtggttatattgtaaatgaagcatctaacatgtgcacaacttgcaacaaaaactccttggactttaaatctgtctttctcagtttccatgtgctgattgatctgactgatcacacaggcacccttcattcctgtagtctcacaggaagtgttgctgaggagactttgggctgcacggtaaatagcaaaaaggaagaaatgtttagaatatttccaaagtgaatgctttttcccaaaaaaatayaggttgttttgtcaaacatttgatagaaattgattcactaataaacagcctgggaaaaaatcatcttgctttaaacacacattgctttgatgaacaaatgttacatattttatatcaaaatcctagctaatatttactattatgagtaatgactgaggccattagcctaaatggataaataaacatgatgttttagggctgggcaccgtggctcacgcctgtaatctcagcactttgggaggccaaggagggcggatcacttgaggtcaggagtttgagaccagcctggccaatatggcgaaaccccatttctactaaaaatacaaaaattagctgggtgtggtgacgtgcacttgtaatcctagctactcaggaggctggggcacgagaatcacttgagcccaggatgtggaagttgcagtgagccaagatcacgccactgcactccagcctgagtgatagagcaagacttgtctccaaataattaaaaaaaaaacaaaacactaaggaaacatgatgtttgatatagtcaagtaacgatgggtaaaacaacaagtcggagatgttgatcagtcataaggtggtttttctaggaagatttggctgtgtttcacctactcagttacataaagtcagctacacgttttctccttgatttgcagctatacaacagcagcagatacttagggattagcatgtgcatttggcaataggcacctgttttttattgttaaaaccagctcatgaaatttaccattagactttagttccaaattctgcttccactttattgaggggatttttccttgctgagatacctgattacctttggagattttgcttatatagcctttcctgccttatcttctctatcaaaacagttgagttggctgggcatagtgggtcacacctgtaatcctaccactttgggaggctgaggcaggaggatcacttgaggccaggagttcaagatcaccctgggcaacatagtgagaccctgtctctacaaaacataaaacataaaacaattagccagagaagagtagtgcatacctgtaacctcagaaacgggaagctgagggaggattgcttgaccccgggagttcgaggctgcagtgagctgtgatagcactgctgcactccagcttgggcgacagagtgagaccctgtctctacaaacaaaaacaaacgattgagctgtaattactgcaaataaaatttcatttctaatgagaaagtttgtttcacactgttgtcaaaaatgaattttctttgtaaacttcaaatatatttgtctcatattttttttttaaccaggtacatgagtttcttgcaatgacagatgaacagaaaacagcattaaagtggcaatttctcttggaaagaagcaaaatttatttaaaagttagtgcattttatagtcccatattattctatatatttattattctgtatattcaaaccataagaaaaacctagataaattcgagaatttattatttctaatgcccagttcccagatgtgcataaggattcagctatcctaaaagyaaaggaaatagccaggggttttttcatattgtataaaggagttaccaaagacatcaaagaaaatagaccaacaaagaaaatatcctttaaggttaaatccaaaacaggggaaagggctttaaaatcagagctgatgggtgcaatagtacacacctgtaatcccagctacttggtaggctgaggtgggaggatcacctgaacccaggagtttgaggccagcctgggcaacatagtgagacccctctcttggcccctgaaccccaaaaggtcagactaggttgtccccacccccacccaccctgtggtgttcccttcagttagtgaggcagtgtaagatagcacaattaagtgcttgggttgttgcggggagacagatttggtctgaatcctaatcccaccacacctcagcctgtgagaccctgcagaggttaattaaatttgctaacctgcaaaattccatgatcctccaaccctgaagggccacagttgcctcctgaggcacttcagtgttggaggatcctcgagtctttgtgttcaaggtgtcagaggaggaaaagtgcagtgagacaaactcccctattgcagatgagaaaagtgggaccaagaagtgttgccacttgcactgggtcacaggtgagactggacccagccagcctagttgcttcacttcatggttctcaactcttttctcttgtattctcccrcaagttaatgtgctcccgtttgtgtggttatatctactgatacttgctgtactgcagcttaatactgaaaaaattttaaaacattctagagcacacattccatttgtgtcagactaatggtatcatggagcctctagaaaacattgcgtgctgatgagagaattagtgttattatgaaattagttttcatctcatggacatcctgcaggagcatttgtgaatgctgcatctcctccatctcagcctcataagcaggttttcccattttccatggccaccaacacatctgaatagtttgcagacatggagtctccagtggccttagcaatatttctaggacctcggcttgaggcctcttcactaccaggccaaaggcagtaaagttgcagtaagatgctgcatctcttcaacagttagcatgggcccctaaatactgtctctttgcaagtcagggcatgcttaggtccttgaccgaccctgtatactttccctccagacaggaggcaccacttgctaatgagtctgatcaacttaagttcatgggaacttaagagttttctaaatttgattcaaatacaacaatgaatgaccctcaagtggatactgcactttcccagagaatgtgtgtaacagatgttccaggtggctttaacaaatattcataattatggacaagctgcttcgtgcattaggtaacacartattttacaaataaaaagatgtaaaatccaaaaccaaaatccaaaaaccatgatgcatacawaaataacacatgttgaagatttaactcattaattaatgaggggaccagtaagatataggggagaagaaggattcaaaggggaattggttcatgaccagcctgtccaagatggtgaaaccccatctctgctaaaactacaaaaattagcyrggcatggtggcaggtgcctgtcatcccagctactcaggaggctgaggcagtagaattgcttgaacctgggaggcagaggttgcagtgagccgagatctcaccactgcactccagcctgggtgacagagtgagactgtgtctcaaaaaaaaaaaaaaagaaaaaggaattggaagaatagatacataggcaggcaatgcaaaatgctgaatgggtttgcttgtagatgaacctctgggctcctctatagggcagaagcagtgcatcttcactcagacagacttcatggggattccatgagcagggtcattcgaatcactgtcagctttctacaacctagttctaaaacagctcagtccgtgcaatgggaggtgtagcccctgtagaatcagacagctctgaacgtgttctagccaatgtcagactaccacaacattccattgaaagggtacccacttattgttattgcccacttaaagtctttcmcagttttccctgatgttggtacttttttttctctcagtcttgaaattaaagtggttgatatgtccttccactctatattaaataaaatgttggttaaagtgctgtataaattataaaaaataagactattaaaataagactattattaaattatgtcatcatattcctgtagtctcacagattgagtccctgctacagcttaaagtctatcacagttggtagtttgaacacacattaagccctttttcatatgttatacttttttttttttttgagacacagtctcactctgctcgctctgtcacacaggctggagcacgtggtgcgatcacagcttactgcagcctcaaccttcccaggctcaagtgatcctcccgcctcagccaccgagtagctgggaccacaggtgtgcaccaccacacctggctaatttttatatttttagtagagacagggtttcactttattggccaggctggtcttgaacttcaggcctcaagtgatctacctgccttggcctcccaaagtgctgggattacaggcatgagccacctcacccagccctgcattagacattttttttagtgggggggggtgggggggacagagtttcgctctagttgcccaagctggagtgcaatggcacaatctctgctcactgcaacctctgcctcccgggttcaagggattctcctgcctcagccttctgagtagctgggataacaggtgtgtgccaccatgcccggctaattttttgtatttttagtagaaatgggagtttcaccatgttagccaggctggtctcgaactcctgacctcaggtgatccacccgccttggcctcccaaagtgctgggattacaggcgtgagccactgcaccagcacccggccacattagacttttaatcccaactttcctacctgagagaaatagcatgaaaagtgacaaaatttttacaaaatcagtcagaagctgggcctgtaaattaactgtactccgagactggaactcttcccatcatcttacagctctaawggaagtttatattagtatctgtaaacaaaactttcattgcagttctctattcgtgatcattgatttttcaacttgatatacaaggggattttaaaaattaaccttttgtctctttttctgtttctcctcgcagttcgttctatcacacagagcaaggagtggattgaaaattagtgtactctcgtgcaagcttgcagatcctactgaggcaagcagaaacttgtctggacaaaaacatgtttaaaacggtctatcattttgaactctggaaaagtataagagttttaactccctttaaaatggaatattaatttgaaaattatggggaaaattgcattttgtttacatgtggtgaacatgtttctagaaattgttatggtggaggtggtctgggtgagtctgaaggcctctctcatctgacctcccttcttagaaggcctcctactgtctttgccttgtctcctcccaagttggaaaatgtttacatgaattaataaacagatttaatcttctacagatttgaatgatttattttcttttccatgtagttgaacggctttgagtgagtttcttaatcctgagtgaatgatttattttcttaagccagtttattatttgtcttggttccctggaaaaagagtaggacctcaagggctgggcacggtggctcatgcctgtaatcccagcactttgggatgccaaggcagtcaggagatcgagaccatcctggctaacacagtgaaaccccatctctactaaaaatacaaaaaattagctgggtgtggtggcacgtgcctgttgtcccagctactcgggaggctgaggcaggagaatctcttgaacctgggatgaggaggttgtagtgagctgagatccagccactgcactccagcctgggcgacagagcgagactctgtcttaaaaaaaaaaaaaaaaaaaaaaaaagtacctctaaagactactttctgagagctgggtggtgactcgtcatctgacagatctgacaggatgagggcaaggggctcttggtgctgggtgggaatagccaaagtcgtgggcaatcctgtgcgactgctttgagcacctggggctcttctagtccctggtcttctctggtgacacactggagtgcccagtgcttgtggaggcttgctggctcagggctgacatgactgagtctgaatcaactgggaggagaccaacttcaaaaggttcatgagcatgcctgggtctcagaactctgagggggacctactcaggacatgaggacgacagctgccactttatctgtttgctttgcagcagccacaaagtaaacggctcaactgcacaccattgagagtcacttgcttcagggcgcagactccagctgtgaagacccaccgctaaggtcagtgttgacccacggcctgggaggtttgacctggtactttagaaggctacatgccctccaccacaggattgaaaaaaaaggaaaaagtgagtatatgaaactgtttcctaaggctggtgttgggagataaaccatcgtcagtcatgttttatctggcttttaccatgtgcagccacagaggagggatgcaggttcacccctaagtgtccaaattgtggtgataaggtaatgaacgacttgacctagttgtgcagaacaggccttccatcctcccttggggagaactggggggtttgtgaagccaggtgaatggggagggtggacagggaaggaaggagaggagagaagtgagggtgtcgtggttggtgctggcttggctcccactgttggttcagcaagagtgggtatggtgccccctccactgagccccgtgtccaggagctcaggagaagccaccttactcggttaattttaaaacattttgtagagacagtgatcttggcattttgcccaggctggtcttgaattcctgggctcaagtgatccacccacctcggcctcccaaagtgctgggattacaggcgtgagccaccgtgcccagctgacacttatatttttaagaaaaagaggaaaataggccaggcgcggtggctcacgcctgtaatcccagcactttgggaggctgaggtgggtggatcacgaggtccggagatgtagaccatcctggctaacacggtgaagccctgtctctactaaaaatacaaaaaaattagccgggtgtggtggagggcgcctgtagtcccagctactcgggaggctgaggcaggagaatggcgtgaacccgggaggcggagcttgcagtgagccgagatcatgccactgcactccagcgtgggcaacagagcaagactttgtctcaaaaaaaaaaaaaaaaaaaaaagaatgaccatagccatgatgcccagccttagctggggtgtcggtgtaaaggtattcttaaacagtcttgtcaagtgcaacatggtagttttttttcctctgcaatttggcaaaaagtgtcaaaatttcaaagtgcaaaccatttcattgatttcacttctaagacttccctaaggaaacaaacaagtgccaatgatgtagagcagcggcccaaactttttggcacctgggaatggtttggtggaagacagtttttccacggattgccgggtcggggggcggggatggtttcaggatgaaacagttccacctcagatccaggcattagatactcataaggagtgcgcaacctagatccctcgcatgtgcagtttacaaaagggttcacgctcctgtgagaatctcatgccaccactgatctgacgggaagcagaactcgggcgggaatgctcacttgcctcctactgtgtggctccgtttgtaacaggccacgggctggtagcagtcagtggcctggaggttgggggacccttgctgtagagtatatggaggatgccccttgcatcattgtttctaatagcagagcatctgaaaagtgtgcaatctgtcggggatgctccacccagaaaatcttcacttgctgaagtccctcagcttctatgagggtcagaaaattacctgaggaagctatggaaagggcggggagagcagattctggtgccaacagactcctcgctccagagcttccccttgggttcaccagctgactgaagctgatatccagcccagagaccactttcttccttggagtttgctccctgccctttctgcttcattacgcttctcttctcctgagagcactccttcagcaaatcacgggaacaagaatccccatcttaggctgtgcttctggggtacatgatctgagatacagccattaaaaaggggtacctgtacttatattcactgacctggaaatatgttcgtgatatattaagtggatgtgtaatactcatttttttataaaaggccaatcaacatgttttaaaaacacaacagaagaacagatgtcaaaccatatattctgtacagactaatacactgtggaattattttcttaagcgtgataatggtctcatttccatgtaggagaatatcctgattcttgggagatgtatgctgaaagggaagagtctttctgcagtcaccatcccgacgcatttccaaaatatgggggtgtgtgtgtgtgtgtgtgtgtgtgtgtgtgtatagagagagagaggtgcatgtctgcatatatacacatatatggcggggaggaagggagagacgtaggaccagaggacaaacatagtgaatgctggtaattgttgaaactattaaagggcatatggagttcattgtattggtttttaaactttttcataggtttaaatgtattcaaaacgtggaaaaacgttatcttctgaatgctaggattactatgattttagcaatatcaggaattgtcggacttggtgtctctgtttttgattcttgcatctaaggactttgtgtgcctacacctgcaatgctgatgtcaatgtttgtgacaaagcttgttctaccactgtggtgaacactgaccccaggggcactgtactcggtgctggcttgtgccacctactagggctgcatgtgagcactgcttctactttataactttgactttaatagtctgtcaacttggtagctatatctcagctgaaccgtgtacctggtagcagactaataatacacttccagcatgagcacgccctttgatccaactcttccacttatgggaacctagccaaaggaaaaaacagcacatgtgctgatactagcaaatcattagagacaatctcaaggtccaaaaatggaggcttgacttcagaatcttatgcaatccatgaaagttgtactgcagaaatgtgtcagctaacaaggaaaaagatggtcacaatatacagtgaaataagcaagttaaataattgtatggtatagctgggcgcggtggctcatgcctgtaatcccagcactttgggacgcccaggcgggtggatcacttgaggtcaggagttcgagaccagcttgaccaacatggtgaaaccctgtctctactaaaaatacaaaattagccgggtgtggtggcgtatgcctgtaatctgagctacttgggaggctgaggcaggagaatcacttgaacctgggaggcagaggttgcagtgagccgagattgtgccactgcactccagcctgggcaaaaagagttaaacgccatctcaaaaagaaaaaagaaagaaagaaaaaaaagaaaattgtatggtatgagcaaactctatttaaaaaattacaattatatccacagacttggaagaacttgcaataaatgcttaactttggctgtctctgggtagatgaaatttttggtgttttgttctaattgctaatctctattttctgactcttctgtaattacatgcattgccaagcaatgaaaaaataatactaaaagtagttaagatagcatgatacttaataaagaaatccaattatggcacttcctcatactatattataatttaagcatggggttgcagcatacctaagtgtctgattcttcttatgtatctacttacaagatgcagcctgcattgtggtcaaaacttcacgttctggtcttgggggagctgggttacatctcggctctgccactaagctgagtgactttagccagccttcgcagcctctagatctgtcttcatctgagtaatggggatggtagtgatcatactaagcttatggcttggttgctggttacataacacgtggaaatacagaataaactgcttggcatggtgcctaacagtactgtgttcaatacatggggaccgttactactcaatcagatgtcctaggctttcttcaggggccagcagatgatgtgaacgcgaacaggaacccctgccgaagcccaaaggactcctccaggcattgacagctatgctgtgcatcttgcctggatgttttttcagaggagggtgcaggcaagagcaaaagcagcagtctcaggctattcaacttccacaaagcctccttaactccggttgggaagtacagttgctgattaactgtgttaacacagcacagtgctcagaaggccaaaggtcaaagactaaggtctgaagccccacaaggaggaaatatccctcctcgtcattactggggggaaaaaaattacccttgtaagccacttagaagggagcacctttatttggaaaacagtaatttcaaaatcatctcccgaactcagaatcgatgggtctgggtagataccctaagtaaacaggtgaaatcttcattacttgttcacttattaagtaaaattttaaattaaccgattatgtacaggagtgtttttcacatttcctgataagaatcacttggaatgccctgtaaacacagcttcactggagattaatcctatcaaattgattcagcaagtccgagatgggccagtaatttgtggagatttttatttttacaaatgcttcctgatgatgaccaaatctaagaaaatttggtaaacaacggaaagttatctggaacataactttcagttttctctgcagtttttaagtgctgaactactgatcatcctagagataacccactgaaaagtcttctctaatccagttttacaaaaggaaagtctttttaacatttggtttgataaaatgttttccgaagaaatactttacttgcctgttttcatttctggcccacccgttctacttcacgttttcttgaagggttcatcttctatgagttgaggcatagcaatctaatcatttttaaaataaatggtttcttttttttttttttttttttgagacggagtctcgctgttgcccaggagtacagtggcgcaatctcagctcactgtaagctccgcctcccgggttcaattgattctcctgcctcagcctccagagtagctgggactacaggcgcccgccaccacgcccggctaattttttgtatttttagtagagacggggtttcaccctgttagccaagatggtctggatctcctgacgtcgtgagccgcccgcctcggcctcccaaagtgctgcgattacaggcgtgag

SEQ ID NO: 96340 - DNA, 37851 bp, Homo sapiens
  misc_feature (1)...(37851): n = A,T,C or G
gcatggcacagaataagaactcaatgaacatcagctattatcattattacacaagggtagtacctagagaaacatttctggagattaggaaaaatgatgtctttgaaccaggaaggcataaatttcagggactgctagcatcagtgaagcccagttgtacgtcttaccccttgttattaatatatctgtcaggtgcaaacatgtagtatcaggattctgaactttgcctctgggaggatgacgaggtggctagagctagactctcagggttcaaggacacccctgggctggaatcttggaaacgagtgctcctgggatcttttcagtggttttcttgacttctctgactgaaagtttagctatccctggagctgaagggcagcaaactgtgggatcctggggacttgaagacctagaacaagtccattttttttcctccaggtccatcccaaccctgaggctataacctgggctagtctaggcgaaggccagggctgggagggtggggtctgctgccagcctgccagctatttgtgactcacccttcccttccctcctctggtttccctgcccgcccctacccaattggggcgagaaaggaagaagttgacttggaggcagagaatcttagaacatccacagagctgggagtcaccaaccctcgtattttacagaggaggaaattgaggcatagagagagaattactctcttaagggcacagtcagactctagacacccatccttagtacattccactaaatcttagagctcatggctctctggatctaattttaaacatcaaatactaaaattttaaccaagagataaatattgtttccaaagcctgtgttagtatttaaagtttccttttttcacttaagcgttcattgctcacattccaagtcctttaagtcgaccattactcaggaaatagctatgtctccagaatattgaggctgccccagaggggcaggagccccgaatttgagggcccaggcctgattacctggacttctgaattccttaatcacatcatagactgtatcctcctcctctccctgaccgttgctgctagtaggtagccctcaagagggaatcatttgcttgaagcctcaaaacttattaagcctccacaaacactgaagactgcagtgctacacctggctgagggggttgtgtgtgtgtgtgtgtgtgtgtgtgtgtgcgtgtgtgtgtgtgtgtagagggtgtcattgcgtagtataggaggaagttacgatactggcatggttgggggatgtgggcttgtctgtgctgaggctgaagagatgcccagtaatatttgccattcttcctcaggaaggctcatttctcctatcaaggtgaaaagtgagattcagactcaggtattttcagaaacttcccagtgacaggtggggagaggatggggtgggaagttggggacctggaggccaaacaagaacccttctccacccgtgcggcactgtggaggttccgaagaggacttccctccgagtcgggtcccaggaaccgggcttcaccatccctccgaatgagcgggagggatggaggggaaggtctgggaaacgttacccaccgggttcgggcccagccctcccgctgcacccccgcgtcccagcgcagacccttctcgatacccgctccagctgtcacgcttcctccttcccgacccagcagcacgaacgcagcccgtgggtcctcggcttccctacccctgtccttttccgatgggggagggtggggcgctggggggctcgcggggtctctaccttgcttgagagggctcgcggtcgcagctgaagcgccggcgctggagctggagcccgagctgggctggaggggacgggccaggcagacgcggccgcagcggggccgccccgttcctgacgacatagctgcccgccccccaccccagcctgcccgccgcgcccgcgcccggcgcccccgactctgggaacttcgaagttggagaggcccgtttctaggtttccagttcaccataacctgctccaccctccctcgaatatgtccggggctttggacacattttctccatttgctgcgctcctcatcttcttcccgcgccggcggcagctctgcttctattttcccttctttctaatcactcacagcctctcccttcatcccaaacctgggagaccaagataccgggcgggccgctaacagaacagctcggcagttgggcacccaaccaacgtctcattctctcctgattgctgccatcctgaacttccctaaccaactcccttccatccaccactgacttcacactcaggagatcccacgggggcaagcccagagtcccaaactccacaacctgaccaaacacctccctcccgccccgggctctaccctgcttgagacaatctccccaccttcttcacgttcctctttccttttagacctattttccccagtctaaggacacctcctgtcaagactcatgttctctccttaattctagggtggagttttgcactttggtctatgtccaccctttctccacgccctcatcctcccactttacctgctggtcttggcaggtggcacagaaggccctggccaaaagtagggagtgaaaggtcctttcagcttcccctgcctggagtctcttctagagtcattaaggctcttggggtcgcatggatggtggtgaaggtggtacagcaagggagagagatggaggcctagggactcactggcaggaactggagacccaggcatcctgctcactggccccgccccaacccctgtctaactccctcctacccttcattgaaaatggggcagagtaacaaagccttaggttcctggaatcgtccttcttacacctgggggtgggaagaagggggaggggagacctctgactagaagggtatatgcatgtgtgggtattgtgtatgcatacatacacacacataatatatacatacttttggtgggggttggaaagggaatgaatacatgaggccctctagtggaaacagggatatctaagcagttcttgattgtttcaagacaggcttgttggaacagactcctccacatttgccagaaatatagctgctgagtaatagggtttgggagtattgttgtatccaaactggagatttcgggcataggttgaagaggggtctgtctctctgctcctgtgcccctccaagtctcaccctctcacccccaatcataaaaagacaagggccaaaggccgggcgcggtggctcacacctgtaatcccagcactttggcaggctgaggcaggcggatcacgagatcaggagattgagaccatcctggctaacacggtgaaaacctgtctctactaaaaatacaaaaaattagccgggcgtggtggcacatgcctgtagtcccagttactcgcgaggctgaggcaggagaatcgcttgaacctgggaggcagaggttgcagtgagccgagatcatgccactgcactccagcctgggtgacacgagcaaaactctgtctaaaaaaaaaaaaaaaaaaaaaaaaaaacaaggcccttgacactccccatcctgtctttacagtattttcttcactgttagcaaagcttcatctctccttcctctatgacctccttagtcatagtaaacaaactcttctgaaggccttttatacactaagtcctgtacttagttctgcaatacaagcaaaaacatagtccagtttagggactatatcaatgagtggtgcaatgtgtgtaaagcctctctgctctgagctactttaaacaaacatacaatgtaagaataggtcccctaacacctctgcctatcagttttctgtccctggatctttcatttagaaatcttggaacgatattaatctctaaggcactcagctttccttgcaaagaatgctcaaagtaatgccaccctatgtattacctgtgtttctcactctatcgtctttagatatgtccctaaataaagttgaagacactccttttaagatagtttttggtacttcaaagtggggtgtaatgttatctctcgaataaggaataaggtggaatcagtcttactctagacttctttgtgtcttctttaggatctgtgctccatcataccccaagtcagttactggggggtgtgggtgggggaagaaaagccaagaaacatctaagaaggaggcgtttaatgcctacggttccaggtgctcatttctttaatcaaccacatcataaaaatcagaaagaaagaaaccgcaatgaacaaagggaaaggaaaaaacaacagcctgttctccccggccttttttgccctgttcctcctcagggtggggggccacatccggggccccgggttgggtcccaggcaggtctactaagcagacaattgagtttcacttcctgtcaaccctagtgctgaggcaggatgtctgggggtgggaagggggcctagggttggtagtgaacaggggcgactttaggtttccctcctgcacaaaggtctattgagcagcctctgaaagctgcagagaccactcctgaggtagttcagtcaagaccaacgtatcccattagttcttagaggcttcatcccacactctcacgtctaatcataacaaggttaaggacaagatgttagaccctgcagggctgaagtacaatcggtgaaaagagagcaagggtttaagaccacagtgtcacaacacttgcaataacagtgtatcgtatgcaaatactttttatttatttattttgagactgagtcttgctctataatacaagctggagtgcagtggcacgatcttggctcactgcaacctccacctcccaggttcattcctcagcctcccgagtagctgggattacaggcactcgccaccacacccggctaatttttgtatttttagtagagatgggatttcaccatgttggccatggctggtctcgaactcctgacctcaagtgatctgcccacctgggcctcccaaagtgctgggattacaggcatgagacaccgcacccggcctggaaatactttttaaatgagccccacccccagacattctgaattggcctctagtggaagtcacagacatggaggatgggaaggaaggcaagctgcggcccccagaaaacttctgaggcctaatttgtcttataaaggtcctagtcagccattgctcagttttttagttttttttttttttttttttttttttttttgagacggggtcccactctgtcgtccaagctggagtgcagtggagcgatcttggctcactgcaacctccgcctcccagattcaagaaattctctgcctcagcctcccgagtagctgagattacaggcacccgccaccacgcccggctaatttttttgtatttttagtagagacggggtttcgccatcttggccaggttggtcttgaactccggacctcgtgatccacccgccttggcctcccaaagtgctgggattacaggcgtgagcaaccgcgcctgggttttgttttgttttttaaatgggacatgctgcctagtgttggaggtagtcaccaatacttacctcctgcctcctccctggttccaggggtactgctggacattaaactaagccaaagtggggatataagcaggaaggtaaaagggttgataaggaaaaagctatatgagggtggaggagggcagagttgacacctgaggagaggaacctgcagccgggctcctctcaggctgtaggggaaacaagtttaacaggacttagccctgaaggaacaacagttgctgaaatgggcggcggagggagaccatatgggttcgtctgcagaatagggaggtacggcgcagggcaggactacaaatggagtgacactacgggaccggattattggcgagttgccccgctttagatcctcagcggttggacgagtttaattagaatactaagtaggtccgcccagaagctttcaccctgccctctgaccctagggcccagcccgaggaggcactcagggttaggaggtctgggcgagaagcaactagggccctcatcacttcgccgccgaatccccggcgccgcccagcggggcagagccaggccagggccgcccgcccaacctggtccgctgcctcttcggccatggaagctgccggcagccctgcggctacggagacaggtgaccgacccgcggcgccctccgccttgcacgcccctcccgcgggtctctggtggttgagtgggttggccgacagcaatcggcacacgaattcgacctccccaccttcttagggttagatagggtctccaaccgtccctagaaacacttgtgcgccccagtgcgttcctggagtttgtctgctccacgtcaccaagccgctctgagatctgggtgcaggccagagcctggatattcttcctttcttcatttataaggccccctttttgggtgcaggtgggccttgcgcccttttccctcgcaggtcctggacgtacgaggagttcctggggatgagagggactgtgcctcggaacttctcttggctccctgaggactgttttacaggcagcaagcgctcagtaatggtatcggtggcagtaaaaagcccacggctttattttattaactatttcagcttctccactcttcctcctcctccacctccgcccatgaaatggtgcactctccctttaagactaagatggtggcttgctacgatcgggactccacttccggtggggaggggggcgggaccccagcccgctcacgccggaagtggtttgcgttttcaagatggcgactccctatgttactgacgagaccggcggtgagtgcgggaggcgcggagccgcttctctccgggctctcggggcaggggttcggacttggaaaggggtctgtgccccgcccatcccggggcccctcctttgccccgcccccmggaccgccttccccattcattctctcctacggggtgtctcctgcgcccccttctggtctcgtgtttggggtctctgcttccggtcacccaaaccctggggtccttcagtgctggtccctgcttcaggaccctcacgggcccttagcttttctccagcagttggaccactcatatctcttttaggttcttcaggcttgggggcttctacactctcatttccctccarttcctgccctccttcttttcccctcccccatctcagctatacttggtttctgccctaccccagtcccgttttcattatttttctcgaagctttatttgctgaagacctcctcgtttctacatagtaccttttcctctcccgtatcttcatttgttgggtcactgaggtttagaggtgtgaagggaagaggaccytaatacaactttcagcttgagttttctccctgatggagccacccttcgctaccttctcccgtgatggtgatagaaattgaggggtctaaggtgggaaaaggcaaacaggaaagtatctagtggcttttctccgaagccctttgacaagtgaataaaacccactattccttctggctagagaagaatttgcagcctggctggccgagatgctgaagtgtctgctgtgtatgtaaggtgtatgtgttggaaacggagaatcacagcttttatcatggttttgtcccttcctaatggcctcatctttaggaaaatatgcatagtagtaatagctactcaatgatgatcaaataatatatgtaaaagcaatttataaaatactgtgcaagtgcaaagtgtttctgtttttgtagccctcatatgtgtagtctgtagtctgtagaagcaacagtgtgcctgtgccttggtacacacggtgttttaaaatgtgccattttgcttcttgctctgctgctttccatgttccttacacctcagcccacctattttatggtatctgatgacaacccaggttgctgctacttctccccaacctcacaatttaaagtggtactacctctttccttctgttctctacccagtagctccttcatgaattaccaacttttaatgtgtgttttgaaaatactacttatccagtatacttctctttactcttaatcattttctttaccctgactccgtgaaaatccaggtatcacatcttaccttaccttgtcactaaaagctgttttctgttttccgtgactatgtggaagagaaaaaggaataaactgcttttttgttttcctttactatgtccagatcattgatctaccactgtcactctaatcctcatggaaggtattgccatgcaattatagcagtttctgtaaaactttagtgtcatcatttactgcccacagggacccagacctattgcatcatatttttttctctcctttttttcttgctatcattttcagtgtctccagcaccattggaatattctgatttcatagttcctcagcatgagacggtcgactttcctttgtattttcaaaccagttgcacatcagaatcactacaacctggatctcatctaggacaccgctttttcttcagctgctccccatcactttagcctccttaccagtcacctatttcactatcttaaacccacaggatcagctttttgtcctcaagttctctggttcttgaccttcccatttcattgaatctgtcagtaccttatggcctttggtgctgcccagctagacctctgtgaccagccactttgataatatcctcttgctttctttattcattttgattttctatactaagcaggcacttctgttgtctctaatgatgggtatgattagagatgttttcttggcttccgcttctaggccacagcatgttgctagagaaaaagtacagagctatcagattcaatataacttaacttctgccaagatcatggcttctaattatttttttctttttaaaaaaattttttgctgggcatggcggctcacgcctataatcccagcactttgggaggccgaggtgggtggatcaactgaggtcaggggttcaagaccagcctgaccaatatggtgaaaccccgtctctactaaaactactaaaattagctgagtgtggtggcatggtggygtgggcctgtcatctcagctactcgggaggttgagacagsagaatcgcttgaacccaggaggcagaggttgcagtgagctgagttcgcaccactgcactccagcctgggcgacagagcgagactctgtctcaaaaataaataataaataaatatttaaatttattttttatgttcttccatagctgtttccccaaccttttccagatctgtgtgaccatcccttttaattctccttcttttggcagaagacttcatttttatttcactgaaaactcaaggcctatcatttttgtttcctttttcttcacagccagattttgtttgtttctttctttttttaaaaatgaagcgatgcagacttgctatgttgcccaggctggttttgaactcctggcctyaagtgatcttcccacctcagtctgccaaaatgttgggattacaggtgtgagcmtgcacctggccccagatttctcgaatatgaagaaatctcctgatatttctgtttccttgctgcctatttgttcttaactctttgcagtcattatttctagcactaccctctctcgagttgcctatgcctttttctaattgtttcgtgaatatcttcactcttggatatactgttatacctcaaatccaacctgaccaaaaccagtatcagtttttccatcactatttctgttaaaggcaccattattctagccaacccaaggtaaacttttgtatcgtttctttttttttttttctttgagacagagtctcactctgtcgcccaggctggagtgcagtagcgcgatctcggctcactgcaacctccgcctccctggttcaagtgattcttctgcctcagcctcctgagtagctgggattacaggcacatgtcaccacgcttggctaatttttgtattgttagtagagacagggtttcatcatattggtcaggttggcctcgaactcctgacctcgtgatctgccagccttggcctcccaaagtgctgggattacaggcatgagtcaccacgcctagccatttctttttttaatattctaaatatacttgattttttagaacacttttagatttatagaaaaattgagaagatgctacagagatttcccatataccctacactcagtttccccattactgtcatcttacgttaatatagtactttgcttgcaattaatgaagcaatattgatatattactattaactagaatccatacatcatttcattagttttgttttttttttttttcagacagggtcttgctctgtcacccaggctggagtgcagtggtgcaatcaccatttactgtagtcttaacttctgggctcaagtgatcctcacatctcaacctactgagtagctgggactacaggtacacaccaccacgcctggctaatttttgtattttttgtagaaatgcggtcttgctctgttgcccagtctgatctcaaattcctgggctcaagcaatcctcacgccctggcctcccaaagtgctagaattacaggtgtgaaccaccatgcctggctgatttccttagtttttacttaatttatttttatatttatttatttattactatttttttgagacggagttctgctcttgttgcccaggctggagtgcaatggtgagatctcagctcaccgcaacctctgcctcccgggttcaagtgattctcctgcctcagcctcctgggtagctgggattacaggcatgtgccaccatgcccggctaattttgtatttttagtagagatgggtttctccatgttggtcaggttggtctcaaactcctgacctcgggtgatctgcccacctcggcctcccaaagtgctgggattacaggtgtgagccactgcgcccagcctttttacctaatttttttttgttgttccaggatcttatccagggtactacataacatttagttctcatgtctctttaagctcctcttggctgtgacattttctcaggctttccttgttttccatgaccttgagttttgaggagtactggtcaggtattttgtaggatatccttctattggaatttgtctgatgtatttctcatgattagatttgggttatgtgttttggggaggaagaccacagaggtaaagtgacattttcatcacattgtatcagggtacrtagtatcacaatgattttttactgttaatatttttgtttttttgagacagggtcttccctctgttgcccagactggagtgcggtgatgccatcatggctcactgaaatcttgacctcccagtctcaattgatcctcccacctcagcctcctgagtatctaggaccacaggcgtgtgctatcatgaccagctaattttttttttttttttttttttggtaaagatggtctcactatgttgcctgggctggtcttgaactcctgagctcaaggtattgttcccctttggcctaccaaaattctgggattactaggcatgagtcactatgcccagcctgttagtattgaccgtgatcatctggcagagatattgtttgtaaggcttcactgtaaagttaggctttacccccttcctttccatactgtagggaagtcactattgccagcccacgcataaggagtagagagttgtgctctccttaaaaaaagagattaagggctgggcatggtggcatatgcctgtaatcccagcactttgggaggctgaggctggaggattgcttgaggccatcctaagcaacatagcaagacctcttatctacaaaaagatttaaaaaaaaaaygagctgggtaaggtggcacacacctgtggtcccagctactcagggagcctcagaggggaagattgagccagggaggctgaggctgcattgagccgtgattgtgccactgtactccatcctcagtgagaggctgtctcaaaaaacaattaaaaaaacacactatttggcatttttctgcccaggagatttttttcttttcctttattaatttatgtatatcaatatggacttatagatgtgkattttatatgttaggttataatccaatactattttatttgctttattgctcaaatgttccagttttgaacattgggaactcttttagttttttacttggcccatctccctttgacatttgccatcattgcaggtatgattttgttctctgctccagtcctgcggtctgccatttctccaagaagcccttgttctttttactaaagagtaatgttaaaaactaagatctgatcactaggtgtttttatttctatgggagtatttttttttatttatgggagttttatttttttatgawtatttttattatcatcttttacttctctcttgccctcctcatgtatatcagttatcaaaatatcattcttttattcctactgctgttacccttatcccatctacagtacttgttagctatatagccttgggaatctaagtcttagttttctcatcaatgaaattggaataactcctgcaacacaggattattatgcgtattaaaatttaaataaagtaatttacatgtttggcacataaaaagtgtccaacacattgttctataattattactattatgtaagggtcattgtatgggttagaagaaattactatatatggccaagtaccaggcatagtacttgggccattccaagtgcctgctaaaattctagtttctgttgttctgcaaatattactgtgacctcctaaactggtcatcgtatttccagtccctctcttgtttcatttctacagatacactgctaccagattactgcttcttaagtgcaaatttagttatgtaatttttgttcaatattaattcatcaacccagagtctgctgttatatatggcatatatctttctaaactgttttaaacatagcagaaccagatggtatatacatttttatatcttgccttttcatttagccttatgaggtaaatgtttttccttgctattaaaaactctgtaaacatcttttaaaatactggcagagtgttttatagtttgggcatgcaccctatcttactttcttctgttattggacttttagattgttttcagaatttttattataagaacactagaatgtttttgtgcatgcatctttttcggcatttagggttattttctttttctttttttttctttttttttttttgagacggagtctcgctttgtcaccaggctggagtgcagtggtgcgatctctgctcactacaatctccacctcctgggctcaagtgattctcctgcctcagcctcccgagtagctggaattacaggcatgcacccccactcccaggtaatttttgtatttttagtagagatggtgttttaccatgttgtctaggctggtcttgaactcctggcctcaaaggatcgcccaccttggcctcccagaatgctagaattacaggcatgagccaccgtgctcggcctgattttttaaattatctgtaagatgaggtcttgctatgtttcccaggcaggtctccaactcctgggttcaagtgatcctctcaccttggcctcctgaagtgttgggattataggcatgagcaactagtttttcttttccttttttttttttaaagagacaaggtcttgctctgttgcccaggttagtgtacagtggcacagtcatagcttgctgtagtcttaactgttggggtcaagcaattctcctgcctcckcctcctgagtagctggtactagtactacaggcatgcgccaccatggctggctaatttttgaatttttttatagagctatgttgcccaggctgttctcaaactcattttcacaagcagtgctcccaccatggccttccaaagtggtgggattacaggcatgagccactgcacccagcctagtttttcttttttctttttcttttttttttgagacggagtcttgctctgtctccagtcacccagactggagtgcagtgacgcgatctctgctctgccaactgggctcaagctattctgcctcagcctcccaaatagatgagattacaggcacgcaccactatgcccagctatttttttgtatttttagttagagatggggtttcaccgtgttggccaggctggtctcgaactcctgacctcaggtgatctgcctgccttggcctcccaaagtgctgggattayagrcgtgagccaccatgcctggcccccagcctagtttttctaagcacatatgcatatataacattaaggtaaaatgacatattttgaattatactgttaagattggctgttattttctaaaatatgaatccttgaaacacctagtaatcttctgagatgtgacacaaaataaataactaaaatagaggccgggagtggtggctcacgcctgtaacctcaacactttgggaggctgaggcgggtggattgcttgagcccaggaattcgagaccagcctgggcaacatggcaaaacctcgtctctactaaaaatacaaaaaattaactgggtgtggtgacacacacactcctgtagtcccaactacttgggaggctgaggtgggaggaattgcttgagcctgggaggtggagactgcagtgagtcaaggtccagctaytgcactccagcctgggtgacagtgacctcatctcaaagataaataaaataaaatgcaaataatgtttctgtgcacaaattttgagaaacactgtaaaccatattcccatcttgcatatgtacctgaataagaacatagtaactcatttaagccttgctgttaaaaaaaacaaacgcaaaatcttttttggtgtttaacccagaatttcccaaacttatttaacaatttttagggataacccctgtttaatatcttatgggagtagtattttacataacaaaagctttgggaaatgtgattaaatgataggactaccttttttatttttgtttttttgagatggacgcttgctctgtcgcccaggctggagtgcagtggtgcaatctcggctcagtgcgacctctgcctctcaggttcaagcgattctcctgtctcagcctcccaagtagctgggactacaggcacgtgccaccacgcccagctaatttttgtatttttagtagagacggggtttcaccgtgttggccaggctggcctcaaactcctgacctcaggtgatccacccgccttggcctcccagtgctgggattacaggtgtaagccaccatgtccagcctaatttttaaattttttatagagatggaggtcttaccatcttacccaggatggtcttgaactcctgggctcaagtgatcctcctacgtcagcctcctagtgtgctgggattacagacgtgagccaccatgcctggcctatttgttgatttccatttttattttagatttagaaaatgtgcaggtttgtggttgggcgcagtggcctctaatcccaacactttgggaggctgaggcaggcagatcgcttgcatccaggagttcaagaccagcctgggcaacatggtgaaacctcttctctacaaaaattagctgggcatggtggcgcacacctgtaatcccagctacttgggaggctaagctgggaggatcacttgaacccaggaggtcaagccagcagtaaactgcaatcacaccactgtactccagcctgggcaacagagtgaaactctgtctcaaaaannnnnnnnnnnnnnnnnnnnaacccgggtggatcacaaggtcaagagattgagaccatcctggccaacatggtgaaaccccgtctctactaaaaatacgaaaattagctgggtgtggtggcacgtgcctgtaatcccagcactctgggaggccgaggcgggcggatcacgaggtcaggagatcaagaccatcctggctaacacagtgaaacgccgtctctactaaaaatacaaaaaaaaacttaggcgggcatggtggcgggcgcctgtagtcccagctactcgggagactgaggcaggagaatggcgtgaacccgggaggcggagcttgcagtgagccgagatcgtgccactgaactccagcctgggcgacagagcgagactccgtctcaaaaaaaagaaaaaaaaaaaaaagaaaatgtgtaggtttgttacatgggtataattatgtgatgctgaggtttggggtatgagtgatcccatcacccagatagtgagcttagtacccaatagttaagttttttttttgtttgtttgtttgttttttgtgatggagtcttgctttgttgcccaggctggagttcagtggtgtgatcttggctcactacaacctctatctcccgggttgaagtgattctcctgcctcagcatcccaagtagctgggattacaggcatgcaccaccatgaccggctgagttttgtatttagtagagttggggtttcaccgtgttggccaggctggtctccaactcctgacctcaggcgatccatctagcttggcctcccaaagtgctgggattacaggcgtgagccactgtgcctggccccagtagatagtttttaaacccgtgcccgcctctaataatccccaatgtctgttgctgccatctttatgtccgtgagtacccagtgtttagctcctacttataagtgagaacatgcagtatttggttttctgttcctgtgttaatttgcttaggataatggccctcagctgcatccatgttgctacaaaggacattattttgctctttatggctgtgacagactactttttatttaattaattaatttttttttgttttgagatggagtcttgctcttgttgcccaggctggagtgcaatggtgcgaccttggctccctgcaacctctgcctcctgggttcaagtgatctcttgcctcagcctcccaagtagctgagattataggcacccaccaccacgcccggctaattttttttatttttagtagagacgggctttcaccatgttggccaggctggtctcgagctcctgacctcaggtgatccacccgtcttggtctcccaaagtgctgggattgcaggcatggtgagccactgcgcccagctgacaaactactttttaaatttttttttatttttgagacagagtttcactctgttgcccaggctggagtacagtggtgtgattgcagtttactgctggcttgacctcctgggttcaagtgatcctcccagcttagcctcccaagtagctgggattacaggtgtgcgccaccatgcccagctaatttttgtagagaagaggtttcaccatgttgcccaggctggtcttgaactcctggatgcaagcgatctgcctgcctcagcctcccaaagtgttgggattagaggcatgarccaccacgcccaacctcagactactttctttttttctttttttgagaccgacttttgctgttgttgcccaggctgtggagtgcaatggcctgacctcggctcaccgcaacatccacctcccgggttcaagtgattcttctgcctcagcctcccgagtagctgggattacagacatgtgccccacacctggctaatttttgtatttttagtagagacggggctttctccatgttggtcaggctggtcttgaactcctgacctcaggtgatccgcccgcctctgcctcccaaagtactgggattacaggcgtgagtcaccgtgcctggctgactacttttaaatgtagtattatcacatgctatgtttttgcccataccctctagtgaaactgggctgtatggctgatgtggaacagcagtgcgatggtgtgtaagctttggcatcagacttgagttcaggttacagatatgtgctacctttgggatcttgaccatgtcttttttttttttgagctggagtctcactctgtcacccaggctrgagtgcactggtgtggtttcagctcactgcaacctctgcctcctgacttcaagcaattctcctgtctcagcctcccgagtagctgggattacaagcatgtgccagcacgtctggctaatttttgtatttttagtagagatggggcttcgccatgttggccaggctggtctcgaactcctgacctcaggtgatccgcccgccttggcctcccaaagtgctgggattacaggcgtgagccaccgcaccaagacttgaccatgtgtttaacctcttgaagactgtttccttggctgtaaatgatgatatctatctatcgtttagatttaacaggatgatgtatacaaagttcctcctgtwatgtagctacttattaataaatactctttactaatcattcttaaatactgagttttccactgctaggattttgcttttgttgttcctcttatcccctttcccttttctctgcctgcagaaatactggctgctgatttgttgttatcattaattattactactttctagtctttagtgtcaaatgaggttttcctgattatctcctgtcatctcttaggatacttacaacactcttacttttgtcttatgctttgcttgcctaatttgcccacttcctccttayttagtctgtaaattttttgaaaattgggaccatcttactcatcttgataaccctattggcacttacggtacttttcttctaggaggctttttttttttttttttaaagataaactcttgctctgtcgcccaggctggagtgcaatggcatgatctgcaacctctgcctcccaggatcaagtgattctcctgtctcagcctcccgagtagctgggattacaggtgtgtgccaccaagcccagctaggaggcttttaatgtttattttgtttaatttgtagtctggcctctttaccaccgtgcttttctgaggctgtatttgtggagataaccagggatttccaaaatgccaaagccagaacctttttctcagttctcctttccttgatctctctgcagtatttaatactgttaatcacctacctttactttttttttttttttttttttttaggcagagtcttggactgttgcccaggctggagtgcagtggcacgatcttggcttactgcaacctctgcctcccgccttcaagggattctcttgcctcagcctcctgagtagctgggactgcaggcatgtgcctccatgcccrgctaattttttctatttttagtggagatggggtttcatcgtgttagccaggatggtctccatctcstgacctcgtgatccacccacctcggcctcccaaagtgctgggattacaggtrtgagccaccatgcccggccatcacctacctacctttatttaaaactgttggtctccatggcttagcatgtcctggtcttcctttcctatgaatcatttcctgttgttgctgtcaccttttcttccttgagggaaatgattatgatcattatttcagggtcattcctccagctctmatcttctctttgttatattttctctgtgttggaaaccacatccaggtcttattttggccctgagatcatccgcaggctgagacctgtgacttagatctcttttcttatttgaaaaaggtctcatacctttaacaaccatgtcccctacctctttggagttcctccatgccttgctatgttgtcttttcactgtctacctgcaacccctggaaacaaggaccctttcagtgtaagagtttttattgctgacagacttaaggaaatagattgagaattaaaaaacggcagatgtgagaaaatgacaaagcttaaaaagattcttacagtagcagtccccartctctagtttttgactctctgcaagatattatctgaaagtcctgatattttgcccttggtttttatttctaggggtgggaaccgccaaacctctcccttctttttgacttcacccttggataccatcaaggccagaggatggaaccaagataacataaaataggtgctcctttgtgataatgggctatttgtatctctgagggcttccacacaggatggccattcaagaagcttctgctctgcctttcattacagtctatctttagtcctcctaaaccttcagctataatctctatgcaatcaacttaaatatatgtttgtagtattgtccctttctcccaaattccrtgtaaaacacttgcctgaattgaattgtttccacaaagttgttttcccctgtggactttgtttatatcagtagtttttattttcccaattttccaaattcaagagtgataattataaatagttgtgttcttgtttgttatctttctcactagaatgtatactctaagaaggcaagaaccttgcttgctttattcattgttgtattcctagcttctgttacagtgtctggcacaagagtaagtgctcaataaaaatttaaaatccacgtgtgaataaatgtgattaccatgtgccctaccgtatattgagaaaaataagaatacatgtgaaaagcacgagattaaatccactgtgtcactgttttgattatttcctctctaattcacatcttggtaagtctttggatcctgttgatttaatcttcacaatgaatttctccttcattttcctttcattacctgtagaaaccatcgaagtcaagtcttttcacattgcagctgttgttttcattttctctacctttagtttatggtacacatttttcagtttaatcttaaatcattgctttgaacagatcacctgtactcccttattggccatcagtattctacagcttaaggcttcagtccaaactcagtggaggttggagacctttcatagtctcactaatttaccctgagtctcttttcacgttacatatgctttttgcccagaacattctggattcttgctcttccctgatgagatactcacatttattcattaattcagtccatatttactgtcttctgtgggccaggctctttgctacaaagttcaaagacagtttctgctttccaacaagcaaataattatgttaagcattagagcatgataaaagctaaaacaggtgctgcgagtgcacagaaagcaagttttaacctggcttggcgtaaggaagtcaggaaggctgccttgagttgatacttgaatttgacctttaaagaccaatgggaatgaacttaagataagcaaatatagtctattccaggccagaggaagcaaaagcaaaaaggtacagagaatagagacatgggtcaggttgagatttgtgaatattttagtttctattttttttttttcttttgagacggagttttgctcttgttgcccaggctggagtgcaatggcgtgatcttggctcactgcaacctccgcctcccgggttcaagtgattctcctgcctcaggctcccaagtagctgggattacaggagcttgccacagtgacctgctaatttttgtattttagtagaaatggggtttctccatgttggccaggctggtctcgaactcctgacctcagatgatccacccgcctccgcctcccaaagtgctgggattacatacgtgaaccactgcacccagccaaatatttgtttctagagcagagagtatggtggctttatgctaagaggctgaaaactagcaagaggtaaatcaagaaggcctttttttttkcccccctcttgcggagttttgctcctgttgcccaggctggagtgcgatggcacgatcttggctcactgcagcctcygcctcccaagttcaagcaattctcctgcctcagcctcccaagtagctgggattacaggcgtgagccaccacgcctggcctaatggaaatttttaacagaaaagttatcttatcaccccaatagaattttcattattgcatgttcttttctttttttaattttttgaggtggagtctcgctctatcacccaggctggagtgcagtggcgtgatctcggttcactgcaacctccacttcccagactcaagtgattgtcccaccttagcctcctgagtagctgggactacaggcatgcaccaccatgcccagctaatttttttttttattttcgtagagatagggtttcaccatgttggccgggctggtctcgaattcctgacctcaggtgacccacctgcctcggcttcccaaagtgttggcattacaggcatgagccactataccctgccttgcacattattttcaaaaaagtttttaaaatagagatagggtctcaatatgttgtccaagactcaattgatcctaccacatgaggactaagctctgactttttttatcttgccaaaattcctatctaaggggtctggggagtcatgccctacaaaccataagttctcatcagatgggttatttaaccctgtatctcccctcccctcccctccccttytcttttcttgatggagtttcgctcttgtcacccaggctagagtgcagtggcgcagtctcggctcattgcaacctccccctcctgggatcaagtgattctcctgcctcagcctcccgagtagctgggattacaggcgcccgccaccactcccagctaatttttgtatttttactagagacagcgtttcaccatgttggccaggctggttttaaactcctgacctcaggtgatccacccaccttggcctcccaaagtgctgtgattacaggcgtgagccaccatggctggcctcgttacttacttttcaatttgactctgacataacaagaaaataaaaatattttaccccaaaacatgtttcttgccgtatcttaaaatggctctgcaaagccgacctttgtaggggaaactgcatctgtaaaaaatctctattaacaggcygggctcagtcactcacacctataatctcagcactttgggaggccgaggcgggtggatcacatgaggtcaggagttcaagaccagcttggccaacatggcaaaaccccatctctacttaaaaatatataaaaattagccggacgtggtggcacacatctgtaatcccagctactcgggaggctgaggcaggagaatcgtttgaacctgggaggcggaggttgcagtgagcagagatggtgccactgcactccagcctgggctacaagagcaaagctccrtctcaaaaaaataaataaataaataaaattctgtattaacatagctagatctatttcttccaggctctcccaatgccgaagaggttaactaaaagtctagcaccttttaaagaactgaataggaaacgtttgtcatctgttgtctctaagggtagccaccataagacttcaaaagaaycttggtctccacaatcttttatctgaacctgaacctttctatcgatctcaggcctttagacaaactcaaccaattgtcaaccagaaatgtttaaatttacctatagcctggaagccccctgctttgagtcatcccacctttctgaaccaaaccaatgtatttcttaaatgtatttgagtgatgtctcatgcctccctaaaatatataaaaccaggtgtggtggctcacgcctgcaatcccaacactttgggaggctgaggtgggtggatcacctgaggtcaggagtttgagaccagcctggccaacatggcgaaaccctgtctctactaaaaatacaaaaaattagctgggcgtggtagtgggctcctgtagtcccaggtactcgggagactgaggcaagagaatcacttgaacccaggaggcggaggttgcagtgagccaagatcatgccactacactccagcctgggcaacagggttagactgtgtcaaaaaacaaaaacagtaattagccaggtgtggtgatgcgctgtagtcccagctactcggcaggctgaggcaggaaaatcactttaaccggggaggcggagattgcagtgagccgggatcgggctactgcactccagcctgagagacagagtgagattccgtctcaaaaaaaattttatatatatatatatatatatatatatatatgtataaaaccaagccgtacctcaagcacctagggcacatgttctcaggacctcctaaggtcagtgtcagaggccatggtcactyatatttggctcagaatctctaaaaatattttacagagtttgactcttttcatcaacacaggtcaccctcctgagtagctggtagcacaggtacatgccactaaccatacacagctaatttttgtatagttcgtaaagacaggggtctccctatgttgctcaggctggtcttgaatgcctgggctcaagggatcctcycatcttggcctcccaaagtgctgggattacagccatgagccactgtgcctgacctttcgctatttattgataatgcttatcatattcatatgattatctcttcctctcttttttgtttttattttttccgatagtaactgtttatggtaaattgtggacattgagattactaaaataaaaagtgtactgaattatctttgatttcttatcctcttactccttccctagttagtgaattaccaaatgttgattctttgataatgtatctgcccttagtctcttacgttccagtgcccctgtttcagccaattctgtcccttcatgccaggattatcacaatattttttccctaactagtttccatgtctctggtgttttttttttttttccaagtcacccttttattatgctagattaaatactctgaaacactgctttgtataaaggattcattcatttattcaaagccctaagacaatacttcrcataaaggattaattcatttgacaaatatttgttgagtgcatgccatgtgccagatattaaaatctttaactggtattcaaggtctgaacattccagcccttgtctctggctcagcctgactggtctatttgtcgttgcctgaaaatgctatctacattcccatgcgtgagtttttgtttgagaacgaactgtttctaatctactctgtctccctttttgtttagtttgactcttccttcaaagcccagctcttgtctcagtcctccctccaggaagcctcctagttttttttctttggtttttattcttgtcacagctgggcaaaaaatatccatagtagttatgttttactcacccagtaaagtccaaagttcttgaccttgtttttaaggctttctgcgattaccccatttttcatttccaaccaggcttcctattccctaacatgaactgtctcattcacctgaacctctcaactttctgttccctactcacgcccattcccacatccatgcctttctttgctcaagtttgagcccctttgctcatgatttttctttcttccatgccctccacctgtcgaatcacccattgcctttaacaactttttttgttttattttattttttttttggagacagagtcttgctctgtcacccaggctggagtgcaatggtatgatcttggctcactgcagcctccgcctcctgggctcaagtgattctcctgcctcagcctctggagtagctgggattacagacgcccagccaccactcctggctattttttgtattttagtagagatggggtttcacaattttggccaggctggtctcgaactcctgatctcaggtgatctgcctgcctcggcctcgcaaagtggtaggagtacaggagtgggcccgtgcgcctggacttttttgttttaatgtattaatgatatttgcattttgaacaaaaaaccaattcatgtaataatatataattcatgtaggaggccctagacatttattttaaaagtctttttttcttttttctttcttctttttttttttttgagaaagattttcactctgttgcccaagctggagtgcagtagcacgatattggctcactgcaaactccacctcctgggctcaagcaattcttatgcctctgcgtccccagtagctgggattacaaacgtgccaccatgcccagctaatttttttatttttatttattttacttatttttactttttgagatggagtctttctctgtcgcccaggttggagtgcagcggtgcaatcttggctcactgcaacctccacctcccgggttcaagtgattctcctgccttaccctcccaagtagctgggattaaaggcgcccgccaccacgcctggatattttttgtatttttgtagagacagggtttcaccatgttggccaggctggtctcgaactcctgacctcaagtaatccgcccacctcagcctcccaaagtgctgggattacaggcatgagccaccatgcccagccttattttttattttttatttttttgagacggagtctcgctctgttgcccaggttggagtgcaatgacatgatcttgacctactgcaaccccacttcccgggttcaagtgattttcctgcctcagcctcctgagtagctgagactacaggcacttgccaccacacccagctaatttttgtgtttttaatggagatggggtttcaccatgttggccaggctggtctcgaactcctgaccttaagtgatccactcrcctcagcttcccaaagtgctgggattacaggtgtgcaccactgcgcctggcctccaatttttttttttttttttcccagacgaagtctcgctctgtcaccaggctggagtgcagtggctcaatctcggcttactgcaacctccaaccccctgtttcaagtgattctcctgcttcaacctcccragtagctgggattacaagcgcatgccgccgtgcccggctaatttttttttttttttttttttgtatttatgtagagacagggttttgtatgtagagacagggtttcaccatgttgtccaggctggttttgaactcctgagttcaggcaatccacctgcctcggcctcccaaagtgctgggattacaggtgtgagccaccttgccttgccaatttttgtatttttagtagaggcagggttttgccatattggccaggctggtctggaactcctggmcttgtgtgatccacccacttcaacctcccaaattgctgggattacaggtgtgaaccgccgcatctggccttaaaaatcttttttctttatttttacaaaagtaatacttaaaataagagagctacaacaaaacatatatatatatatatatatgttaactttctctcttaacatatatatatatatgtttgatatgtattaacagtttggtatgtgtccttgcacacctttttctttgtccctgtacacagactacatgtctttaagtgttgccctttactccaacragaatagtaccatactggctgggtgcggtggctcacacctgtaatctcaggactttgggaggccgaggcgggtggatcacctgaggtcgggagtttgctaccagcctgaccaatacagagaaatcccgtctctactaaaaacacaaaattagccaggtattgtggtgcatgcctgtaatcccagctactcaggaggctgaggcaggagaatcacttgaatctgggaggaggaggttgcagtgagccgagactgcaccattgcactccagcctgggcaacaagagcgaaactccatctcaaaatcaatcaatmaataaataaaataaaatagtaccatactctatatcagcgattctcaaagtgtggttcaggacccttaagggggtccctgagactctttcagaaggtctgcaagcaaaactattctcataatcatgcttatttatttgtctttttcatggggttgactttgcaccaatrgtgcaaaagacatggttggtgaaactgctggccctgtaagcatgcatttgtcagggcagtggcaccaaattatactaatcattttgttcttcactgccacacacttgctgtaaatgccagtttcacctaaggatatcattgatgatacaatgaaaatgattaattgtattaagcccagcccttgaatacatatttttttaatgttctctgtgactcatgggaagtaagcatgaaacacttctgctgcataccgaagtaggatggttgtctgaattgcaagctgaacaaactttcttctcatggagcagtattttttacttgaaaaaaaaaaacactgacaaactatggtaattcagacctgactatccaatgatcattttcctgaaaatgaaggaagtgaaagtgaaggaaaacaactgatagtttttctcgccaatgataaaattcaaacacttaggtgaaaattagaattttggaaaacttatttattttatattatatataataatatatatatctattagatatatataataatatatatatctawtagatatatataataatatatatatctattagatatatataataatatatatatctaatagatatatatatatctaatatataatatatatatctaatatatatagaaaattagaatttttgaaaacttatttattttatataataataataatatatatataatataaaataaattttccaaaattctataaaatatatatatatatatacatatatatattttttttaattgggttggagtctcgctctgtcacccaggctggagtgcagtggcgcaatctccactcactgcaacctccgcctcgtgggttcaagcagttctccctgcctcagcctcccgggtagctaggattacaggcgcctgccaccacgcccagctaatttttgtatttttagtagagacagggttttgtcatattagccaggctgctctcgaactcctgacctcagatgatccgcccgcctcagcctctcaaagtgttgggattacaggcatgagctactgtgccctgccaagaattttggaaaacttatatttcccattctgagcttgatagcttccatgtacttaaatactttagtgatgagattaatgaatatgatctcttttaaatattgtataataggccaggcacggtggctcayacctgtaatcccagcactttgggaggctgaggcaggcggataatgaggtcaggagattgagaccattctggctaacattgttttaccccgtctttattaaaaatacaaaaaaaaaaaaaattagccaggtgtggtggcaggcgcctgtactcccagctactcgggaggctgaggcaggagaatcacctaacctgggaggtggaggttgtggtgagctgagattgccccactgctctccagccttggggacagagtgaaactccctctaaaaacgaaacaaaatgaaacaaaaaccaaataccctttaaatacatcctcgtgtactggtgtgtatgtatctatggtatgaattcctaaaagttgacctatttttttaagttccatctaaataaaatttctcctttacaacatccrctattgtcatttctcctccccgtggtttttgtgtctttttagcctcttgttcatttactgcctttcatgttcccatgctattgccttggttttttaacaaaattcttcctctgtgcctatcctgtcttacctacaaatagaatcttcttgagggcaaggatggtttcttgtacggtgtattggcactcggtaaataaataatgagagagggattgagtgttggtatgagaaaaggagcctaatggttgcatttggatgaatgggtgctgagagatggtatgtacatttatacattcttgtctcatcttgtaaaatgtttgaaaataagagtaattttcaacttgatttttcttattttaggcaagtatatcgcgtcaacacagcgacctgacgggacctggcgcaagcagcggagggtgaaagaaggatatgtgccccaggaggaggtcccagtgtacgtggttaggctttgcgtaggggttttctgatggggtccctacagaaggatagaatatccttatgcctacaagttcagggaggactctcctaagccccaaggaaatggaaggaggggcaactatctgagaaaggagagaaagagtctgggattcagggatgagtgagggttacagatcactagtcctatacttttgacctctgttcattagaacctccagagctttaggttctagggacttcgctgcatctttcctgcagagcagaggaaagttggggagggaccataaagagagaaaggtggtcaggcccagtggcctacatctgtaatctgagcactttgggaggcctaggcaggtggattacttgaggtcaggagttcaagaacagcctccccaaagtggtgaaaccccgtctgtactaaaaatacaaaattacaaaatacaaacatcagccaggcgtggtggcacgagcctgtaatcccagctactcaggaggctgaggcaggagaatctcttgaacccgggaagtgggaggttgcagtgagctgagattgcgccagtgcacttcagccctggcgacagagcgagactctgtctcaaaaacaaacaggcaggcgcagtggctctctgtaatcccaagcactttgggaggccaagatcggtggatcacctgaggtcaggagttgaagaccagcctgaccaacatggtgaaaccccatctctactaaaaatacacagttagccaggcgtggtggcaggcgcctgtaatcccagctacccgggaggctgaggcaggagaattgcttgaaccctggaggtggaggttgcagtgagctgagattgcgccattacactccagcctgggcaactgagcgagactctatctcaaaaaacaaacaaccccacaaaaacaacaacaaaaaaaggaagcaagaatgtaatgaggatgaagtgtttggaagtttaagaaaagggatcaaaaagtcagtaattctctgaaactcttgacatcctttgtttcctgcagatatgaaaacaagtatgtgaagtttttcaagagtaaaccagagttgcccccagggctaagccctsaggccactgctcctgtcaccccatccaggcctgaaggtggtgaaccaggcctctccaagacagccaaacgtaacctgaagcgaaaggagaagaggcggcagcagcaagakaaaggagaggcagaggccttgagcaggactcttgataargtgtccctggaagagacagcccaactccccagtgctccacagggctctcgggcagcccccacagctgcatctgaccagcctgactcagctgccaccactgagaaagccaagaagataaagaacctaaagaagaaactccggcaggtggaagagctgcagcagcggatccaggctggggaagtcagccagccyagcaaagagcagctagaaaagctagcaaggaggagggcgctagaagaggagttagaggacttggagttaggcctctgaggcctttggggaatagggaatggactgcagaacaaaccgtggggctctctggggtctgggggaatacgggcaacagcagtcaggaggggtaccccccatactggcttacttccacctcctgcggcccagctctgtcctccagagcctagcgtctccctcaatccttcccttttyttcccaacttytactttttggactttccccctcccattcccagtgttcaaaatctcagtgactaccccaggtacctttgctgctgatttgggtgtcttgtttaaaagaaaatcaggtgggtgggaatctcttggagaactgaggctgagggtagagggagtatgcccaagtcttggagtcttggttcctgttcgcggtgtttatgggttatttccctctccatccctcattttttttttttttttaaaaaaagcaaaaatgagaataaacacaagtagacatgtctggctttgcctccttattttcagctcctagtagatattgtatctcctgagtttggcacaggaagacaagtattgggagtgatttcttttcttttcgagacagagttttgtgctgttgcccaggttggagtgcagtgacgtaatctgggctcactgcaaactctgtctcctgagttcacgcagttctcctgcctcagcctccctcccgagtagctgtgattacaggtgcccaccaccacacctggctaattttttagtagagatggggtttcaccatgttggccaggctggtcttgaactcctaatttcaggtgatcaacccaccttggcctcctaaagtgctgggattttaggcatgagttaccgtgcccagccgatatatatttttttctttttctttttttgtgagatggagtctcgctctgtctgccaggctggagtgtagtggcgcggtttcagctcactgcaacctctgcctcccgggttcaagcaattctcctgcctcagcctcccgagtagctgggattataggcacccaccaccacaccccctctaatttttgtatttttagtagagacagtttcagcatgttggccaggctggtctcaaactcctgacctcaggtgatccacccagttcagcctcccaaagtgctaggattacaggtgtgagccaccacacccagcccaatatttcttttaattttttttttttctcttagaaacttcgttggtcctggagaaagggaggcaaacggcccctgcctcccgccgagtgtccccccagccctcactgtttcccgttgccattgatggggtggttcaggtgctcagtggaggccaggaaggccttgagcttgggccggacgctgaggtgtgccatgtaggccgagagcagggggaacacatccaggcagctggtggccaggacctcatggatcagcaagtccagcaggttgtagtaagcgagggatatctggtcgcccacaatgaaggcctatcctccctggttctgggacggcagggtctcaaaaggcttcagttgcctggggagtgccttcacataagtcacccttgcccacctcgtagttggtatagatgagggtgaggtatttatttatttactttatttttgagacagagtttccctcttgttgcccaggctggagtgcaatggtgcaatctcggctcactgcaacctccgcctcccgggttcaagtgattctcctgccacagcctcccaagtagctgggattacaggtgcccaccaccaagcctggctaattttttgtatttagtagagactgggtttcactatgttggtcaggctggtcttgaactcctgacctcaggtgatccacctgccttggcctcccaaagtgggattacaggcgtgagccaccgagcccagcctgaggtatttaatttttttttttttgagatggagttttgctcttgttgcccaggctggagtgcagtgtcatgatctcagttcacttcaatgtccacctcctgggttcaagcgattctcctgcctcagcctcctgagtagttgggattacaggcgtgcaccaccacgcctgactaattatttttatttttatttttatttttagtagagatggggtttcaccatgttggccaggctggtctcgaactcctgatctcaggtgatccacctgtctcaacctcccaaagtgctgagattacaggcgtgagccactgcacccggccagaggtatttaatttttaaaaattgtgagtttatgaccaaattagcaacactaatttctgcatgtttgctgagacttcagtagacgaattagtgttataatcaaatgaaacttagaacaaatttaacttgacatgttaatttatatgttgccattagtgtgctgaatagcaacgggagttctgtaccttccttactgtttctgaagataatcttatttcacagctgcacctaggacaactcttttgaaatttcaccttcttagatgccaccccaagatggcattgtggggcaaattagtgatacatgtagaggaacttacacccaaaagatctgtcacttaatttttacatgtcctctggtttccataccctcatttatcgcagcctttttctctagccagctgtgggggtggagatgaaaggagtgggaagtcagctgtaatgaactatctcaagagttcagagttcttagcctgactcataagctcacatataatctggccctacttaactccagcgtcatgtctttccattctccaactctgatcaaactcattgctgcagctatactgaacttctttcagttcttcagatgaaccatattctgtctgagtctcagtcctttgcctctgcttgtccctctgcctagaacacttcctgaccccctaatgaactttttttttaattgatagaaacggggtttcactatgttacctagggtggtctcctgagctaaagccacctgcctgcttcagcctcccaaagtgctaggattacaggcgtgagccaccgagcctggcccctaatgaactttttcttagcctttggctctcttaaatgttattctctctgggaagccttcctttattcatatatacacacacacacatacatatatatacacatacatatatatgtgtgtgtatatatatatactatatatagtgtgtatatatatgcacatatatatgtatatatacacacacacaaataatatgtgtatatataaatatatatatatatatatatatatttttttttttagatggagtctcgctctattgcccaggctagagtgcagtggtgcaatcttgactcactgcaaccttcgcctcccaggttcaagcaattctcctgcctcagcctcctgagtagctggggtaacaggcacccaataccatgctcagctaatttttgtatttgtagtaagagacgaggtttcaccatgttggacaggctggtcttgaagtcttttttttttgagatggagtctcaccctgtcacccaggctggagtgcagtggcatgatcctggctcactgcaacctctgcctcacaggttcaagtgattctcctgtctcggcctcctgagtagctgggattacaggcgtgtgccaccacaccgggctaatttttgtatttttagtagagacggggtttcatcatgttggccaggctggtctcgaactcctgacctcaggtgatccgcctgccttgtactctcaaatgttaatttatgcacctttatttgcttcctttttaactccaaacttacttttttttttttttgagacagtcttgctctgtcacccaggctggagtgcagtggcgcgacctcggctcactgcagcctctgcctcctgggttcaagtgattctcctgcctcagcctcccaagtagctgggactacaggctcacgccaccacacccagccttcttcttttttttttttttatttttttttttgagatggagttttgctgttgttgcccaggctggagtgcaatggtgtgatctcagatcactgcaaactctgcctcccaggttcaagtgattctcctgcctcagcctcccaagtagctgggattacaggtgtgtgccaccatgtctggctaattttgtatttttagtagagacagagtttcaccatgttggtcaggctggtcttgaattcctgacatcaagcgatccaccagccttggcatctcaaagtgctgggattacaggcgtgagccaccattcctggcttcttttttttttttttttttttcagatgaagtctcactcttgtcatcaggctggagtgcagtggcgtgatctcagctcactgtcacctccaccttccaggtccaagcgattctcctatatcagcctcctgagtagctgggattataggcgtgcaccgccatgcttggctaattttttttttttttaatttttagtagatacaggttttaccatatttgctaggctgggtttgaactcctgacctcaagtgagtgcccgcctcagccttccaaagtgctgggattacaggcgtgagccactgcgcccagctcaaacttaacttttgtagtagcatttattttttatttttttctaagataaagttttgcttttgttgcccaggctggagcacaatctcagctcaccatgacctccgcctcccggcttccagcaattctcctgcctcagcctcccgagtagctggaattataggcatgcaccaccacgcctggctgatttttgtatttttagtagagacagggtttctccacgttggtcaggctggtctcaaactcccaacctcaggtgatccgccagcctcagccccacaaagtgctgggattacaggcgtgagcctctgtgcccagccagccctcctccttattaaactatgaactcctcaagccctgggattgtatttatcatcattgcatcctcagtccctgacatagtacattctcaaatatttgactgaatgaggctgcaagtcatgtgcagaacagaagatgggggataattagtgcctcacgcacagctgaacagttaatgagtacttgactgagcaccccagtcaagtgtgagaccaaaagcagcctgagttccctttcataggatccctataaaattatagagattttatatgtgagatttaattggcttatacagagatgtttgatgctttgtaaatttagatatcttacaggaatctatactttaaaaaccattattggccaggctcagtggctcatgcctgtaatcccagcactttgggaggccgaggcgggtggataacctgaggtcaggagttcgagaccagcctggccaatgtggtgaaaccccctctttactaggaaatacaaaaattagccaggtgtggtgacacgcgcctgtaatcccagctacccgggagactgagggaggagaattgcttgaactgggaagcagagcttgcagtaagccaagttcatgccactgcactccagcctgggcaacagagcgagaatctgtctcaaaaaaaaaaaaaagttaactgtaaaacagcctcaggaagatccttcaggagatattctagaaggaggcattgttataggagatgacagcaccatgtgtgttattgccccagaaaaccttccagtgggacaaaatgtggtggtggaagacagtgatattgatgatcctgatcctgtgtaggcctaagctaatatgtctgttagcttttgtttttgtttttgtgaggcagcacctctctgtcattcaagctggagtgcagtggtgaaaacacagctaagtgcagccttgacttctgggctcaagtgatccttctgcctcagcctcctatgtagctgggaccataggcttactccatcatgctcagttaattttcttttttttttgagacagagtcttgctctgttgcccaggctggagtgcagtgacacgatctaggctcactgcaacctccacctcccgggttcaaatgattctcctgcctcagcctccccagtagctgggattacaggtgcaccaccatgcctggctaatttttgtatttttagtagatacggggtctcaccatgttgtctaggctggtctctaactcctgacttcaagtgatctgcctgcatcggcctcccaaagtgctgggatacaggcatgagccaccactcccggccttctttttttgagacaggatctctgtcacctaggctggagtgcagtggtacgataacggcttactgcagccttaaatccttggactcaggtgatcctcccacttcagcgtccttagtagctgggactacaggtatgtgccaccacactccgctaattttttaaatttttttctagagatgggttctgactatgttgctcaggctggtctcaaactcctaggctcaagcagtcagcccacctcaacttccgaaagtgctgggattacaggcatgagccactacgcccagctcccatgtcttaggggttttttgtttgt

SEQ ID NO: 96341 - DNA, 17398 bp, Homo sapiens
acatgactacaatggtataaaaatcaggagtggataggccaggtgtggtggctcacgcctgtaatcccagcactttgggaggccgaggtgggcagatcacgaggtcaggagatcgagaccatcctggctaacacggtgaaaccccatctctactaaaaatacaaaaacttagctgggcgtggtggcgggcacctgtagtcccagctactcgggaggctgaggcaggagaatggcgtgaacccaggaggcagcttgcagtgagccgagatagcgccactgcactccagcctgggcgagtgggtaaatggagttaaagttctgaggtcttcatattatctatgaaagtggtgaaagtgtcaattaatattagactttgatatgttaagaatgcacttgtgagaacatatattcagggtaacttggatctatgctcctgggttgcagaataaaataatcttaaaaagcaacaaaaaaggaatgcatgtcgtaatctctacaaaatggaataacccaacaactcaatccaaaagtagtgagaagaaagagaaaaggaacataagctagatgggaagagtagagagcacttggtaagctgatagattgatttgtttgtttttaaattttagagacagggtctcactctgtcacccagtctggagtgtagtgactccatcatggctccctgccatctcggatctcctgggctcaagcaatcctcctatctcagcctcctgagtagctgggaccacaggcttgcatcaccaaactcaggtttgtttttttttttttttttgtagcaacagagtttcactatgttgcccaggctggtctcacagtcctgggctcaagaaatcctcccatcttgaacagggttttagaaaagttgaaagtaatatgatgggaaaatgatttagcatgccaaacaaaacaaaagaaacctgttatagctatagcaatatcagacaaagtaaagtttatggcaaaaaaacattactagagataaagaaggctgggcgcagtggctcacacctgtaatcccagcactttgggaggctgagacgggagtctcacctgaggtcaggatttcaagaccagcctggccaacatggtgaaacccctgtttctaccaaaaatacaaaaattacccgggggtggtggcacacgcctgtaatcccagctactcaggagactgaggaagaagaatcgcttggacccgggaggtggaagttgcagtgagccgagatcgtgccactgcattccagcctgggcgacagagagagactccatctcaaaaatataaaagagatgagggatattacacaatgattttttaaaagaaggttcaatttgccaggaagttgtcaaaattccgtatttgtttgtacctcaattacagcctcaaatattgaatgcaaaagttgacaaaactacagggaagaaagaaacccgcaatcatctctgtattcaacagaataattagaccaaattttaaaagacaggaaaaatatggatgttctgaaccacacaattagcactcttgatctaatggacttacccggagcactgaccccacaactgcatgacacattcaagagccacaaaaattggtcatatggtgtcttttaactaacatcaaaaaatagaaatcatcaaagtatattcgcaggtcacagtgcaactaagctacaaatcaataacaaaaagataactagaaaacctccgtatgtttggaaattaagaaatatacttcagagaagatgggagggaataagatacaggacctaggtggaaggttgttttcgccaagaggaaggacctcctttgtgttaacctccgcgtgtctggaccatagctgcaccgcctcccagtgcaattttgaacaagctaaattagtcatcctgggaagtgttcaaaaattattccaaatggtggactccaggacttccttgctgactttcttactttgatcaactaactctatggcatgatcttaacagctgtagttctcaaggtttcctaaaagggaacctcttgttctctccaaattacagacccatcactgaagggcagggagtgaggttaactcctccacaaactaagtgctgctcaggtccacatctagatgtttcggtcccacaaccacccagagcctgacattattttgtaaaaacagatcctgacagagccaggagcaagaagagccatcaaccccatctctgtgagggagctggggcttggcaggcacaggcttggttagggccacaattctcctctgaatagattttgggttaactggagatgaaaaacccaagttcaaggtgagaggtcttttccccgagatggacaggtggcaacggggcctatcagaatcacaagagaagcttcattaacatgaaatattcttccctgggccgttccaggccacagactgcaggttttccatcttttagccctggaaactctctgcctacttcttttctttttcacatgaaatcttatcagggataacaggtgaaattggaagcagtaagagccctggaatcccactctcttggctactcctctctccaaccaccaccatggtgcctagccacagacatttcagcctgaacttttaaaatagtgtgtgtaaccaaatacctatctcacccatttaaaaaaaaaaaaagtcttgagaaagtctagctttgagtaaggcaacttcctgatatgcgctccaaagtaaacctgatgcaaaatgtatgagtgaggaaacgggccacatggagttgttagttgtagacctgctacaaacagcaaatactggtgacactcgtaaagtaaaaagtggccacacacacacagccctttctttggggttaatagttatcattggccagtccagcccaccctattttttttttttttttttgagacagagtctcactctgttgcccaggctggagtgcagtggcacaatcacggttcactataacctccacctccccagttcaagtgattctcctgcctcagcctcccaagtagccgggattacaggcatgcaccaccacgcctggctaatatttctgaatttttttagtagagatgggatttcaccatgttagccaggctggtctcgaactcctgacctcaaatgagccacctgcctcagtttcccaaagtgctgggattacaggcctgagccaccgtgcctggcccagcctatactattttcgaataacaaagttcttccatctgtagataggagaatgtttgtcctacaaacagctcatctaaaacagtccgacatcacataacaatgataaaatagggagggagggccaacacattatccccctcctccacatccactgcttgccagaaaagctttccctgatacgacttgataggatggtctcagcttaggctgcagatgctgttcaatccaccactacaataaccccaggcaggccatcttacatgtttgcatacctcaggttccgattccataggagggacaggctctgctcacgtcaaacacattaaaatgcacccagcgtcccacattaaatcgtttccgtttaaacatttcaagtgaactgtataactttgcttttgaaacaatcatttattttgcccagtttttgattgttcaaatttttgtttgtttgtttggggacagggtctcactgtgtcacccaggctggagtgcagtggtgccatctcagctcactgcagcctcaacctcctgggctcaagtgatcctcccacctcagcctcctgagtagctgagactacaggtgcacactaccatacccaagtaatttttttgtgtttttttttgtttgttttgcggaggcagggtcttactatgttgtgcaggctggtcttgaactccctggctcaagtgatcttcccacctcggcctcccaaagtgttgggatgacaggcgtgtgccaatatgcctggtctgttcttcaaattttggatctgagaatattttctcaggtctcaaacatttttgagatccttggaaatcttggggattccacgtaccgctgttatccctagtacccattggataaatcagtcctgccctgtgaagcccactgcagggtttacttgtgaggaaaacatcgaggacagcatttgttctactaagcagcgtcctctctgtggggaccttgagttccttgagcacaagggctgtgtggtctttctcacccccaggtccccacaccgagagcctggcctggcatgcaactgtttaatgttcaactagtggtaatgcctaaactggacttctgtgcactgactgaaaatcacccttcctagggcacgttggccctatccccaaatccaggaacataggccaccactattttatatcttagagccaattagaaaaaagtgcctcccctgggctgttacactccactaggaaatctttccttggggcttactcacgccttctatgtctttccacagagctggagtccacccctcacccttaccaggcccattcatgcgcaggaacacttccacacatggcaggctgtgtgcacacagacgattccctcgcctttataggtgctattcctttgacttgaaaagcccatcaactctaatctgcacacaaacttcagcacccagcccaaatgtcactttctctgtgaatccttcccctatacctctcaggcagagttcatcccatcctcctttttattcccatcacagtggaaggtacccctatttgagtcttgccaggttgcatcaaatttctttcttccgggtttggttccctgctgcactgtgctctcaaggggaagaggcgtgtctcagtcatctcagtctccagtgcctaggatgagaccttttatatacatgtgggtcttcaataaatgttttagacggaatgcagagctctagtcaagttactcctcagctcaaaatctctacagaaccttcccctttgcttcctgactttgtttcaaattcctctaccaggcacgcagaagcttagcccacagctctcctcttgcctccccacctcacatgccttggctcacctgcacttctgggtgctgctggtacagccaccctctgacacttccttacctctggacctttgctcatctgtccctctacctataatgccatcttcccctctccccctgtcaaaattctagccatccttcaaggcccaggccaaatgccattttctttttttttttttttttttttttggagatggagtctccctctgtcggccaagctggaatgcagggtcaggagcatctcagcttactgcaacctctgtcttccgggttcaagcgattttcctgcctcagcttcccaagtggctgggactacaggcatgcaccaccacacctggctaatttttgtatttttattagagatggggtttcaccattttggccaggctggtcttgaactcctgacttcaagtgatccacctgcctcagcctcccagagtgctgggactacagggtgagcccccatgcccaacctcaaatgccattttcttcttgaagcatcccatcagcagatgtggcctccactgttgaaacccacagtgctttatcctcccaagccattcctcaaacacggttctggggttgaatgatgcgtgtttgtaattaacgcacttcgacagcaggtatctcccaacttcagcatagtgggtgctcagtgaatattggcccaaatggaattgagcatccatgctacacctgcagatgggagaggcagcaaactcatgtcccaggaaccagcatgacacagatctctcttgtcctccccttgtttctcaataaggacaatatttgcgctcaggggagaagggcacagcttgcccctcccttccttcctcagccaacggtttggcttcccttctagagaggtgagagaaggtgtgacaggccaagtttcctttgctccaccccatggtgtttcccccaaacacccagcataagttcacctctggcagagttgctttccagctcctgcaggtgggagtcgactcacctgcagcaggcactcggcacaactccgcaggaccggctcacctgcaccgggcactcagcacagcctccagcatgcagcgcctccccgctgccacccgggccaccctgatcctcagcctggcctttgcctccctccactcggcttgctcggcaggtagcgttatgagctttattcatggccaggctgggaagggggagrgaaggagggaagagaggtgggagggaaagaaggaggagggggaagattctttggccagggttggtcctgcgcaaaggaaggaggaaacagaactttctcatctgaaggattaggcagggggtgggaggtggggctggggcagggggggtcttaggttggcctgagacggagatcagatactcaattcctcagctaaggcaggagcagccacctctcttggcctttgccacaaagaaaggaaaaagttatttgctggagtctcacccatcaggggaccaaaatgatatctcttggtccgctgtgtcctgaaggctccttctcagccccactgggctgtcgtgctttgcaatcctccctgtgcacatttgtgtctgaccttccctttcctaagtcctccatccctccctgccccttgtactttctctgcgactttcacaaaacctgactgccaggagggctgccattcactgtctcccaccctcctgcctccccgggcactggaaatgctgggttatctccccattttcctgtggaggctggaaggctgatctacatcccctgccttgccctgccakkccgggttctgcaactcayggcagagggaycttggttaccatcttctgctcctggctttgatcttgttctcagccacctcagaacaccaccacactctctatgccctgcaacactcctgctcccaaaaccaaccctgcccccaaagtcctgtgtctgcccctctcatcctcagactctcttctgtagccactgccaggggtgttggtgttgaggttcaagacgtgcactcttgagccgctgagcctgaacccaggtccagcttccatgactcactagctatgcgacctcgagcaaatgactttacctctctatgccaagtttcctcctttatctcatggggacaatcatagtgcttgtcaagacgaattgatgtaatttcatgtaaagaacttagaaatagcccatagaacacacacagtgaatgtcagcaattatggtaagcacattcattttattttccaacttcacccctccccaaataagagtgctgagtttctttctacttaccccgacagtgccttgcttatgatgggagctcagaatcagaagacaagtttaactgcactgaatcgttgggtcttcccagcagcttttcttgtggaatagccccaagtagggccagtccctccctcgcttctggctctgcttataagggaggagggcgatgtttaaattcttaggaattttcaccggggctattccatttgaaccacagaaaattgctgatattgaacaattttcacctataacaatggcaatttcataagctcgaacctaaccctagcattcagccaactagggtttttttccactcactttggaagaggacaacttccattctaggtgtagaggtgaaatgaaagtcagggccaaggaagttatttgagtcataaggaaaattagaatagtgaggaatcagtttctccaaaacaaataaagaccaggctctaagccatttagctgtaaataatttacagtaacagattgcatcgaggcaattactatactttaagcaggacattggagtggcttgggggttgggtggcataaaattagtctcagcagcaacttcatggctttagctaaacagcaggtttcttctgaactcgtcctgctgtgacaacaagctcccttgaaggacacactgacccacagccaggggaaccttgagagtttccatgcccaccacttttttttttttcctttttgcattccccaagaagcagaacgaacagcaatataatttctaggaaggttcttccaatccatctcttggtttccatctacctaggtcagcatgagcactgtctaataatagaacttgcactgagggtggaaatgtcccatgtctgagtggtgcttccaatatggtagccactagtcacacgcggcaatggaacccttggcatgggtctaatgtaaacaagaagctgagttttttttactgaatttgattttaataaatttaaacaaccacaggtggctagtggctgccgtattgaacagtatggacttagaggtcatctctcttcttattgtcagttatggacaggaacctggatgcctcagatccctaacccaatcccacacctcaagacaacaggactttaacaattcatgctaaagtcctttttatctttccactccttgctcatgaatcaatctatgtgctgcgtattctggcagtctctgggcttgcttctatgatgtttaattttttttgacagccatcattctggaggctggaagtccaagatcaaggtgttgatggtttgatttctcctgaggcctccctccttgggttgcaaatagacgccttctcactgggttctcacgtggacttttctctgtgcatgtgtgttgctgatgtttcttcttcttcttcttcttcttcttttttttttttttttagacggagtttcactcgtcacccaggctggagtgcaatggtgtgatctcagctcactgaacctccgcctcctgggttcaagcaattctgctgccccagcctcccaagtagctgggattacaggcatgcaccaccacgcccggctgcttttgtatttttagtagagacagggtttcatcatgttggccaggctgttcttgaactcctgacctcaggtgatctgcccacctcggcctcccaaaatgctgggattacaggtstgaaccactgcacctggcctcttcctcatcttataaggaccccgccatattggattagggcccacccataggacctcatttaagcttaactgcctcttcgaatgtcccatctccaaatacaatcacattggggttaggacttcaatatatgaaacttgggagaggggaacataattcggtccataacagggagttagctttgttgcagaaagcctcaatatgcccatgcgggagcttctataatactttcataatactcactactgatttacaaaaaacatttcaaaatctatgcctgggaatagcttttgccagtgcctcagactatctcctatcttttcttccagaagcaagcagcagcaacagctcaascttgaccgctcaccacccagaccctgggaccctggagcagtgcctcagtaagcttctcctgccaactgctctaaccccagaactggccctcagcctgggagggaaacaaaggcctccccgctttccgttgattggtgtcaagtgggcaagggcctgcctggccttcctgtgcaccagtgtggtttgtcccagaactatttgcagagcaggtctgaaaggctttcttggctctgatccccatctaggtgcacaatctttgacacagattgctttaatgacccatcccaggtcagcagctaacaatgccctaggttcaaatgcttgaagaagtttggaggtggaaaggccataagaaatcatctagtccaacttccacccaatgcaacagcttggttttggcgtccttggcatacatatttcttcttcttctatgcacgtttttcctcttcttgcctacttctagccacaaggcgctcagtaattcatagagcaaccactattatgcatgtctagctaatagaaagttttgcagctgggcgcagtggctcatgcctgtaatcccagcattttcggaagatgaagcaggtggatcacctaaggtcaggagtttgagaccagcctgaccaatatggtgaaaccctgtctctattaaaaatasaaaaaaattagctggatgtggtggcatgcgcctgtagtgccagctactagggaggctgagacaggagaattgcttgaacctgggaggcagaggttgctgtgagccgaaattgcaccactgcactccagcctgggcaacacagtgagactccctctcaaaaaaaaaagagaaagttccactttattttgtctggttccctttatcctgccctcattgaatgaccgaatgcattaacttaggcacttaaaacgaaggataggctgggcgtggtggctcatgcctgtaataccagcactttgggaggcccaggtgggtggatcacttgaggccaggagttcaagaccagcctggccaacatggcaaaacccagtctctactaaaaatacaaaamattagctgggtgtggtggtgcgtgcctgtaatcccagctacttgggaggctgaggcaggagaattgcttgaacccagaaggcagaagttgcagtgagctgagatcatgccattgcactccagcctgggcaacagagtgagactctgtctcaaaaagaaaaaaaaaaaaaaaggaagggtattagggaataatacatagaggttaagagtatggcttcagagtcctgcagacttgcgtttgagttcttctgccatcttgtgatcttgggcaaattacagcctcagtttcttcatgtaaaatgggaataaaagtcgcacctgtcgctttgtgaggaaggcataagctaacgtgtaaaagcacgcagcacagtgcatggcacgtagtaggcctcatcagtgtcagctaccgtgctgtgattgttctgttaatattaatggtagagaagcctgggcagggctggtggtgcatgccgtcgtccttgctgtcccttccccaccagacgtggacttctgcccacaagcagcccggtgctgccgcacaggagtggacgagtacggctggatcgcggcagctgttggctggagcctctggttcctcaccctcatcctgctctgtgtggacaaactgatgaagctgactccagatgagcccaaggacttgcaagcgtgagacccaggctcggtgcacaaaatggtgatcgccaccaatttgtggctaatggggaaggggagtaaggctaacatggtttctattatttaagtcattttcacctttaagcttcagttacttttacaagggaaagaagaaagagcgggagaaccaaataaggcaagccagtgctgcccttgcatgtcactcccaagggsccctgggctgtgcccaggtaactcctctctcaagatagtccctctgtaatgtatcctgttttaacctttcttctaggcaccaagggaggtgcacaagaaactatragacttagtctcatcatcaacattttcagaagcaagtgcataaccttctcaccaaaaccaggttatctgcttctgtccctggcttgagtcctgggcttaactgtcatttcagaatctgagaatcagtcaggtatggtggctcatgcctgtaatcccagcactttgggaggcagaggtgggcagatcactcaaggtcaggagttccagatcagcctggccaacatggtgaaaccctgtctctactaaaaatacaaaaattagccaggtgtggtggtgcacacctgtaatcccagctacttgggaggccgaggcaggagaatctcttgaacctcggaggcggaggttgcagtgagccaagatcatgccactgcactccagcctgggcggcagagcaagactctgtatcagaaaaaaaaaaaaaaaaaaagaatgtgaggatcaggtgggcatggtggctcatgcctgtaatcccagcactttgagagactgagacaggaggatcactttagcccaggaattcgagaccagcctgggcaagatggcaagaccttgtttctgtttaaaaactttttaaagttaaaaataaaaatgtgagaatccccttgacactcccaccatcttcacccccacctcaggtccttctccagctctccttctggcttcatcctgtcttccacggctctcctgtcccacctattctccctgccggtgcccaagttttagccttcactgccttcccctagaacacgccagggatattgcattctgtcctcactgtcttgaggatcttcctccccggctcatcactccccatgggcagctgccagggtaggcgctgtcaccttctgttgacaacagtcagtagctcctaaggactaaaactgttcagcccagcattcagctctttggaggagtccatctgtcccccagcacatccaggagtaaggattccgactggtccactcctcatcctggtgtcttcagcttctctgctgccatgttctttgctgggatggctgcttcccaactccacctccagaatcaaggatattcctccaagcccagctcgaatgcttgatctgcctggagccttcctggtcatccttgggtgacctggagctggtgctgttagagcacttctgctctgccctgatgtgcagttgttgtgaatgggccactccatagtttatccttcctcacacccctggggcatagtaccctattcaagtttgtccaatgagtgcatgggtgaattaatgaatgaatgaacaaatgagtctttgccctagacaacttaaggtcctcactctgcattaggagcctccatttttctccagatggttgaaataaccagcctctgaaggagccaatggtttggtcactgctctctcagcaaattacagtcactgtcacttagcatggagagtggacgttgcacatcactgtgaaaccttgcagaggaggagagggcaggttcatcagaagaaagaaaggacaaaatgactccttatgaagcattttgtgccttctgtgagaaaacatgtatttagatcagataaactctagtcaaaatacaaaaaggaaaaatgaaagacctctgaaataggaacaatctcttgaagaggcaaatgactcaaaactgctcagtggctctttcagaaaatctaagtaaagttccctgacaacagaaactgaagagattgcctggttcatcttgtagtcttccaaaacagcagataatttctgaatctcagatgttgaatcagtgcaacgggatggatttcttgttcctaagtgttaaatgatcacatacataaaagagtctgagcctgagcaacataatgagaccctgtctctacaaaaaaaaaaaaaagattagccaggcgtggtggtgcacactgatagtcccagctactcaggaggctgagggaggcggatcacttgagctagagagttcaaagctgcagtgagccatgtttgtgccactgcactccagcctgggcaacaaagtgagaccctgtctggaaaaaaaaaaaaaaaaagcgtctgcataattcctggtgcattttgtggatatacaatatgagtatgtgttccatgttttcagaaattcaaaggaagcgtttccacaatatgtgacggtttatttcccaagagatgaaaagattcattaaggtgcatgctttgatttaacatctgcaaacatttaaaaaatataacagtgtgtgacgtagcagtgagagtactatctttttttaaaaagggaaattaagatttatttctggccaatgtgaacagaaataagtcactttatctcactgagcaccaattttacacgtggaaaatagaagaattggaccaaatcagcagtttcaagctgagttgcaaaagttcatggaaccatttcagtcgcttcatggaatcggggtaggcatgaggcccgttgttctttcaacctgagccgcatggctcttgtgtctttaaaccttgtggtaggatttttttttttttctgctttaataagtgaagggtcagggcaccagttggtgtctgagatgccctccagtctggggaaccccgtagatgcttagactactttgaactgaagtatgtgcagtctgccatctcacattaaaatgtaggcattttgtcaattgcttttctttcatctgcacaagaggaaggagagaacgaatcaatacaaccactcttttccttgagactgcaaagaaaatggttctatagtttgatggttctacttcccagatgctacctctcagatttattctcaacagaaaattttttgattacagcagaccagatctttatctgtcaataagttaaaaaagataatctgggctggatgtggtggctcactcctgtaattccagcacttcgggaggccaagacaggaggattgcttgagcccaggaatttgagaccagcctgggcaacatggcgaaaccccacctctacaaaaaaatacaaaaaaattatttgggactggtggcgcatgcctgtggtcccagctactcgggaggctgaggtgggaagatcatttgagcccaggaggttgaggctgcagtgagctatgatcttgccactgcactccagcctgggtgacagagtgagaccttgcctcaaaaagaaaaaaataaagaaaagaaaatctgaaagggaaagcaggcatcaacttccagggatctaataacttcctaacttaaagcaacagaacttacctaacttttggacttttcattttaaaactttgcctctagcagtggacactgtcctcaacacagctacagtttatgtaacacagagtccatattatatggggcatgtctgtatcaaaatgtcatatgtagaaataaagtattaaatattaaggtgtggcataattatctgactttaaaaatcatcatttagtggccgggcatggtggctcacgcctgtaatcccagcactttgggaggccaaggcgggcagatcacctgaggtcaggagtttgagaccagcgtggccaacacagtgaaaccttgtctctactaaaaatacaaaaaattagccgggtgtgatggtgggtgcctgtaatcccagctacttgggggactggggcagaagaattgcttgaacctgggaggcagaggttgcagtgagccgagatcgggccactgcactccagcctgggtgacagaacgacactctgtctcaaacaaataagttaattaaattaaataaaaatcatcatttaaaaatctattcctggccaggtgcagtggctaatgcctgtaatcccagcacttcgggtgtctgaggtgggtggatcacctgaggtcgggagttcgagaccagcctgaccaacatggagaaacactgtctctactaaaaacacaaaattagctggcatggtggcacatgattgtaattccagctacttgggaggctgagacaggagaatcgcttgaacctgggaggcagaggttgcggtgagccattgcactccagcctaggcaacaagagcaaaactccatttcaaatatattcctttttatatgcatgacacctaatgcaaacaaaacaaatatacaattttttattaacaaataaatgttacagcatgtaagattaatcagctggacctggtggtccacatctgtagtcccagctgctgtggaatctgaggagggaggatgactcgggcccagtaattaattgctttgagggtgtaatgcccaatgatcgtgcctgtgaatagccactgcactctagcctgggtgacacagcaagacattgtctctaaaatgaaacaaagcaaaacaaaaaattaatcaaaaacaagtcttaggatagcttgggccttgtcttagtcagtttggaccgctataacaaattatcatagactggggagcttctaaacaacagatatttattcctctggaggctggaagtctgagatcagggtgccagcatggctggtttctggggagggtccacttcttggttcatggacagccatcctctcattgcatcctcatgtggtggaaagagggcaaaggagatctctggagccccttttacaagggcactaatcccaatcgtgagggctccacccttatgacctaatcacctcctaaaggccccacctccaaatgccatcaccttgggcactaggattcaacatcaattttagggggacacaaatgttcagtctatgggaggcctcatttccacaaaaatatatagaagcatatttttaaacttggagaaatattaatctagatgtttctgatgaagaaactgctctgtctgaactccagcatccattttgaagtcatctataggggatcttccttgccatgtggtaggagtgccttgtatacaccctctgcctgccacctacttccagccttacctggctccagcccctcctcctcacttcttccagagtgatctgtctaatacataaataagtgatcaaatcacccccttccaaaatccttctgtggctctgcacagctgagggaacaggatttttactcagggtgagccaaaagagctctgtaattggatctccagacatttctctagctttatctcttgcatatccttcatgcaaacagggtttgaaatgattcccattccctaaacactctatcctcctggccttcatttttgctgttcacatggcctggaacgtacgtacccttccccagaggaagatctgctgtgaaccaagagaagcttacactccaggcctccttacttgaatgggcccctccgagtccctgagtctaacactgtattcctaatttttctatcctttttttttttctaaaggcaacctccccttaattgtctacatttaaggccccataaacctgggcctgcccttgcttcccctcatcctccccggccccccactcccagttggattttggtttactgagattggtcttccaagtcaagttgcctcttcctccctggatggacacacacacacacacacacacacacacacacacacaccttccttgaccaaactctagccaggcgtttttttgagccctcttcttgactagaccttaaccttggcttataaaaactacagactctcagcataaatgatttcatccagtctcttcccctcacatgtaaagacttgaccaaatactaacacagcctctaacagctccaggctgcacccctaggatgagcaggaggtcgagactctgcctgggagatgcagctggaggtgagtgatgccaggccgggtcccaggcacatcatatgcacggcacaaaggtgctgttcccatccaaacagagctaacctatgtgagagctgggcgtggcaggggtggggaattcaggactcttatccaagtcctggggcagccagaagcccccttccagtaaacccctctaacaaacccacactgcacatgcacacatacacatataccccagtgctttgtcctggacgtgctctggggatccctgagctcacttccctcccctgcccacagtccacagc

SEQ ID NO: 96342 - DNA, 30015 bp, Homo sapiens
  misc_feature (1)...(30015): n = A,T,C or G
cactttgggaggctgaggtgggaggatcacttgagctcaggagttctagatcaccctgggtaacatagggagaccccatctctaaaaaaaaaaaaaaaaaaaaaaaatcttttcaattagctgggtgtggtgccgcatacctatagtcccagctactgaagaagctgaagtggaaggattgtttgagcccaggaggtcaaggctgcagtgagctgtgttcatgctactgcactctaccctgggtgacagagcaagaccctgtcacaataaacaaacagacaaaacaaaacaaaacaaaaccacaaatatttactgagtacctatggtgtgccaagcctgtgcctgatcacagggatacagcagtgaacactacaaacaagatctctatccctgttcttttagagtttactttttttttttaagagtaggggtctcagtgtgtcacccaggctggagtgcaacagcatgatctcggctctgtgcagccttgacctttcctgggctcaagcaatctttcttcctctgccttctgagtagctagtactgcaagtgcatgctgccatgcccagctaatttttttaaaaaaaatttgtagagacagggtcttaacatgttgtccaggttggccttgaactcctgagctcaagagattctcccacctcaacctcccaaagtgctgagattataggcatgagccaccaaacccgccctggagtttatattctaatggacagagacaatacttaaatatacaaaatgattatggattatgatgaatactctaaagaaaatacacacaatgatgtattaaagggagatgcagtgggacaggccatttcagacagagtggtccaggatggcctcttggagaaggtgccccctggagctgggacttgaaggatgagcaaaatactgggaaatagcacttgggaaaggagtaacaagtgcacagaatcaacacatttgcagtgagcaaggaggctaggtgctggaaagaagggagggaggagagaggtgggaaggacatggatcatgcagggcttgaagagccggatttaatactaagtgcaataggaaaccactggagggttttaagccagagaatgacataatctgaattaagattttataacatcactctggctgctatgtgtaggatggacggttaggcgtctgttgcaataatccagacaagaaatcaatgatagcttgatttaaggtggtggcagcagagaagagagtgaaagattggagacatattttcgaagcggagctgacaggtcatgcaatcagactggaaatggggtccaggatgaggacaaaggagacaacaagaacgatgcttgggttttctgtttgggcaactggatgaatagtgcaactatttcctgagatagggaagacgggaggaacagatttgtgcgggtggcaatcttgagatgcctattagacatctgagtttatattgcaagtaggcagatgaagagtctgcactggaggtataaatttggctggaatttaaagctacggggctggatacaaagcctaaggaagcctaaccacagagccgatatttagaggactctatgggatcctggaggagggagcagctaactgaccacagaagtcaaggaaaacatcatagaggagagaatggtgaagccaggtcttgaaagacaagtaagagtttgccagaggaagtgaaaaaacaccatctgggaagagggaacaacatgtaacatgttcaaaggccctcagtccagcaatagcgggaaccctgtctgtttcaactgtgtcaccttagggcctagcacacacgttcaataaatatttgctgaacgagtggtgtgtttgacaacttgcaggcagcttgggaaagctggaggaaaaagttagtggtgggcttaggacaggtggtgagagatgaagctctagtgtggaagatgagaatagaccatagcaccaaaggcccctcctgggggagagggaagaatcattaaaacatcttctgcctgagggaggggcatagtcaaacatgcattttttttcttttttttttttgagatagagtcttgctctgtcacccaggctggagtgcaatggcacaatctcagctcactgcaacctctggctcccagggtcaagtgattctcctgccccagcctcccgagtagctgggattacaggtgcgtaccaccatgcccagctaatttttgtatttttagtagagacggggtttcaacatgttggtcaggctggtctcgaactcctgaccttgtgatccgcccgcctcagcctcccaaagtgctgggattacaggcgtgagccactgcattttaagaagagtcttcaggctatgatatagaaagggagtgaatatgagattggggacgagattgaaagcagggaggagagactgaagatggggagattagctcaggggctgctgagggatgaaaaggcctcagggagatgctttctgggacccagcagcaatgtttcctgcgtgggcaaagaagcctgtactccaggggatatctgaagtagtggctgggattggacaaggaagatggcctggagccaagaagttatccaatttcctggggaggggagctgttcatattaataatatctgatatgaagtttgcccatcaaaccctgcagacaatgggggctttggtattaattaaatttcaagaaataaagaaatggctattccttgcacacccagacccagtaatacaaggacttgggaaagtgagacacggaagggggataaagaggatcacttaggagagaaggtgggaagcgagagttctgttttggacttgctgaccagggagcaccctgggacgtccagggagaggttcggccgtaggtcgcagggctgggcttagaagcttcaatgtggaggccatgggagtggacagggtggccagggagtctgaaagcggcggcaggataaagcgagatccggaagcgggcaagggagcgcttcccccttccccagcctgggtctgtccccacagccgctcacagcccggcccgcagggaagcgaccgaggggaggcccggcgggggacgcgctaggaggaggtccccgagcagcgggtatccgagagcaggtcctgctttccagagctcgccgagtagggcagggaaagcgaagccgaaacccaggctggggtatcagcagcagcggataaccgaacgactgcagccgcgacaggagaagcccggggcggtggcgggccgcagacccccgcctccgggccgcagacccccgcctccgagctgccgcctacattcccctaggtgagcgcggaagaggatggcggaggatggtctcctagacccccaagaatcccgtccggcgtctccgcctgccttccccatccagccccccgacccttcagcaccctccacgccacctccgaatcagacccccgccctccgggctccgccccgggacccctcccctcccctggctccggagggagcccggtaccgtctccgggggagatggtctcgatctccacgcccatagcggtcccacaggccccgcctctggggggtccctgctgctgcccgaccccggctcggctccggccccagccccgccgtcgctccggctcgcctcctcgccgccactgcagagccggaggaggtgcggctggagtcgggacctgcgcggggaggggccactggcaagggggcggcggggcggagccgcgcggaaaggtggggtcggccggggcggggcccgggggaagggaccccgcccggctgttagcgagcctggccccgcctgacgacattaacccactgaccagggagcgtggtaagcacaaccacatcctccatccatccattcattcgcgcatccgtccaatagacatttatttagcatctaatctgtagtaagctctgggaagtcaacccagtcctacagacttgtggggggtggggggcagaaggggcaaaggccggcgattaaaccatcattttatttttatttttattttagacagaggatcttgctctgtcgcccaggctggagtccagtggcgcgatcatagctcacagcaacctcgaactcttaggctcaagcgatccttcttcctcagcctccacccaagtagctgggactagaggcgcgagcaaccacgcccagctaatcttttattttttatttttattttttgtagaaacggggtctcgctgtgttgctatctaatgaaaccatcactttaattagatgcgctcagtgccgtgcagttcagagcgttgcggaagcacagaagaggttcctaccctcgctaggcgtcctggatctgtaggagcagagctgggggagggagggaggacaccagtaattgctgactctcccccatacccctaaacccctgttctccatctcgtgtagttctgctcgacgcacatttattgggtactcaattttcaaggcaaagaaatgcgccctggggataccaatagaattaagacaggttggctgtcttccaggtactaagtctgagagggacggggacacacagttactgcatggagtgattagtgctgtggaatgaatgaatgaatatgtaaatgaattctactttgagttcctcctccaccaaaaaatacattcaggaatctagaaaaatattttttggaggaggtaatatttgtttaaagggtaattgggacttttaaaattttttccccctcattattacctgcattgttccaaaaattgatgtgaggccaagtatatcaatttttggaacaatggctcacacctgtaatctcaacactgtaggagaccgaggcaggaggattgcttgagcctagaagttcaagaccagcctgggtaacatagcgagatcccgtctctctctctctccttttttttttttttttttttgagacagaatcttcactctgtcgccaggatggagtgcagtggcacaatctcggctcactgcaacctccgcctcccaggttcaagcgattctcgtgcctcagtctcccaagtagctgggattacaggcgtgagacaccagcgttcggctaatttttaaatttttagtagagacagggtttcaccatgttggccaggctggtctcgaactcccgacctcaggttatccgcccgcctcagcctcccaaagtgctgggattacaggcatgccatctttatttttaaaaaaagaaaagaaaagaaaaagaaaaacataaaaactgatgtgaagatatgattctcctgagtggcactggaagataggcatggggagaaaagcctggcaaactggtccagaatgagccccaagggtgttcttcctccatttcctcatccccactctcccggatgcttaggtcccagatgaggttgtctgcatccctgaaggtgttctggctgtgttgttaaagaaagatgattgtcgactgtactgtgagggtcaggacctggaattcctcataggtctgaagaagcctaagggacgcactaaatccataggctgcggccagagcaggcacgcttagggtcggggtagaacagggatttgtagctgggacaggcccatgcagcggcttcagctcaatgcacagtattttgtgtacagataagaacattttcctgagagattttatcagattttaaagaaggttaaaaagccgtggtgatcctagggctcctggactccttagacaagagaaccgacgagaagtggggaaagagctcaagtgcttaagggagggaaaatgtggcgggcttgcggtcggtggttttacggggactaccactcccagcgatccgtgcggcagagccagagcttattggccagtgggacgaaccctctgctaatgtgcatattcaaaagccaatagacggggccatctcggagcgtgcctatcctatcagaggaccacccacctatcagaggaccgatatcaccgcccacctatcagaggactgagggccggtgcttccggtggctgcccagaacttcttatgtgcggcggcgtgatgttgggcggccacagagagattggtgtttttgtgaggcagtgagacctaaggtatttcatctccactgctgccgggcctggcgggtgtggggaggctgtagggggtcaggagggaagtggatcggctcttggtgggtagggggcgggaaggaggagattcaggcgtgcagagaggatgaggagaatggggcgggccgcgtgtgaggggtcgcgggatgaggatcgagctaggggtgggtgtaaatgagggattatgaccgtgactcgtgaataacactcctgggaatatgtcccaaggaagtcatccaaagtcaggaaatgctttaagccttaagacctcggtccgagctttatttatagcgggtagcgggataaagttgggtacagctaggagcagttcagtacattatgtcacttcactgagtgtatgtgaagtggcctctaaaactaatttattaaacttttaaataacatagggaaatgctaatatataatgttagatgaaaaccgtgatacaaagttgcacagtataactgaaaaagtttgacagccaaactatgcatagaagagtctagagggattagtcataattttctttggatgaatrttttttcgttaactcttcttaatttttttcttgtgtatgatttttgtttccaaataagtgtaaagaacttgaaatcattttatagtggaaatacaataaacttggaaaacaagttgggggagggatgtacttttgtttaaacctgctggaaatgccagttcacctgaatcccttgattctcgtcatgagttgtctttaaagaagatgaaaaacagaattaaatggttatatactgagcaccggctcttagttttctgaccacctctccggagacctgaactaatacagtggtcttttccctcctaaaacacccagggttcttgatttcatgttctccaaaaaacttatactctggagattgtgaaacaataggtatacaattagtttcaggcaaaatcagtagcgttggggaatgcctgaagagcatttaaaccttggtcctcctggccctctgatcttatacagtgaggttctccactaccttgactttaatgattaaccctatgtcagtgatttccaaatccttacctctgactgcctaaggtacattggtaccatgtagacatcttacatgaagcacatgttaatttcaatttgtcacatactacacacgttcctcccctactgcccccacccccacctccccaacagggtctcactctgtcacccaggctggaatgcagtggtgtgatcatagcttactgtaaccttgaactcctgagctcaaatcctctcagcctccatagtaactaggactgcaggtgtgtgacgctgcacccagctaatttttatttttatttttattattttttattttccttttttatggaacgcttcacaaatttgcaagtcatccctgtgcaggggccatgctacgctctgtatcatttcagtcttagtatatgtgctgccaaagtgagcacccacctcatttttaaaaatttttctgtagaattggggtctccctgtgttgcctaggctggtcttgaaatactggcatcaagtgatcctcccacctcagcctcccaaagtgctgggattacaggtgttagccactgtgcctgcccttcctttcctttcttccttccctccccctcccccttccttccttccttccttcctctctctctctctytttttttttttttttttgagatggagtcttgctctgtcacccaggctggagtgcagtggcgcaaactcggctcactgcaacctccgccagccgggttcaagcgattctcctgctgcagcctcccaagtagctggaactacaggcacacaccaccacgcccagctaatattgtatttttagtagagacagggtttcaccatgttggccagggtggtgtcgaactcctgacctcagatgatccacctgcctcagcctcccaaagtgctgggattacaggcatgaggcaccacacccagcctgccctgccttccttgcctttgaaacatgctctggttaatggttcagsagtttctcaagctaaaaatctgggtgttatccttaattcttttttcctcctcactacttatatcctatcgatatcactgtctattccatctgccttaaaagcatctcttgaatatggccttctttctctactgaaatagttgcaaacttgcttcattttcactttgtggcattcaaattacttgtcaactttcttccttctcaggtccattctgcatattgttacttgaatatatgctggttcccccaagattccaaattcctcagcatgccctttatgatcagagaataaacttagaaagatatatcaatatctgataatataaggttttaattgccttgttaagacattttgaggctttttatatactgtagatgtggggattcatcaagggtgtttatgcagaagagcaaaatgatcaccgctgtgcttttttttttttttttttttttttaaagataattctgcccaacaacacatagtatgcaggctcatttggaaagtagagactggtatcaaggggacctctccttgttttaccctaataaaaagggagaagtcagaacctgggctaacacaggagtaaaaaggaatggagcaaatttttgtaattatcactgcgtttttgaaaaaaatgtgccacatttcttcttgttaccgaagatgacaatattaaaattcattcttctaaaaacctcagtaaactggcccatgcagtggctcacgcctgtaatcctagcactttgggaggccaaggcaggaggatcacttgaggtcaggagttcaagaccagcctggccaacatggtgaaacccagtctctactaaaaatataaaaattagctgggcatggtggtgggcccctatcccagttccttgggaggctgaggcacaagaatcacttgaacccaggaagcagaggttgcagtgagcccagatcatgccactgcactccagcctgggtaacggagcaagactgtgcccccacgccccccccaaaaaaaaacctcagtaaacttatgtttgtttttctcttattcccaaatccttgtcttgtgctaccctggccacacacaccctcattgacattagacagaatttggtatcctaaaatatataaatcgacttggatgtaattggcccattaggaattttctctgcccatgaaagtgtatcatggcattatttatcaataaaattctttttaaagtacataagtagatattagggagaaaacattattatctttcataagaccagtgggacagagatcacagttttcttcattagtaatgactggacttttttctccgtttagcaagccgctgcagaaccactgaatctgacatcatatataaaagcataatagaccctttttttttttaagtgaaagatcctaagagcaaggacaaagctagcaaggagatatgcgaaataatttacagataagcaaatcaccaggttggtagagaatacatttcattggatttagagtctgaagacaacttctcaagttctgcctttgacacttactcagtaaaacaaggctgaaaaatgtcatttagattcagtgacagggaagcactggtggcctggtgagagatgttttggagaagaaattggaatggaattcattttaagtatattaagaagagagtgagtggtgaaaaatatgagtactgccagtttacacaactatttgataactaataaggttaaacatcactttatatatgtttgtagattgttggggggttttttgttttgttttgttttgttttgttttaagtagagacagtatcttgctgtgttgtccaggctgatctctggtctcgaactccagggctcaagtgatccttctgccttggcctcctaaattgttgggattacaggcatgagccactgtgcctggccaacagtcattttgtttagttttgtttttgagaccgagtctcactctgttgtccaggctacagtgcagtggtgccatcttggcttaccgtaacatctgcctcccaggttcaagcaattctcgtgtctcagcctcccaagtagctgggattacaggagtgtgccatcactcctggctaatttttttgtatttttagtagagacgaggtttcgccatgttggccaggctgatctcgaaatcctgacctcaggtgatccacccgccttggcctgccaaagtgctcggattaaaggcatgagccacctggcccagtaattttttttttttttttttgagacggagtttcactctttttgcccaggctggagtgtaatggcatgatctcagctcactgcaacctccgcctcctgggttcaagtgattctcctgcctcagcctcctgagtagctggaattacaggcatgtgccaccacgcccagctaattttgtatttttagtagagacggggtttctccatgttggtcaggctggtctcgaactcctgatggtcaggtgatctgcccgcctcggcctcccaaaatgctaggattacaggcgtgagccgccgcgcctggctctggcccagtaattgtttttatactaaatttttttttttttgagacagagtttcactcttgttgcccaggctggagtgccatggcacgatctcggctcactgcaacctccacctcccgggttcaagcgattctcctgcctcagcctcctgagtagctgggattacaggcatgcgccaccacagccagctaattttttttttttttttttttttttgagacggagtattgctctgtcacccaggctggagtgcagtggtgcgatctcgattcactgcaacctctgcctccagggttcacgccattctcctgcctcagccttccgagtagctgggactacaggcgcccgccaacacacctggctaatttttgtatttttagtagagacagggtttcaccgtgttagccaggatggtctcgatctcctgacctcgtgatccgcctgcctcggcctcccaaagtgctgggattacaggcgtgagccactgcgcccggccaattttttgtatttttagtagagatggggtttctccacgttggtcaggctggttttgagctcctgacctcacgtgatctgcccttctcgggctcccaaagtgctgggattacaggcgtgagctgccacacccagsctttatactaaaattagtctttctcagtctgtgtttattattgcaacattttattcttatatccattattatatatttatgtatccactgattgatagtatttcaaaatataattttcctgaggcagtttttcattttacattaaatagtattttttatgtttatatttcaaagtgagtattcaggtattacagcttatccaaataatgtccttattctccctactgactatatgtatcttttttttttttttttttttgagacagagtttcacttttgttgcccaggctggagtgcagtggcgccatctgagctcactgcaacctccgcctcccctcccaggttcaagcaattgtccagcctcagcctcccgagtagctgggattacaggcacctgccaccgagcccagctaatttttgtattttgagtagagatggggtttcaccatgttggccaggctggtctcgaactcctgacctcaggtaatctgcctgcctgggcctcccaaagtgctgggattacactttgggtgtaatgggtgtaagtgcctgggtggctcatgcctatgagccaccatgcctggctaccccattttttgtttaaaagaaaagccataacatgtaaaatcctatatatctttgtgtctttctttaacattttcagaggctaaacaccaaattgttaatgatgcttttatcaaggctttgaaatgttggaaaggaggaggagctaaaggggctggcactgagtaggagggaacagtttttttttttttttggagatagagttttgctcctgtcgcccaggctgaagtgcaatggtgcaattttggctcactgtaatctctacctcctgggttcaagtgattctcctgcctcagcctcctgagtagctgggattacaggcatgcgccaccatgcccggctaatttttgtattattattagaaacagggttacaccatgttggccaggctggtctcaaactcctgacctcaggtgatccacccgcctcagcctcccaaagtgctgggattacaagcatgagccaccgtgcccagcctaagcatgtacttgttttttgttgttgttgtttcttttttgaggtggagtttcgctgttgttacccaggctggagtgcaatggcacgatctcagctcactgtagcctctgcctccccagttcaaacgattctcctgcctcagccttctaagtagctgggagtataggcatgcaccaccacacttggctaattttgtatttttagtagagatggggtttctgcatgttggtcaggctgggatcgaactcccaacctcaggtgatcctcccgtctcagcctcccaaagtactgggattataggcgtgagtcaccacgcccagccctaagcatatgcttctttagtgattcaaatgcctgggggaaaaatattcagggtgaaaaaatgaagataatacttgcctaacctactttacattattttaaaagattattgtaagataaaatgcaatagggaatgtgaaaatgttctgaaaattattaagtgctgttgaataagatgaagtagaagtagaaatagaaacagtgatttttgagtgtcatttcaatagagggataaaagccactttggaaggatttgaaataagtgctaataaagtcagagatgtgcatatcagttattcattgatttggcagtgaaaggacgaatagaaattagatgatggaggagacttttcttaaatttttaattggaaaattttctaacttaaaagttgaaagtaccataaatactaacatagcctcaatctagactctacaattattaacattttgctacatttgttttctttctgtgtgtctatagaaaatttgggttttttttgtcaaaccatttgaaagcacattgtaggcatcatgacattttaccccaagtgcttcaacatgcttatttaaataataaggaccttgtcctgcataaccacaataccatgttcacacttaagaaaattaataactctggccgggcgcgggagctcatgcctataatcccagcactttgggaggctgaggtgggtggattgcctgaggtcaggagtttgagaccagcctggccaacatagtgaaaccccgtctctactaaaaataaaaaaaaaattagctgggcctggtggcaggcacctgtaatcccagctactctggaggctgaggcagaagaatcgcttgaacccaggaggcagaggttgaagtgcgccgagattgtgccattgcacttcagcctgagcaacaagagtgagactccgtctcaaaaaaaaaaagaagaaaaataataactctacaatattttctgatatccattccatactcagatttccccagttctaaaaatcttcattaggtagaagattttatttcttcaagatccaaagtatatacattgcatttgcctgatagctcagtagtctcttaatttataatactccccctgtccttttgtctctccacattattaacctgggaaggggctaagccgttgtcttaccaaatgtcctacattctagatttgtctagatttctcatggtgtaactttccttcttaatcatttcaggtaacctttatcaaaaggatggagttgggaaaaggaaaactactcaggactggactgaatgcgttgcatcaagcagtgcatccgatccatggccttgcctggaccgatgggaatcaagttgtcctaactgatttgcggcttcacagtggagaggtcaagtttggggactccaaagtcattggacagtttgaatgtgtctgtgggttgtcctgggccccacctgttgcagatgatacacctgttctactcgctgtccagcatgagaagcatgtcactgtgtggcagctgtgtcccagccctatggagtcaagcaaatggctgaygtctcagacttgtgagattagaggatcactacctatccttccccagggctgtgtgtggcacccaaaatgtgctattctgactgtgttgactgctcaggatgtctccattttccctaatgttcactctgatgattcccaggtaaaggcagacatcaacacccagggccgcattcactgtgcatgttggacccaggatggcctgaggctggtggtggcagtaggcagcagcctgcattcttatatttgggacagcgctcagaagactcttcacaggtgctcctcctgcctggtgtttgatgtggacagccacgtctgctccatcacagcaactgtggactcacaggttgctatagctactgagcttccattggataagatctgtggcttaaatgcatctgaaacctttaatatcccacctaacagtaaagacrtgactccgtatgctttaccagttattggtgaagtacgctctatggataaagaggcaactgattctgaaacaaattctgaagtatcagtttcttcttcctatttagaacctctggatctaactcacatacatttcaatcaacataagtctgagggtaattctcttatttgtctaagaaaaaaggactacttgacaggaactggccaagattcttcacatttggtccttgtgacctttaagaaggcagttaccatgacgagaaaagtcactattccaggcattctggttcctgatctgatagcatttaatcttaaagcccacgtagtggcagtggcttccaacacttgtaatataattttgatctactctgtcattccatcttcagtcccaaacatccagcaaattcgattagagaacactgaaagaccaaaagggatatgtttcttgacagaccaactattactaattttggtaggaaaacaaaaactcactgatacaacatttcttccttcttcaaagtctgatcagtatgccattagcttgattgttagagaaataatgttggaagaagaaccttcaataacatcaggtgaaagccagactacctactctactttcagtgctccgttaaataaagcaaatagaaaaaagttaattgaaagtctttccccagatttttgtcaccaaaacaaagggctgttgctgacagttaataccagtagtcagaatggaaggcctggaagaacacttattaaagaaatccagagtcctctgtctagtatctgtgatggctccatagctctagatgctgagcctgttacccagccagcatcgctgcccagacacagcagcacaccagaccacaccagcacactggagcctcctcgtttgcctcaaagaaagaacttacaaagtgaaaaggaaacttatcagctgtctaaggaagtggaaattttatctaggaacctggttgaaatgcaacggtgtctttctgaacttacaaaccgtctgcataatgggaagaaatcctcttcagtgtatccactctctcaagatcttccttatgttcacatcatttaccaggtaaattctcctttgaggaactaccactatacataaaagctcctgcagccggtgagtactgcaagaaacgtattgatgaggaagatggtgctctaactgagcttcactaagctgggcatgttatgttacaggcaagttggtacacctttgcaggttggttggtttttagcctgccaaccagataggcgcacatatcagtctgcatcatgattttatcaggtgcatgacgtggaaaaataaatgtctgcactaattcgggcaatttatatttagaaaaaaaatcatgttatttcattgtgacaaccttttccttatataatagagatactcctccagttataaaaaaggttatgttgctgggctccatggctcacgcctgtaatcctagcactttgggaggcsgaggcaagtggatcacctgaggtcaggagttcgagaccagcctggccaatgtggtgaaaccctgtctctaacaaaaatataaaaattagctgggcatggtgatgggcgcctgtaatcccagctacttgggaaagcaggagtatcacttgagcccgggaggcacaggtttcagtgagccgagactgtgccactgcactccagcctgggcaacagggcgagactccgtctcaaagaaaaaggaaaaggttatgttcatttaaaatgttttgatgcatttctttatgcatgcatgtccaaacattatataagtgggatcatattatacatgtttttatcatggacactttcctcctatataaaatatggccttgccccatcttccccttaatccgctgtaaccagcagcttaacatggatcctttcgtgactttctccatggtcacatgatctaacacaggtctttgtgtacatagatatataggtatgtgggaatggtttgtcattgtttttacaaaaatagggtgatatggtgcactctttacttcatactgagagtatgctctttatttagccattcccttgttgattgacattcactttgtttttagtttttagctactccaaatgatgctgcagtagtactcttatatgtatccattcatattagtacctttatttctgttggattggttcccagaagtagaaatgcaaatttgaagagtatatgtgtttctacttttaattgagttaccagattgcctctcaaagatttttacttaacagtgcatcatcrcacgcccgccagctatgtataaggctgtccttttcctcgtatgtcaccaatctgatcagtgaccctcctgcttcagcctcctgagcagctgagactacaagcacatgccaccacacttggctaattttttttttttttagcagagacaggatcttgctatgttscctaggctgatcatgacctcctgggctcaagtgatagtcttgcctcagcctcccaaagtgctgggattacaggtgtgtgccactgcatgtggccccaaccctacatttttttaaagaggatttttgccacattaactacatggagttttcagtagtagagttttaatttttttttttaagtcacagctttgctgtgaggagcattttattttatttatttatttatttatttatttatttatttatttatttttgagacggagtctctgtcaccaggctggagtgcagtggcgcgatctcagctcgctgcaacctccaactcccaggttctagcaattctcctgcctcagcctcccaagtagctgggattacaggcacgtgccaccacacctggctaatttttgtattcttagtagaggcggggtttcaccgtgttggccaggatgagctcaatctcctgaccttgtgatctgcccgccttggcctcccagagtgctgagattacacgtgtaagccactgcgcccggcctaatttttttttaattaaaaaaaatttttttttaactatagagacaaggtcttgctatgttgcccaggcttgtttggaagtcctgggctcaagcagtcctcctgcttcagcctcccaaagcgctgggattacaggtgtgagccactgcacccagccatagttttgatttttttaaaattattttatttataaatgtgataactggtttggatttctttcctactatgactttttaaagagtttgttttctttttcttctgtctttttttaataggtaattcatttatttggtttaaaaagcaaaactgtattttaataaaaactgtataccaagaactcttattcctaccctatgtttcttcagcctgttctcctttcctcctttaggtaaccatttttatttttatttctttatgcagatactagcagactttagttatgtatttttatttccccttttgttacacaaaagggaaggtgatatacacaccttttcattttccatttaatagtatgtcctagagagctctttatatcagcacacagagctcttttttcatctttttttccacagctgcatagtatttttttttcctaattacaaaagtaatatatacttgttgaggaaaaaaattttaccattacagaaagtaaaaattttccataatccaacctttagagaaaatcacagatatagctaaatattttattagatgttagatgtaaatatttccatattttttctgtacatttatctaatccaaaaaaaatctaatataaaaatatattatttttaaaattttctttaaataggctattttacttgcaaacaataatatatctttctgtttttaaaacacttataaatgtaaaattttatatttttaaaaactaaggttaaaacaaccatgtttggccaggcacagtggcttaaacctgtaaccccagaactttgggaggccgagatgggtagatcrcttgagtccaggagttcgagaccagcctgggcagcatggcaaaaccctgtctctaccgaaaaatacaaaaattagccagccgtgatggcacccacctgtattcccagctacttgggaggctgaggtgtgaggatcacctaagctgaggaggttgaggctgcagtgagctgtgatcgtgccactgcacgccagcctgggaaacagagcaagactctgtctcaaaaaaaaaaaaaaaaaagttttgttgccctttcaattcctcagttttttagtttataattatgtcatccaaccaagctgttgtcagtagttattnnnnnnnnnnnnnnnnnnnnnnnnnnnnnnnnnnnnnnnnnnnnnnnnnnnnnnnnnnnnnnnnnnnnnnnnnnnnnnnnnnnnnnnnnnnnnnnnnnnnnnnntgggttcaagcgattctctgcctcagccacccaggtagttgggattacaggtgtgcaccaccacacccagctaatttttgtatttatagtagagatggggtttcaccatgttggccaggctggtctcgaactcctgacctcaagtgatccacccgccttggcctcccaaagttctgggattacaggcgtgagccaccacacccggccctattatacttttaaaaaattgatcatttattccttttgtaatgagaaaagtaaaagttacaaaataatcaaaagcaagaaatagtttcccctgtaatttcagaaattacatttcataagacgtgaaataaatgattagttggttttgacttttacagtttattcctgtgacttcatttaaaaatattagtggacatattctttgagtggttcatcctaccacagtgatgtatagttttattttctttttatgagatggggtcttgccatgttgcccaggctgctctccaatacctgggctcaagcaatccatgcactctggcctcccaaagtgcttaacaacaaaataagttagacacataacttatacaactgtccttcatttatttatttatttagagatggagtctgtctctgtcactcagcctggagtacagtggcaccttctcagctcactgcaacctttgcctcctgggttcaagtgattctcctacctcagcctcccgagtagctgggactacaagtgtgtaccaccatgcctggctaacttttttattttttgtaaagacagggttttgccatattgcccaggctggtcttgaactcctgggctcaagtgatctgtccatcttagcctcccaaacttttggtactaaggggtgagccactgtgcccagccaatttttaatgactttaaaatttacaaatcatttatttttatttgtgctttttctaagctatgtgaattttgaccatggtttgtttattttatgcaaatcctctgctactctaccacttaggacactctctcggcattttttttcctaataaaccatgaggtgtcttagctatatctgaaacagccaagaaggtgttcttaccgtcagattgtgtctctcaggctgctgtccatcatccttttagtgttattagttgtrttctaggagagccagttcctagtgatgaagaaccctgaggaaagagtagaacaaaaggaaaaataaggctgttttgttcrgattttttagttgtgttaaataatgcagcaaagagctccttaaaactgaagtccagttgattagtggtaatagataagaattttttaaaaaactatttacacattcctttcttaagaaatgttaactccattacttctgcaatcagtttaacaacttttattttttatttgcagaaaccttattatctaggtcctgttgttgaaaaaagagcggtgcttctctgtgatggtaaactaaggctcagtacagttcagcagacttttggcctttctctcattgaaatgctacatggtaggtcgtgctcagaaattgaccctagctaacatccttgcctccmccaccatctgttttaactatgccggtaatgaaaatgagggataccaaccattcagtaattcactggatagttaacaagtaatctattattattattattattgagacagggtcttgctctgttgcccaggccagagtgcctcggtgtgatcatagctcactgcagcctcgaactcctgagctcaagcaatcctcccatctcagactcccaactagtgagaactataggtgttcactaccatgcccagccaagttttgtttgtttgtttgtttgttttttggagatggagtcttgctctgccacccggtcctggagtacagtggcgcagtctcagctcactgcaacctccgcctcccgggttcaagcaattctcctgtctcagcctcctgagtagctgggactacaggcgcacgctgccatgcctggctaattttttgtattttcgtagagacgggtttcaccgtgttgcccaggctgagctcaggcaatccgcctgcctcggcctcccaaagtgctgggattaaaggcgtgagccactgcacccagcctcagccaagtttaaaaaaaatgtttgtagataacggggtctcactctgttgcccaggctggtcttgaactcctgacctcaagtgatccgtccaccttggcctcccaaagtgctatgattactggcataagccaccacacccagccttaacaaatattattaattgcctactatatacccaggcctagtataggtgccaaaacatatggaaaatatgcaccctgcccttagggaacttacagcctagctggaaaagtyaaatgtacatatgaaaaaataagaaaagacttacaaagcagtgtataacaactgcaaggaagtaacagaaagcctcatttatttctgttgcactaaaatgtaaagatcatagcagcattgcagaatgtttctttctttctttttttttttttgagaccgagtctcactctgtcacccaggctggaatgcagtggcatgatctcggctcactgcaacctccgcctcctgggttcaagcgattctcctgcctcagcctcccgagtagctgggactacaggcacatgccaccacgcctggctaatattttgtatttttagtagaaatggggtttcaccatgttagccaggatggtctcgatctcctgacctcgagatctgcccgcctcggcctcccaaagtggtgggattataggcgtgagccactgcgcccggcctacagaatatttctttgaggagttgccattctaatatggagtaaacatggatgttcaaaggatattcctaagtggcaagggactgagtcatgccagattcatcagatgtggagcatggttgttttcttatgcctcattcttgtaacagtagccaccacattgaacatcaaatatcatttcattttttcccctttttctcctacctgaccctaagtaatacccagtcttcccaataccccattctctgtaaaatcttacaaggattgagttgaatattatcaactactatattccttcactcagaaaaaaaaattygtagtcatatgtttcatcataagaataatatatactaaattgcctgtgtatttatttttatttgcagattcccactggattcttctctctgctgacagtgagggctttatcccgttaaccttcacagccacacaggaaataatcataagagatggcagcctgtccaggtcagatgtcttcagagactctttttctcacagtccaggtgctgtttcttctcttaaagtctttacaggccttgctgcccccagtttagataccactggctgttgtaaccatgtagatggcatggcttgatatctgcagtgtccttgctgtgtagctcttcagatgagaccattacaaacaaggcctgcttgacactggacactcgccaatgagactcccactgcactcaggcgaagcgcttgccatggtcggctctcctggtttccccctgtttcccctgagctgaggctcgctgctgtgtagcagagctcagtctttattagatggctccgaaagtggtgtttatgtattcatgactgtgtggttttgactaagggcagaattctcagaacaaaacaatrttatggtgccatatggatggtgttttatggtttctctgaggctttgtgtcccttgtccaaagctgcattgaagctgtcttaggagcacttaaaagataccttggcattgttataggtctttttcttggcttcaagaggaggttgaggagtctgctggggggcatgtgctctagcatattaacctcaaaccagcaagaattagcagagctccaaggaggaccagagacccactggcttctgctctcaggaacaggaagtggctctgatgttgcctggacctcccagaatttaaaccaaaccctcttgcttccttaacaaattctggctgacgaaggtccaggtactcttaaaaactggccctgggaaaattttgaatgaaatttcaagggaatttgtcccctctgggttccacttgaggttgtgccgatgctgctaccacactgtcgagcccaggtaagtcctactgcaggattttgtgctgtggccactcatgagtgtccctgaaataactttttttttttttaaatccagttttgggatcacgcaactttcctatttttctcccagtagtcagctcccttagttaacttgtcactttaatttgatatttttattttctctccttttaagtcttagagaccagcagagaatctgtgagagaaagtatttcaggaagttagaaattcaaccgaatctgaggtagtcctaaaaagtgccattttgtttcacttatgggctaaagtaccagcttagtcaggtaagagccctgacccacttcagatggtaacaccacttctcactgccttcagatggaatcacagatttcagtcacggcgcataacaaattgatcagtgagtggctaggcatctgcagataaattgtttcagccatagaagctccattagcacatatgcttccttttccccccttcctttaaaatcatctggaaagaaactattttgtgcccttggggactcctgtctgtctgttacagtttaccaagatggagctgggttaggaaagaagtgagggcccattttgtggttcaagtgcactagacagctgctggggtaggaagcacaggcaatgtctgyaatcagctgtgggagagcrgtgactgagaacagtctgaggcctggctccacttggaagtatctggggtgcgatgaaatcacaattatcttgaagcctaaagagggaactacaagactgttaactaagatcaatgtgggcacctaaaagggtatgttaaaatcaccatttctcaggtcaaaatactgtgaataagtcttcaataaaatcactaatggttattgtggctgttttggatgttttggtagtattttctttgcgattattgctgctatagaggaaccggcaataatcttgcagttatatatgcatatgttgtctgtattccttcttctggtggacagtccagaatataaatggttctttacaacaaatctgattccatgacaactctcatacaagagatgtttccttgacctctgctattattacagtcactggaacaatagaaaataatctcatatttgctggctttggaggcagggagagaagagctaaattcttcaaaggattgtttaatgttctacagtcatgcaccacctcgcctggctaatgcttgtatttttagtagagacggggtttcaccatgttggccaggatagtctcgaactcctgccggcctcctctttctttataccttgtgtgttggaaaaacattttaattttaaggaagccacacatttacctatcttcctttttatggaagttttgtcttcatatttatgtctttaatcagtattctgctggataattttatttgtttggggggtttttgttgttgttgttgttgttttttgagacggagtcttactctgtcgcccaggctggagtgcattggcacaatcttggctcactgcaacctccaactcccgggttcaaaccattctcctgtctcagcctcctgggtagctcggattacaggtgcccgccaccacacccatctaatttttgtatttttagtagagatggggtttcaccatattggccaggctggtctcaaactcctgatctcaagtgatctgcctacctcagcctcccaagtgctgggattacaggcatgagccactgagcccagcctctgctggataattgaggggtccctctgcagagttcctgacttcatgctctgcattgctctgtgtggtaaatttcatttgccaggttttttgtgttctttttttgagacagagtctctctctgtcgcccaggctggagtgcagtggtgtgatcttggctcactgcaacctctgccgcctgggttcaggcgattctcctgcctcagcctcctgagtagctgggattacaggcgcctgccactgtgcctggctaatttttgtagttttagtagagatggggtttcaccatcttggccatgctggtcttgaactcctgacctcgtgttcccgcctcggcctcccaaggtgctggaattgcaggcgtgagccaccacacccagccgataggttttttaatgctaaactttgcattcttggaataaacccagtatgttcatggtgtatttattttttatacgttgctactcattttgctattattttgtttaagattcttcctttccctgttaatgggtaagattagcccgtaaattctttttttatttttgagacaggggcttgctctgttgcccaggctagagtgagtggcactatcacagctcactgcagcctcaacctcctggcctcaagcagtcctcctaccttagccccgcaagtagctgggactacaggtgtgtgccaccacacccagctaatttttttaaaattttttgtagagatagggtctccctttgttgcccagacttttcttgaaatcctgggctcaagtgaccctcccaccttggcctcccagtgtcccaggattacaggcttgagccatcacacctggcctctttcctttttaatgtgcttggctggttttggtaagaagcttactctggcctgatagaatgagtagcagagtgtgccttctttttctgctctgtggaggagtttgtgtgaggtaggaatgatccttgattgaaagtttgctagaacttggaaatatcatttggtctcatgttttctttgtgggaatattattattattattattattattttattttttttttttgagatggagtctcgccctgtcacccaggctggagtacagcggcgcgatctcagctcactgcaagctctgcctcccaggttcatgccattctcctccctcagcctcccgagtagctgggactacaggcgcctgccacaacgcccggctaattttttgtatttttagtagagatggggcttcaccatgttagccaagatggtctcgatctcctgacctcgtgatccgcccgcctcggcctcccaaagtgctgggattacaggcgtgagccaccgcccctggccttttgtgggaatatttttaaatatttatttaatcctttaatatttatgagactaaaaggagaaactatttttttctgtaaccacagaacacttctgacatcagatgtgtgggtttttctacaccaagcgattcttcagttctctatggacataactgggtaccctacaatttcattcagttctgatactacccagagttagtgcagacccaataggttacgggctcagtccaacaggctgatccccacttccaataccagttgcaagtagtgggtctccaggcgatacacacttctctccagcttggctgcaaataggggattcccacaaaaccctcctcagattcgataatttcctataatgcatagaacacagagaaacactttacttaacatttattggttgattataaaatgaacagccagctgaagaggtatatagaatgaaatctaaaagggtcccctacacaagagtttctgtccccgtggagtggggtagacctcctggtacatggatgtgttcaccaacctagaagctctctgaaacccttcgtttggaagtggaggctccattacatgggcacaattgattaaatcattgatgatgagctcagtcttcagcccctgtcccctcccggtaggaagataaggctgaaagtttcaaccttctaatcacatggttggtttctctggcaaccagcccccatcctctgccagtcacatcattagcataaactcagatctgtttgaaaagggcttcttatgtataacaaaagatgttcccctcacccctaccactcaggaagttactagcattttagaagctctgtgccaggaacctggggcagagaccaaatgtgtatttcttatgtcacagggaccatttaggatttctatatatttatatacatacatatatatactctgttcagttacgcttgttttgaaaacccaaatttgttctaacatggctgtgatattagagaatgagtacagcataatgtgaatttcctgttacttacacaccaattttgtccttaagaaatgctagagctgggaacgggggctgtgtctgtaatcccagctactcaggaggctgaggcagtaggatcacctgaggccaggagtttaagaccagcctgggcaggccgagtacggtggctcatgcctttgggaggctgaggcggggcggatcacgaggtcaggagatcgaaaccattctggctaacacggtgaaaccccgtctctactaaaaatacaaaaattagctgggcgtggtggcgggcacctgtagtcccagctactcgggaggctgaggcaggagaatggcgtgaacccgggaggcggattttgcagtgagccggctgtaacgttttcttgaatgggtggtaggccacagatattactggtccacaagccaggttgggcaggagcttcctttttctagagacaagtgctactgggctagtcaggggcacaggcctatctgagatagtctgaaggcaacagacaagaaatgccaagtggggtcctggagtgcgggccagtcccttcaggacacgttgccgaagactccacatcccagggagaaaggtcacatactaaactgccagaccaggtgctggagggctgaggagggcgatgtcaggccccgagggtgctggctcctgtgtccattcacagtcgccctcctaagctttaggccaggctgtagctggtcctcctgtgggaagggaaggaagccaaggagaaggatggaagtggtgtgggccctctgtcctgccgcagaagcccgcggaaggtttggtggctgctccttgtcttcccagcaactcctcttcaactcctcccctcccaagtcctgtagatgagctacaaccctgtttctccaagtgtcatcaagcagttccccatccgcctggccttccctgactgggaagcatgccctcagtatctctctgctgcagagcccgaggccgtcaccctcagcagggagtggctgatgacaaggccacccactgcctgtcccgcgtgggcctgcatgatatgtgcatgctcgtggaccttacttgtgtgaacattgggtgcttgtgcacgtctgctggaccagacgtggtgatgctgcagcagtgattcctgagtacctgcttggcctcaggctctgtgctgggctcttgggatacaaaaaggaataaaacagccagccccagccttcaaggttcccatagcctccccggaaggtcagacagtgagtagatcctccccgtcagtggggtcggtgttctggtaggggaaggaccaggtcagagacctgctcagtattgcccgtgggagggaagagcagaagactcctaggcttccacccagagggaacgatggtgtcattcaccaagacagggacacagaaggaggagccagttagggggacaagatgagttccattgaggctcatcgagactgagtgccaggcttgtgggctactaggtggaaatgtccacatgccagtgatacgcggctgtggaagttgagggaagcacaggctggaggggcagctctagcagtcaccaggcacaaggagtgcctgagttgggtcaggctagcagaagaggtaccaagggggctttggagagcaaaagcaataggagatcaaggagtgagccctcacataccacagtctaccaggtgatcaaaggaagaagactgagaaggggtggccagagtgggagaagaaaatccaggagaaaagggtgaccctgagctaaggaaagaggtcccagaggcaggactgtgtgacacagcagggatgtctgcaggctggtgttagtcattcccccagcagcccacactgtgcctcgctggctgcagggggcgtgcggggcttacctccgaaggctcagccggctggaggcgtcccgactgggtgtctttggagtggagccgaccatgaggatgcagagcccagcaaggatcatgcaggtgggcacggcgccaatgaggactttgagggtgaccaccacctcctctgcttgcttgcagacccctgccttataccccgagaacctggagaaacatcagccagccattagggcagggcctgctgagcctggcaccctgggtggagggactcgacacctcaccccaccccaccccctcctgaaacgtggacttcatttcctggtcagatcaggagaggagtgtcaaggtgacaggctgacctgggagagtttagagggaactgagaataggggagctggccctctcagtctcatgcacagagaaacctggggaagtggttccccacactctccaaagagtagcgcttaggccccaggctcatggatgccccgagcttggtaggtgaggggctttgccctcttcctgcccactggtccttggtgcctctgctgtatcctaaccctgggactcactccagactgagggtggagatgcccagggcacatgcgccagacagcttggtgaagaagacgtaggaggagtagaagatggtctccaggcctggcccgtgacggtgctgcagctgaaagtcatccaccacgtctggcagcatggacctgcggcgggggtgtggagttagccctcctagccccttggccaccagcagcctgtgaattctctggggacggaggccaaagtggattcatccctgagttctgtgcccaggaccagactggccaccagagaagcagatggcctgtgtgctcgtaccccccgccagccccctgccggccccccgccattcctactgcctgatgtcctctcaggagggctctgaggatggagctggtggcctccatctcctgca

SEQ ID NO: 96343 - DNA, 37111 bp, Homo sapiens
  misc_feature (1)...(37111): n = A,T,C or G
ccagaaacctccttgtggttgctgagataggacgcacctggttcgcatcctgggcgtcggtggcagccttgctgccactatcacgcatgaaataattctccacgatgtctttggagaagcactgttgcttgcacacgggacagtccaccacttcgagaagcagggatgtgggagactgttacaagttcccacccaggttatggcccccaccattcccctgctgggtgggcccccgaccattatcccgcagcgaaccagcccctcccctccccgagccttcttttctccaactttagtcagatgtcccatctcagcggccagcacaaacccacgttcgtatgcaggacccagaaagtatttcccgtgccctgtccgggcccccatcctctcgcccaggtggcatcctcatctctgcacccagtcggaatcaaaggcagagagtagggggaggggtggcaccgatcacttcgtacttaccggtgccgtcgcccgccgccccgccgtcccccgagctgttggcggcggcgggggccgcgggccctaagcaggcactacaggccgagtgcaaacagggcagcaggcggggctccctctcgggtcgcaggcgctctctgcacacgccgcagtgctccagcagctccagcgcctcggcgccgccccccgcgggcgacgacgccgcggctgaggcagaggccgaggctgcggccgaaggggcggtggagcgcttttcgccgccagcggagccctcgcccgggcccgggctgccagaggcggccgaggccgctgctgccgaggctgccgccgcggaggccgccattcacacgccgccgggggcgcccagggggggaggaggggcgcggggcccgccgcgcaggcgcagacgcgctcgccgccaactgctgggccgctgccgccgccgccgccgcgaggccgagcgccgccacgcgcctcctgggccgctgcccgccgcgcgcgggacgctgctacggcacggccaactgctgcctgctcgcctcccgaaggcgccgcccgcgcttcttcctcagccgccgccgaaacccgcaccacgcgccacaagcacaagcacaaccgctcgcccgcgcgcccgctcgcagaaagagccgaggccggggggcgggacagaaataactggcgccgacgccgccgcgcacgcgcattgggcgcctcacgcccgggggcggggcccaggccggtcggtgcgggagaggccgccagtacgcacgcgccaactcctagtccttccaccaccgccaaccccacgtcggtggggctcttgtgggggcggggcggggcctctgtgacgtcactgccgcaattgaatccgccagtggggtatgcgaacctttatagagtgtgattcccctctcagctccacctccagaccacacagaagcgggccgctgtgcgcccaagcgcatgggcaatccgtccctcttcctcaacccgcgtctcttcgccgccgtagagtcgtctccagcctctgcgtcactaagagttcgggatagggggcagggccgatggagaagtaggcggggccaagaccgagtgaagggctgtgtccagggagaggggaggagagtctccatcccaagagggaggaagctcctgtgtgagctcgggtgctgacttttggattttaaccacgctatagttaaacttgagaaacacagaaacttgactgaatcaaatgtagatcacagccgggcgccgtggctcatacctgtaatcccaccactttcttaggcgagtcgggaagctccgtttagcccaggaggccgaggcagcagtgaggcgggattgtgccactgcacgccagcctagaccacagatggagaaaaatgtggccgggcgcggcggctcacgcctgtaattccagcactttgggaggtcgaggcggttggatcttaagtcaggagttcgagagcagcctggccaacgtggtgaaaccccgtctctactaaaagtacaaaaagtagccgggcgtggtggcaggcgcctgtaatcccagctactcgggaggctgaggcaggagaatcgcttgaacccgggaggcggaggttgcagtgagccgagatcgtgccattgcactacagcctgggagaaaagagtgaaactccatctcaaaagaggagagaaaggtttttgtgtttgttttgagacggagttttgctctgttgcccaggctggagtgcagtggcacgatctcggctcgctgcaacctccgcctcccgggttcaagcgattcttctgcctcagcctcccgagtagctgggattacaggggcctgccatcacgcctggctaatttttgtatttttaatagagacggggtttcaccacgttggccaggctggtctcgaactcccgacgtcagatgatagacccactttggcctcccaaagtgctggaattacaggtgtgagccaccacgccgggccccccaaccccccatcaagaaaaaaaatatatatatatatatacacatatatataaatcacaagaggctaaagagcaatgagtctgtgaaatcccacccagccccccaaggcatcccctccccatgttttcgtcagcagctaccctgactttgatgcttttccagatggggaaactgaacctcaacagtggggaatcccaaggagggaaggaagcaggtccatgtggggagaatcctgtctgaggtggaaagtagggtttgtgtggggaaaatcctgtctgagggaaagagggtgtgtgtgcggaggggaaccctgtctgaggagggaagcagggtctgtgtggggagaatcctgtctgaggagggaagcagcgtctgtgtggggagaatcctgtctgaggagggaagcagggtgtgtgtggggagaatcctgtctgaggagggaagcagggtgtgtgtggggagaatcctgtctgaggagggaagcaggttctgtgtggggagaatcctgcctgaggagggaagcagggtctgagtggggagaatcctgtctgagggaagcagggtctgtgtggggagaatcctgtctgaggaggaaagtagggtgtgtgtggggaaaatcctgtctgagggaaagagggtctgtgtggggaggggagccctgtctgaggagggaagcagggtctgtgtggggagaatcctgtctgaggagggaagcagggtgtgtgtggggagaatcctgtatgaggagggaagcagggtgtgtggggggagcttcctgtctgaggagggaagcagggtgtgtggggggagaatcctgtctgaggagggaagcagggtgtgtggggggagaatcctgtctgaggaaggaagcagggtgtgtgtggggagcatcctgtctgaggagggaagcagggtgtgtggggggagaatcctgtctgaggagggaagcagggtgtgtgtggggagaatcctgtctgaggagggaagcagggtgtgtggggtgagaatcctgtctgaggagggaagcagggtctgtgtggggagaatcctgtctgaggagggaagcagggtctgtgtggggagaatcctgtctgaggagggaagcagggtctgtgtggggagaatcctgcctgaggagggaagcagggtctgtgtggggagaatcctgtctgagggaagcagggtctgtgtggagagaatcctgtctgaggaggaaagtagggtttgtgtggggaaaatcctgtctgaggagggaagcaggatgtgtggggggagaatcctgtctgaggagggaagcagggtgtgtgtggggagaatcctgtatgaggagggaagcagggtgtgtggggggagaatcctgtctgaggtgggaagcagggtgtgtggggggagaatcctgtctgaggagggaagcagggtgtgtggggggagcatcctgtctgaggagggaagtagggtctgtgtggggagaatcctgtctgaggagggaagcagggtgtgtggggggagccctgtctgaggagggaagcagggtgtgtgtggggagaatcctgtctgaggagggaagcagggtgtgtggggggagaatcctgtctgaggagggaagcagggtgtggggggagaatcctgtctgaggagggaagcagggtctgtgtggggagaatcctgtctgaggagggaagcagggtgtgtgtggggagaatcctgtctgaggagggaagcaggttctgtgtggggagaatcctgtctgaggagggaagcagggtgtgtgtggggagaatcctgtctgaggagggaagcaggttctgtgtggggagaatcctgtctgaggagggaagcagggtgtgtgtggggagaatcctgtctgagggaagcagggtgtgtgtgagaagaatcatgtctgaggagggaagcagggtgtgtgtggggagaatcctgtctgaggagggaagcaggttctgtgtagggagaatcctgtctgaggagggaagcaggatgtgtggggggagaatcctgtctgaggagggaagcagggtgtgtgtggggagaatcctgtctgaggagggaagcagggtgtgtggggggagaatcctgtctgaggagggaagcagggtgtggggggagaatcctgtctgaggagggaagcagggtctgtgtggggagaatcctgtctgaggagggaagcagggtgtgtgtggggagaatcctgtatgaggagggaagcagggtgtgtgtgagaagaatcctgtctgaggagggaagcagggtgtgtggggggagaatcctgtctgaggagggaagcagggtgtgtggggggagaatcctgtctgaggaaggaagcagggtgtgtgtggggagaatcctgtctgaggagggaagcagggtgtgtggggtgagaatcctgtctgaggagggaagcagggtgtgtgtggggagaatcctgtctgaggagggaagcagggtgtgtgtggggagaatcctgtctcagggaagcagagtctgtgtggggagaatcctgtctgaggaggaaagtagggtttgtgtggggaaaatcctgtctgagggaaagagggtctgtgtggggaggggaactctgtctgaggagggaagcagggtgtgtggggaggggagccctgtctgaggagggaagcagggtctgtgtggggagaatcctgtctgaggagggaagcagggtctgtgtggggaaaatcctgtctgaggagggaagcagggtctgtgtggggagaatcctgtctgagggaagtggggtgtgtgtggggagaatcctgtctgaggagggaagcagggtgtgtgtggggagaatcctgtctgaggagggaagcagggtgtgtgtgagaagaatcctgtctgaggagggaagcagggtgtgtgtggggagcatcctgtctgaggagggaagcagggtctctgtggggagaatcctgtctgaggagggaagcagggtgtttgtggggagaatcctgtctgaggagggaagcaggttctgtgtggggagaatcctgtctgaggagggaagcagagtgtgtgtggggagaatcctgtctgagggaagcagggtgtgtgtgggaagaatcctgtctgaggagggaagcagggtgtgtgtggggagaatcctttctgaggagggaagcagggtgtgtgtgagaagaatcctgtctgaggagggaagcagggtgtgtgtggggagaatcctgtctgaggagggaagcagggtgtgtggggggagaatcccgtctgaggagggaagcagggtgtgtgagagaagaactctgtctgagggacgcaggatctgggggagaggaatcatgtctaaggggagaagcagggtctgtaggtagaggcgaacccgcctagggactatcagcgcgttgaaaacgtggtgggtgggtgcattgaggctggccccgggggggtgggcctcagccccctgtgcggtgcccctggggtcgtgaggtctccggtccaggtgacaacggctgggggcggggtaggtggcagcttccggaggatgtttggaggccgcgaggactggcgcgaacaaccatgaaacccattcgccactcccaaggcgcgcacaggtaaaggtggctagccgggcggggcgtgagggtaacggggcactgcctccccgggccccgctcccaggtgtccgcacgtggctgcagcacgggcgcgtcgaccgctgggccgggtgtggcctttgttcctgatggggactgggggccgcggggctttgtccccgcctctgcctttgttccagcccgggcgcgcggccccccagatctgggcccaccccatccgcggcatagtcaccgcctccacgcccagcctgccccttcatagggccacgcctcgctagccggcccgccccctccagcccaccaccctgaagacgccctggcccctggcttccttcctctgataatagggaaagttaatgccagaggctgacgcgttgagatcgcttgagcccaggagttggctgcagtgagctatgatcgctcccctgctctcctacctgggactgcagagcgaggccctgtctttaaaaaaaaaagaaaagaaaagaaaagaaaaaaaaaaagttggtgctggcagtgcacagggcgaggtgtgggcgtcctttaggaatatttgctgtggccaggaacggtggctcacgtctgtaatcccagcactttgggaggccgaggtgggcggatcacctgaggtcgggagttcgccaccagcctgaccaatatgatgaaaccccgtctcggctaaaaatacaaaaattagccgggcgtggtggcacgggcctgtaatcccagctactccggaggctgggacaggagaatcgcttgaacctgggaggcagaagttgcagtgagctgagatccggccattgcactccagcctgggcaacaagagtgaaactctgtctcaaaaaaaaaaaaaaggaatatttgatgagcactttccacagccctatcctgcactggtccccaaaatcacgggagagggggacgtgtgggtcacacaggacccacacctgcctctggcctctagggtagacaagggtaccagggccagaaggtcaaaatattaatactatggtacaaagtgtggaaatggctctcctaggggctgccccaaacacttgcaggaaggcagttgagcagaaacaagtccaaggtccctgaggcaatagggaggcaatagtgaggagtggtgggaggtgctcagagaggttactctacagctagcagggtctggggtatgttagatcccctgccaccctatcatcggctgcccctcataacaggccctccccaggccctggcaacacaccttggggtttcagtggcccatcaaggtccatgctcttctctctgcacaatagagaggtattgtaagagcaccccttttccttctcctgggcccaagaccttcatccccagtatgaggcagccacacaagcagcaggtgttacccaatgccagcagcagaccttggagcatcacctccccaccaggttccacaccactgtggggccccattgtccacatggagaacctgaggcttcagcaagtgccaggacaccagtcggggaagggagattaactagaaaacaggctcaagctgactcagggacagcagagtggggcttcctaggattggccaagccagggtgggtatataggagagtaagactagggacctcactcagaggtccataagtatatggcaggacgctagtgcaccttggttggctccgctccccaggtggcccggcagagcagtcagtatcccttatacttctgtcctccatgctccttgccaacactttaccacgtctctcccttcccagtcctggaccactgtgaactgtcaatattttggctttgcagacagggcataagacaggtgtagcaatatgcagtggtcactcagactgcacccaggccacctgaggactgcctactgcctggttgtgcgcctacctgaagatagccatcctcaccctctcttccccaaaccccacacgtgtgcatgctctccttcccaccctcaggtgtcacccccaaagccactttctgaggaggcattgtggctacatcactcaaatttcttttttcttcttttttcttttttttgagatggagtctcgttctgtcacccaggctggagtgcagtggcgcaatcttggctcactacaacctctgcctcctgagttcaagcgattctcctgccttagcctcctgagtagctggaattacaggtgcccactaccacgcccggataatttttgtattctttttttttttttttttgagacggcgtctccctctgtcgcccaggctggagtgcagtggcgcgatcttggctcactgcaaactccgcctcccgggttcacgccattctcctgcctcagcctcctgagtagctaggactacaggtgcccaccaccatgcccggctaatttttttgtatttttagtggagacggggtttcaccgtgttagccaggatggtctcaatctcctgacctcatgatccacccatctcggcctcccaaagtgctgggattacaggcgtgcaccgtcatacccagccaatttttgtattcttagtagagagggggttttaccatgttggccaggcactgcactccagcctgggcaacaaaagcaaaactccatctcaaaaaaaaaaatccaattctggtgacaactctagggtatggccctgctgacctctgacttctgaccttatcactcttccagccacataggagacctgttgtcctcaactcagggcctttgtacttgctattgcctctactcagaatgttattctctgggctctcttcttggctctcttcttccccatttcagctagagaaaatcacaaggacatgagctccaaattgtactcactactgcatccactgtgcttagcccagagcccacttcttggtggatcagtcatcagcaaatatgtgaaaggacaagcaaatggatgaagatgatgaccatcttgagccagttttgtagaccataacatgagatttggtatctattactttaaaaattttgtttgtttgtttttggtaattgagttacaatgtatggccaggcctggtggctcttgcctataatcctagcactttgagaggccaaggcaggaggatagcttgagcccaggtgcgatctctgctcactgcaacctctgcctcctaggttaaagtgattctcctgcctgatcctcctgagtagctgggattacaggcactaaccaccatgcccagataatttttgtatttttagtagagacgaggtttcaccatgttggccaggctggtctcaaactcctgatctcaggtgatccacctgcctcagcctcccaaagtgctgggattaccagtgtgagccactgtgcctggccccgtgtctattattaaagtacattttttaattcaaaaaaatcaaacaggccgggtgcagtggctcatgcctgtaatcacagcactttgggaggctgaagcaggcggatcacgggatcaggacatcaagaccatcctggccaacatggtgaaaccctgtctgtactaaaaatacaaaaattaaggctgggcacggtggctcacacctgtaatcccaacactttgggaggccaaggcgggcggatcatgaggtcaggagttcgagaccagcctggccaagagaccagcctgaccaatatgatgaaaccccttctctactaaaaatacaaaaattagctgggtgtggtagcgggtgcctgtaattccagcttcttgggaggctgaggcatgagaattgcttgaacccaggaggcggaggttgtagtgagccaaaaatcatgccattgcactccagcctgggcgacagagcgagactccaacttgaaaaaaaaaagaattaggtcgggcacggtggctcacgcctgtaatcccaacactttggcaggccgaggtgggcggatcacaaggtcaggagattgagaccatcctggctaacatggtgaaaccctgtctctactaaaaatacaaaaaattagccaggcgtggtggcgggcrcctgtagtcccaggtactcgggaggctgaggcaggagaatggcgtgaacctgggaggtggagcttgcagtgagccgagattgcgccactgcactccagcctgagcaacagagtgagactccgcctcaaaaaaaaaaaaaaaaaattagctgggcgtggtggcacgtgcctatattcccagctacttgggaggctgaggcaggagaattgcttgaaccaaggaatcagaggttgcagtgagctgagatcatgccactgcactccagcctggagatagagattctgtctcaaaaaataataataataataataataatattcacataatatcaaatttatcattttagccagtttaaaagtgtacattcagtggcatttcatgcattcacaatgttgtgcagccaccacctctatctatttccaagtcattttcattactccaaaaggaatccctgtaaccattaacactcactccacagtccccctccaaccagcccctgacaatcactaatctactttctgtctctatggactttttaactttttggtggaggcttatgatatgtagagatgcaagcagggagcacctcagctaaccagctgtgatagcaaagaacagaacatctctggctctcagaagcccatgtcccttgtagctgacgccctaacttcacagacaagctttgcctacccataaaacacatggggctttacttctctgtctggcttctcagtgcacatttgtatggccatatatgaccttagttcctccccggcccttgttgtgtagggtcaattgtatgaatgtccttcagtttgcttacatgttctcttgactgcattctccctcctgctcaggctgttattaacacagctgctacagtgggcaataccgtatgtggcttttggctgggtgtttctttaactgtaatgaggagctaacagaagattttagcagaaggtggcatgatctgattcccatttcaaaggttccagttggggaatgggtgggagcagaatggagaacaaaagatgagtgttcaactagatcttctcaactgctctttggaatcactatgattcctgttagtttcctgtggattttgtagcatattaccacaaacatggcagcttaaaaaaaaaaaactttattctgtcaaagttctgaaggccaggagaggatccttccttgcttcttccagtttctggtggcctcggcttgtcactgcatcactccagtcttgaaggctgacagcttcaaatacctctgttctcacttcatattgccttgtcttctatgcatcgttgctgtggactgaattgtgtcctctaaaattcgtatgttgaagccctaatcttcattgtgatgatatttggaaatggggcctatgggaaataattagggttagatgatgtcctgatagtggggccccataatgggactaatgccccataagaaaaaatgcctttgggaggctaaggcgggaggcttgcctgagatcrggagttcaagaccagcctggccaacatggtgaaaccctgtctctactaaaaatataaaaattaggccggacgtggtggctcacgcctgtaatcccagcactttgggaggccaaggcgggtggatcacctgaggtcgggagtttgagaccagcctaatcaacatggagaaaccccatctctactaaaaaaatacaaaattagccaggcatggtggcacatgcctgtaatcccagctaccgggaggctggggcaggagaatcacttgaacccgggaggcagaggttgcaatgagtccagttcacgccactgcactccagcctgggtgacagagcgagactttttctcaaaaacatggccggggtggtggctcacgcctgtaatcccaacactttgggaggccgaggtgggcggatcacctgagtcaggagtctgagaccagactgcccaacatagtgaaaccttgtctctagtaaaaacacaaacaatgagctgggcatggtggcacacacctgtaatcccaactactcgggaggctgaggcaggagaattgcttgaacccggcaggcagaggttgcagtgagctgagattgtgacactgcactccagccttggcgataagcgcgaaactccatctcaaaaaaaaagaaaagacaaatatgtggaagagctccaccccagcttcccccaacacagcaagaggagagtcctcagaatgaaacctactttgcctgcaccttgattttaaactttcccttccaaaactgtgagaaaaaatcttctgttgtttgtgccatgtagccttacgttattttctcctctgcctctctcttacgattcatgttaatttgcatgtagggcgcaccaaataattccaggtaatctccccatttcaagaacctaaatcacaattacaaataccccttttcctaataaggtaacacttccaggtttcagagttaggatgtatatatcattgggggccattttcagttacttcagtcccaatttcacagatgggaaaacattcccagagagtagaagggactgttcagagctccacattgtgacctgtacaaattcaacccactcctggacttggtgggtgccctcgccccttctgtttgctgccttcccaaagcatcctgtagcttccagggaaaggaaggaggggggaggacaggagacactcagagcccagagtctcatccctttccctgctaataggaaccagggctcctggggaaaatggctgattcaaggactgtacagggacagactatacagggaaagtcctagctgagcctgaaacaccttgttgtattacaaagtaagaggtgcccaaagaatggtggaaatatgttaaaaggacatagatgccaaacctgatcaaacagctggagcatcagaaagaacagtgaccgtcatcggctgatgcacaataaatccacactacccatgagtccttaagtgttctcaaaaaaagagatccagaaaaataaacccatctgtcaccatatgatgctgattttaagccagcccctcactctgagaacttggcatcaatcctgccttcccaaggggaaccgtatttcaggggaacacatggccccagttcttgcttgcttaccaaagaatgcccactgataattagatgctagaatttgaaaaagcctaatttgccaacccataatgaaatccctgcactgcccaggattatctgcttatgttatgaggtacatggagggtgtggtgtcaacatggctgtgtagggggaacccgtaagtgtacaggggacagtcaggctgtcagtgccccacgttagggttgatgacacgatcccaccctataaatgctgtatgtattttatggcttatagattagacatcaatacaactatttaaaaaggagaaggagacgaggttcaaagaacatatacaaatggccaataaatgctccacatcagtgttcatcagggaaatgcaaatcaaaccgcaatgaaatactgcttcacgcccactaggatggctataaaaataactgaaaatgacaagtgagagtgaggatgtggagaaattagaaccttcatactttgctgtgggaatgcaaaatggtgtagccaccatgggaaacagcctggcagttcctcaaacagtyaaacacgatccagcaattcacctccaaggtatatacccacatgaattgaaaacaggtgttcaggccaggagcggtggctcactcctgtaatcctagcattttgggaagccaaggcaggtggatcatgaggtcgggagatcgagaccatcctggctaacacagtgaaatcccatctctactaaaaatacaaaaaattagccaggcgtggtggcgggcgcctgtagtcccagctacttgggaggctgaggcaggagaatggcgtgaacccgggaggcggagcttgcagtgatccaagatcgcgccactgcactccagcctgcgcgacagagcgagactctgtctcaaaaaaagaaaaaaaaaaaagaaagaaaacagatgttcaaacaaatccttgtgcaagaacgttcacagcagcactattcataataactaaaagtagggccaggcacggtggctcacgcctgtagtccccacactttgggaggccgaggcgggcagatcacctgaggtcgggagtttgagaccagcctggccaacatggagaaaccccatctctactaaaaatacaaagttagccaggcgtgttggcacgtgcctgtaatcccagctacttgggaggcgaggcaggagaatcgcttgaactctggaggcggaggttgtggtgagccgagatcatgccattgcactccagcctgagcaacgagcaaaattccgtctcaaaaaaaaacactaaaagtagaaacaacccaaatgtccattaggtaattaattaatggataaataaatgtggtgtatccatacaactgaggtgtgtgtgtgtgtgtgtgtgtgtgtgcatgcgctctcatggcaaggtctctgtcatcagactggagtgtagtggtgccatcatggctcactgcagcctcgacctcccaggctcaagtgatcctcctgcctcagcctacccaagtagctgggactgcaggcatgcaccatcatgcttggctaatttttgtattttttgtagagacagggttttgtaacgttgcccaggctggtctcaaactcctgtgctcaagtgatccacctgccttggcttcccaaagtgctggtcttacaggcatcatgagccaccacacccagccataatggggtctcattcagccataaaaaggaagtactaatatgtgctacaacacggttgaaccttgaaaaccttatgctaagtgaaagaagtcagatacaaaactcacatattgtatggttccatttatgtaaaatatgcagaatctggggtgggggtctaggggagggatagcattaggacaaatacctaatgtagatgacgggttgatgggtgcagcaaaccaccatggcatgtgtatacctatgtgacaaaactgcacgttctgcacatgtatcacagaacttaaagtataatttaaaaaaatccagaatcagcacatttgtttagacagaaggttaggttaatggtttccagggactgaggagaggggagaaaagtttttattttgtagtgaggaaattgttttagacctagatggaggaggtggttgtacaccattgtgactatactagaaggcactgtgttgttcactttaaaacggttatctgtgtatttattgagatagggtcttgctctgagtgcggtggtacgatcctgcttcactgcagcctcaacctcctcgggctgccatctcagcctccagcatagctgggactacgggtacacgccatcatgcctggctaaactttttttgtatttttttgatacagggtttgccatgttgctcaggctgctctcatattcctgggatcaagcgatccccctgccttggcctcccaaagtgctgggcttacagatgtgagccaccacatccgaccccatccttgttttcaaaagatgctttatgaggttaaaagatgagctcatcaatgtctttttttttttttttttgagatggagttttgctctcattgcccaggctggagtgcaatggcgkgatctcagctcactgcaacctctgcctcccgggttcaagcaattctcctgcctcagcctcccaagtagctggcattacaggcatgcgccaccacacctggctaatttttctttttaaaatgttttaattattattattattttttgagacagagtctcgctctgtcatccaggctggagtgcagtggcgcgatctcagctcactgcaacctccgcctctcgagttcaggtgattctcctgcctcagcctcctgagtagctggcactacaggcgcatgccaccacacctggctaattttttgtaattttagtagagacagtgtttcaccatattagccaggatggtctcgatctcctgacctcgtgatccgcccacctcggcctcccaaagtgctgggattacaggcgtgagccactgcgcccagcctaattttgtatttttagtagagatggggtttctccctgttggtcaggctggtcttgaactcctgatctcaggtgatccgcccacctcagcctcccaaagtgctgggattataggcgtgagccaccgcacctggactttttttttttttttgagaactagtcttgctctgtcgtccaggctggagtgcagtggcgcgatctcagctcactgcaacctctgcctcctgggttcaagctgcaaggctctagtatcggtttgaaccccgagagcgcaccaacaaacaacacgaggcggtgtggagcaacatgctattttaatgagcgcctgggtgtcccaagtaaggacagggcaggagttttatagtctcctgtaaacaggaagtgtcctagtctgatgttactgctatgtggtacccagggcctctctccctccatcttcaggggtatgtgtcttccggccagctctcttcctgcttctgctatcttgctgatgcacgttgctggcacaaatggccttgcatcttgggactgggcctgagaagggaggagttatttatcccccgaagctttcaggccccagggagaatctttcacaagggattctcctgtctcagcctccgagtagctgagattacaggcacgtactgccacgcccagataatttttgtattttagtagagacagggttttgccaatgttggccagcctggtctcaaactcctgacctcaggtgatccacctacctcggcctcccaaaatgctgggattacaggggtgagccatggcccaatatcttaaacacaaagcaggcagggtggagagcagcccttgtaaagagggaggggacaaagtcagggtgtggcaagtctaggttgattcctcctggactgaggccttggccaccatgggtccagcaggaagacggctgggagaacaaggctgggtggctgttctgcctcagttgcccaccttagtagggaagcacttctcagactagccactcctgagtggaaaacactgaaccatctgaccagagacaattcacaacacccgggtggcacaggagcctgagacaaagtgacaggrctggagagggcagggaccaagacttcatgttgtgtgattccactgataggaaatgtcaagcagacacatccatggacagattcatggggacaggggtggggacgctcaggaaatgggctgagcaatctcatggaggtgatggagatgttctaaaacaggacagtggtgaaggttacacaacacaataaactgactaaaaatcactgaattgtgcacatgggaaattatatggcagagttcgtgtctggaggtgtgaaagactgtcccctggggccataaaactggagctgccaagcttacacctactgtgggtggtggaattcctcgctccagggcatcgaggagcagtgggtgcaatagaggaaaattgattaaagggagaatgattttaacctggcttcagtggatgtattatcttctgggatgcagctagagcttcactgtgtcttttcgggatggaaccagccaggtgtcccacaatagggggttggggctttccccttcaccttagagctttactcaaaacacattttgtggccaggtgtggtgggccacaactgtagtcccagcttctcgggagactgaggtggaaggatcccttgagcctgggaggatgaggctgcagtgagccgtgatcatgctgctgcactccaggctgggcgacagagtgaaaccctgtctcaaaaaaataataataggccgggcgcggtggctcacgcctgtaatcccagcactttgggaggccgaggcgggcggatcacgaggtcaggagatcgagaccatcccggctaaaacggtgaaaccccgtctctactaaaaatacaaaaaattagccgggcgtagtggcgggcgcctgtagtcccagctacttgggaggctgaggcaggagaatggcgtgaacccgggaggcggagcttgcagtgagccgagatcccgccactgcactccagcctgggcgacagagcgagactccatctcaaaaaaaaaaaawaataataataataataataataataataacagccaggcgtggtggctcacgcctgtaatcccagcattttgggaggctgaggcaggtggatcacctgaggtcaggagtttgggattagcctggccaacatggtgaaaccccgtctccactaaaaatacaaaaattaactggacatggtggcaggcgcctgtaatcccagctactcaggaggctgaagcaggagaatcacttgaacccgggaggtggaggttgcagtgagctgtgattgtgccattgcactccagcctggacaacaagagccaaactgcatctcaataataataataataataaagtccaggcaccatggctcatgcttataaccccagcactttgggaggtcaggctggtctggaactcttgacctcaggtgatctgccaaatagctgggattataggcatgtgccaccatgcccagctaatttctgtatttttagtagagagggggtttcattaagttggtcaggctggtctggaactcttgacctcaggtgatctgcctgcctcggcctcccaaagtgctgggattacaggcgtgagccaccgcgcccagcctttgggttttttaaactcttcagaattaatccaagggcacagtacaggtcaaggtgctgggactctggcaaagcgcctgtggcagttgtgttgttttcagtattgtctcaatttaggtctccttcttccggagttctcaggcctctgtccacagggctggtagtaccttcttctttgtattttacatatgaaagcacattaaatcttttctcggttgtaaattttccttgcccccacctgcctttgttaacagccctcaatacctgtatggatgctgttacttttctggtaaatcccaacggcaacttgcctggtcccagccattgcttctaccacctccctggctccaccagggcctggggctgggcctccctccagcctctctctaagctgcagcctcagaggactttctggagtatacaggggatcctgccattgccccttcacacctcacacggctcccatgtcttctctgtcccatcagaagggctcaagtcttcactgctgctatttgccttgccagggaccacccctcagcctccgctgctatctgccttaaaccaggaagcatttctgcaggtatatgcttagtgcctgctcctgtgtgtactcatttagtacttgaaatgcccccacaaccattgtgcatggatcatgggacctgtattccacacctggcacaacccaaacccactaggatggggccgggtttgtggacacaaggacttgagtatgactgccaaagagggggagcctggatgaaaggctggccgggaagtgatggagggtggagggaggttgggatcctgactgagatggaatcaggcacagccgagaggttctggaagactccttggtgggagctgtctgttctctgacccatgctgtcagaggggccctgccttagccagctgaggaggcccagtcaccctggagctcaatttcttctgctcctttcacatctgtggtcactgtgctctcacagactcttccctcaatggccaccatttcccatctcaggccttgggcttagcctggagttgtttttttgttttttttttttgagacggagtctcactctgtcgcccaggctggagtgcagtggcgcaatctcggctcactgcaagctccacctcccaggttcacgccattctcctgcctcagcctcctgagtagctgggactacaggcgccygccaccacgcccagctaattttttgtatttttagtagagatggggtttcaccgtgttagccaggatggtctcgatctcctgacctcgtgatccgcccrcctyggcctcccaaagtgctrggattacaggcgtgagccactgcacccggcctagcctggagtttttaatatttgcaggccacatcgccctcctccctagcttgtcaaacctgtgttctcaggtacacatttattccttgaaatgcccccacaaccagggttaaggtctttgggttcatacacacacacacacacacacacacacacacacacacacmyatatgaacacacacacacacacacacacatatatacacattctttttattattattattattattttgagacggagtcttgctcttgtcgcccaggctgaagtgcagtggcgcgatctcggctcactgcaacaaccgcctcccgggttcaaggtattctcctgcctcagcctcccgagtagctgggattataggggcccaccaccaccacgcctggctaatttttgtacttttagtggagacggggttttgccatgttggctaggctggaactcctgatctcaggtgatctgcccacctcagcctcccaaagtcctgagatgacaggnnnnnnnnnnnnnnnnnnnnnnnnnnnnnnnnnnnnnnnnnnnnnnnnnnnnnnnnnnnnnnnnnnnnnnnnnnnnnnnnnnnnnnnnnnnnnnnnnnnnnnnnnnnnnnnnnnnnnnnnnnnnnnnnnnnnnnnnnnnnnnnnnnnnnnnnnnnnnnnnnnnnnnnnnnnnnnnnnnnnnnnnnnnnnnnnnnnnnnnnnnnnnnnnnnnnnnnnnnnnnnnnnnnnnnnnnnnnnnnnnnnnnnnnnnnnnnnnnnnnnnnnnnnnnnnnnnnnnnnnnnnnnnnacagagtgagactccatctcaaaacaaacaaacaaacaaaaaagatggagtcttgctcttgtcgcccaggctggagtgcaatgacacgatttcggctcactgcaacctctgcctcccaggttcaagctattctcctgcctcagcctccagagaagttgggattacaggtgcccgccaccatgcccagctagagatggggttttcaccatattggccaggctggtctcgaactcctgacctcaggtgatccacctgtctcagcctctcaaagtgctgggattacaggcatgagccaccgtgctcggccaatttttgtatttttagtagagaccgggtttcaccatgttggccagggtggtctcgaactcctgacctcaggtgatccacctgcctaagcctcccaaggtgctgaaattatgagattacagacgccaccacagacgccaccacgcccagccttgtgaaaagatctttagagagaaaaggaaaataacccttgaggctgcagctctcacctcccttggctgcttgagagaggtcagggtttggtttttctccttcctgtgttcatcctagcccttgggcagggtcttccacccctatcttgccctaatcctccaggccccatcccttggagctgagactttctctaaagccacccgtgtcctctccttcctaccctgaatctgtccctttctacccttcactgctgtcagggcagctattgtttcctgctaggactcctgcgtttgccaccccactaggtgcactgtcttccctacagccccttaaacatgctaatggggctaatgggacatggcttccccccctcaacacactgcaatcctgccactcagcccaaggttcactcatttgtcttgcccaagggagggccgtcctccctcctcagaggcctcatgcatgcctttcccacctacccttatgctcttcccaaaactcagcccagtgaaagcagacccagtgggtccagcaggccatggtttgagtctgaacaaagacgatgatggcaggttattagacttgtgtgttttttgttgtttttttgttctgagacggattttcactcttgttgcccaggctggagtgcaatggtacgatctcagctcactataacctctgcctcccgggttcaagcgattctcctgcctccgcctcccaagtagctgggattatgggcacccgccaccacgcccagctaatgttttgtatttttagtagggacaggccgggcacagtggctcatgcctgtaatcccagcactttaggaggccgaggcaggcagatcacctgaggtcaggagtttgagaccagcctggtgaacatggtgaaacaccgtctctactaaaaatacaaaaattagtggggcatggtggtaggtgcctgtaatctcagctactcaggaggctgaggcaggagaatcgcttgaacctgtgaggcggaggttgcagtgagccaagatcgcgccattgcgctccagcctgggggacaagagcgagactttgtctcagaaaaaaaaaaaaaaaaagtagagacggggtttcaccatgttgtccaggctggtctcaaactcctgacatcaggtgatccacccgcctcggcctcccaaagtgctgggattacaggtgtgagccactgtgcccagcctagacttgtgttttaatgaggtttcccacctggtacatattttcctccccctgacctccaaataccrcatctacaacacaatcacccagtagctgtcctgggtgaaggacaggcatcctgaccctgtctgtcttctggaggctttgttctagtcatgcgtttggacagttggttccctctttcactgccgagtccctctgtcctctgggataggggaagtgagaactgctccctgaggaatgagatcacgaaggggcctggtaaaagctgggaaggcacagaaataaagctttcagtgagggaaatgtgaggaatgcgttcatcagatgggaaacaaatagtggcatttattggactctcactgtgtggaggccctggatctcaccagatgtatttgttttctatcgttactataacaaattaccaaaactccataggttaaaacaatatccatttattagctcaccattccataggtcagaagcccaagtaggtcttctgtgggtctcataaaggctaaaatcaaggtgtggtatggactaagctgctatctggaggctctggggaagaatttgcttccaagctcattcaggttgtgggcggaatctagctccacgcacttctagggctaaggtctgttttcttttctttctttttttttttttttttttttgagactgagtgtcgctctttcgcccaggcccgactgcagtggcgctatcttggctcactgcaagctccgcctcccgggttcacgccattctcctgcctcagcctcctgagtagctgggactacaggcgcctgccaccgcgctcggctaatttttttttgtatttttagtagagacggggtttcaccgtgttagccaggatggtctcgatctcctgacctcatgatccgcccgcctcggcctcccacagtgctgggattacaggcgtgagccaccgcgcccggcctttttttttttttttttttttttttttgagacggagtctcgttctgtcgcccaggctggagtgcagtggcgcgatctcagctcacttcaagctccgcctcccgggttcatgccagtctcctgcctcagtctcccgagtagctgggactacaggcgcctgccaccacgcccagctaattttctgtatttttagtagagatggggtttcactgtgttagtcaggatggtctcgatctcctgacgtgatccacccgccttggcctcccaaagtgctgggattacaggcatgagccactgcgccgggccatgaggtctgttttcttgctggctgttgttgcagctcttctcagattctcagcatgacacctgtcctgttgcatttcctctcatggacctctctaccttcaaagcctctggaacccttctcctacttcaagtttctccaccttcctcttctgcctttaaggacccttatgataccttggacctaccaaaataatccagaatcatatcctattttaagatcagctaatgagtaaccttaattatttccgcaaaaaccctttcaccatgtagtgtaactattcataggtgagataatcatatttacaggttctggggatttgggcacggaaatctcggagggggccattttcggaattctgtcccccataccagattgacttgcaatgtcccagaatctcacagggtctagctcaggggaggcccagagcagggtgaggcagttgtctattcctgtctgcgttgtagtagaaggtgccaaggccgagatggggtcctttccccagtcccacccacagcgggcgggcctggagcgtctgcagtagtggtagcttgcttgcacctcctggcggccagggaccgagacctacttcagctctcacccgtgtcacaggaataaggccacttccccggttcgcagtggggtttaaactggccagaacacgttgggsacttgggccgggaactgccttcccattctgcatcacagggagcttgcggattgatcgcgcaggcccgccacacccctgatctcctgggcgacgccggaagagtgctctggtccagacattcctcgcgacgcggcagccctagcctcttcgactttggttccgactaagaggagagccggagtgcagactggcgggagctgatcgccataaaaataccggaaacgtgcttcggcctagggtttcccctgcgccgccgcgaccgcaggcctccgttccgccggggtaacggcccggaagtgcggccttgtagtcggtcaggaggaagcggccacggcagagcctggtgcctgaagaggagtcggaggtggggtcgaatgggcatccccctgccgcagggcgggcgaggaggctggggcgtgccaggggaggggcacctgcgctccgctagaagcgcacgctgagaacgcgagggggcgctgcaggaccggggtacggcgggggccagagtgcggggtggcagcggcgggtcagaggggtgctttgggcgtagggtggggcgcgggcaatggagcagagtatgggagaacgcgctcggagtaaagcacacggcgcggcgaaggcgtggcgggagtgtgcggcgccggacccgggaagctggcctgggcgccgggtctcgagtgcaggcctttgttctgaagtgtccaggccggccttgcggcgtcgggactgaggaatggagcccgtcgcggggcggggcgggaaaggaaggttcaagtctctcgggttgatgcgcaagtttccgtccccatcggccggacagattagaatcctttcaggtgctaggtgaatacagatggggcggtgctgcttgctgagttagcctttgcgcgggmacaggcctggcttttttgaggcattgcacagaaggctcagaacagggccagggagcggggtggtgtatccggatccgtagtctggaaaagctccctctggctgccgtgtggggaacagaaggggaggcgaggggcgcagagacaccagccaggtttcttcatccgtccaggacagcgggaacggggcagtggaggtgctcgaagtggtctgagggtcaaatgtggggcatgcaaaaaagggaggcgtctggctgagcaaagggacggcggattgggcataaggagtcggaggggttgaatcttgagaccccagtagagcccgagggtgtaggggcagcatcaagccgagcccaccctggggctttgtgactccaagggagagacaggctggtggagcctatacggatgtcagagtccagagctcctaccctcctcccttagactggaggtgtgtgcagtctgggtgcgggatgagccgagtatctcatcccttgtttgatagaaggggaaacaggccgaaggatcacggtttacctgcttgatggatggagtagcagaactcctcagattccagagtcctctgaggactaccccctcccctttctggtgcctgatgttgggccgtgtccccgattactccatgggcagctatccagtcacacacccctgctcaatccacacttcccctctctgtgccacacccacaccctgggccccacaggccccatcgagatggcaagaagctggggctgcaggagccacctccctgctcgctatgctaggggctgccagggagcatgtactggtttccctggggcatctcccaaggtactgcccaaccttttaccctcagcccttagtgactaggcacacccagaaccaccctgcccaggaagcaggtcatgccaccccactcctgcgagagcctctgtatatactagttaaggtgacctggttctgaggcagcaatcctgcctatgcacagggtctcatactggggggatgtggctaaaggaaaccaaaaggagctgtcagcaggggtggaggaggagtggaagctagctgggtagagagcaaggtctactcggggtgaggcaggttagccagttgggatgggggtccctggcctcttctacacaccgggctgccctcttggaggggcacatggggaggcttagggttattggagttggggtggggtgggtgggtgagtcaacatagagtaggccaaggcctgaaccttttcgggagcagtgattgaggccaacaccctctcctaggggtgtgctagggtttgcagcgttaatggggggctgtagacggcctggccaggtctgaggtagggggaggagggagtgctggagtgtcctgtgttgggaatggggactgtgaagggcagctggggagggatgggttagcgcgccttggagtgtggtgcactcgagccctgtcctgcaacaaggggtgaggggacagggacgttgggacagatgggggtcctcagttgacctctccctgccctcctcttgttctgtgcagatggcggctgcagaggctgtgcatcacatacacctgcagaacttctcacgctctctgcttgagaccctcaatgggcagaggcttgggggacacttctgtgacgtgactgtgcgcattcgtgaagcttcgctgcgtgcccaccgctgcgtgctggcggccggctcacccttcttccaagacaagctgctgctcggccactctgagatccgtgtgcctccggtggtgcccgcgcagacagtgcgacagctggtagagttcctgtacagcggttcgctcgttgtggcgcagggtgaagccctgcaggtgctcacggccgcgtcagtgcttcgcatacagacagttatcgaygaatgcacgcagattatcgcccgcgctcgagccccgggcacctctgcgcccacgcccctgcccacccctgtgcccccgccactcgcacctgcgcagctgcgtcaccgyctgcgccacctgctggctgcacgtcccccggggcaccccggtgctgcacacagccgtaagcagcgccagcccgcgcgtttgcagctgccagcgcccccaacacctgccaaggctgaggggcctgatgctgacccctcactgtcygcggcccctgatgaccgaggtgacgaggatgacgaggaaagtgacgatgagaccgatggcgaggatggcgaaggtggcggsccaggcgagggccaggcacctccttccttcccagactgtgctgctggcttcctcactgctgctgctgacagcgcgtgcgaggagccccctgcacccactggcctcgctgactacagtggtgccgggagagattttcttcggggagctgggtcagctgaggacgtatttccagacagctatgtatccacttggcacgasgaggatggcgctgtccccgaaggctgtcccactgagacccctgtccagcccgactgcatactgtctggatcccgcccgcctggtgtgaagaccccagggccgcccgttgcactcttcccctttcacttgggtgcccctgggccacccgcaccacccccttcagcaccatcggggccagcccctgcgcccccacccgccttctaccccacactccagcccgaggcagcccccagtactcagctgggggaggtcccggctccctctgctgctcccaccacggccccctcaggcacccctgctcgcaccccaggtgctgagccacctacgtatgagtgcagccactgtcgcaagacgttcagctcccggaaaaactacaccaagcacatgttcatccactcgggtgagccagggcgggggaggagagggagcaatctctcatcggagagttaaacctgagggggaattgagcactagttacagggcactggcactgttctgttacttttggttagcagggggcctagaaattgagccttcccccaagtgcaaggtatgtgggggaggggaaagccccactctgtggagcagcaggcactggcttctgtggagggggatcctgaggctgggtagggaagcaggagcctgtcctggcctttggaagggtggtggtggaaacttgagcagcctgggatgcacatgatgggtatggagccttggcaggaggtcctggcaggttgggaaactatgctccagggagcctcctgtgtctctctggtttccagctgtcccgttataggctggcagcaagggaggatgggtttacaggcccaggggtagaaagccctcagaggtggtgggatgaaggccccaggaactcctgagactggggcatgagtaggaaaacataggtagtgtggggactccacagctgcagaggaccccgaaaagctgtggggaggttccctcggaccttggccgtgtcagggaggcggctctgcagtgctgcaggagaggtaaagagtgggagggtggtactggggaatgtggtgaggatgctccctgggggctctgagatggaggacaaaggaatggaaagcagaagcctgctgagcattgtcagaaaaagcaaaaatttggctggaaggccacagtgatagtgagggggtttctgcaggggctggaacttgggatttgactgtgagtggtggggaagccatggtgttctaagctggggagtgactgagatgtcagtttaaaatcacctctggctgccctgggagaagccaggggcctgggaataagggagttgggtgattagtctccagggaactgccagaggccccagggtagtgctggctgtgtgaagtgtgtgatctgagccaggtgcctgggccaggttattctggggtaccctctggcaggcactgcctttcagtccactgccactgagatagggttttttttttttttaattttttttgagaccgagtctccctctgttgcccaggctggagtgcagtggtgtgatctcggctcactgcaacctctgcctcctgggttcaagtgattcttgtgcctcagtctcccaagtagctgggattacaggcgtgcaccaccacacccggctattttttgtatttttagtagagatggggtttcaccacgttggtctcgaactcctggcctcaagcgatctgcctgccttggcctcccaaagtgctgggattacaggtgtgagccaccacgcctggctgagacaggcattttgttaacatctgatgaatctaggggtggactcagactgcctcccctcccctaacccagaatgaggagctctctctatcacaccaaggacattatagtggccagcgggcaggggttctgggcaactggggcttcctgcaggaaggtggcagatgtgcccaggtccctccttatgaaagggcactggccttgtcagactgagtttaggggactctatgggcataggcgaggggggccaggacccagtgtctccctgtgccgggtgggtaggggttgagggggagggtacctgagggtagagggagatcccagtgggcagtccagatggccaacagatgttccagacaggctgggttccttgcagacagggtgcttgctggatttaggggtgccctgtcacagtgatatcccaggataacagaaagggggtccctgccaggaagggatgggagaggggtacctcacagtgtatgaggatccctgttgggcaggaaagtcccaacgtgaagggaggtcctggagaggagggggtgtccctgctgggcaggaagatcccatagtgaggggagggttctctgataggcaagggatcccggggtggtggttcgggaggggaggggagcccctgctaggtccaggagcccaggtgggggtggggtggggtgggggcggggagctgtagagtctgacttgcgttcgcggcccgccctgtcgtccgcaggggagaagccgcaccagtgcgccgtgtgctggcgatccttctctctacgcgactacctgctcaaacacatggtcacgcacaccggcgtgcgcgccttccagtgcgccgtctgcgccaagcgcttcacgcagaagagctcgctcaacgtgcacatgcgcactcaccggcccgagcgcgcgccctgccccgcctgcggcaaggtcttctcgcaccgcgcgctgctggagcgccacctggcggcgcaccctgcgccctgatggcgctggggcctggcctcgcccacggtggatccggggcctcccgcacagtcggccacgcccgctgcgggacccgtggttcccgccactagaccacgctccctcctgagcgcaggtcctctctctcccttcaccctttctccataccagggcctaagtccgccttactcctctcctccatgtacttgaaccctccaggtggtgccgggctggggctggggctggttagaccacttctgagaactggactatttcctgcgtaaaccgggcgctcaggcgcttggacccggcccaagatttgactccggttctcaccccgccctctcctggggtggtggtgggggctggggggccgcttgcctgccccagggtcaggctgggcaaggtccctagctctctacccaagctgttactccctcatggggcgcctaaggagactcaagtggacccatcatatatgggggctgggcctcgggactctcgctctaataaaggactgtaggccatggggcctaaaccacgaagctgtgagcacctggatcagtgcgtgccttgccctcatagacaagatgtgagtgtcagggttcagcgtccctgttcttgggtggcatccatgcggcccacaggctgtcctgggcaggaacaggatggtccactttgccatctaggacctctattctgtaggggctaaggtgggctgcatatataaccagcacttggttctcttggatccctcagtcctgtggggagtaggataggcaggccacatctgaggtgggtctccgagagggaggccacgtgaaagccccatcatactcctggttgctgctgtccacgacctttaaggcccctcccatagatcttccagtcaggctctaagggtcttttggacttaagacttcccctccccgaccttgatggacatggctgagcaccttacttgtggggagcccagggggatctttggggccaggttgcactgagggtatataagcccccatatatctgcccttggtgctgggggcaaagttcagggagggctccgatggccgtgttgggggcaggaaacagtgaggggtgggatcctggggctgactgctgggcggttggggacaccacccctactggccagccagtgtcccaggcccctgcatccagcggagagagcagccactctttgcccctctcctcttcagcacaatagtggctcctagcctaggtgccctgccataaggatttggagctggtggagtggggtatggccccaggccataccccagcctgacctgccaggctcctaggccaatggcagctcctctgggttcaccttctgagactgcttcctcaaggtgagaggccagggctttcatgatccaactgtgtgcatcatgggctgacttcagtctcctgaaccccaggactccatcgtcgtcaaagccagaggtggagcagagagtcagagcaagcacatgggtggggggcagagctgggtttgaatccaggcgatgccagtgttcctgtatttactgagcacttgctgtatgcctggcaggagggtacgattcctcggatcatgggacaaggggcttagcctggctgagcccctctcctcagggtttcagtgggtgtcacaggaggacctcccaatgaggtccaccttgctgtcctgttgcttttctgtttggcctgattggagtgttcccaagggcagggatttctgtgctctgagtgtctggtacccagcagggatgggaggggaggcaagggagttagatgccagccctggagggtggatggggcaagcaggacagcaggaaggaggctagtggtgcccaaggggcagagacctgggaacccagaggccagtgatggaaagggttagcgccaggcagagaggggctggacccacacacaagaccaggcagagcaaacaaacgtagaggagaagggctgggggcaaagtcctggggagaggaccagccactgtcagcagtgccagggccaccacccctggggaggagccattgggctactcttgaggggccagaggtgagcctgaacactccacagctgctgctcctagggaggagctggtaccatgggtgtcaggcaacagttggccttgctgctgctgctgctgctcctgctctggggcctggggcagccagtgtggccagtcgctgtggccttgaccctgcgctggctcctgggggatcccacatgttgcgtgctacttgggctggccatgttagcacggccctggctcggcccctgggtgccccatgggctgagcctggcagctgcggccctggcactaaccctcctgccagcacggctgcccccaggactacgctggctgccggctgatgtgatcttcttggccaagatcctccacctgggcctgaagatcaggggatgcttgagccggcagccgcctgacacctttgtagatgccttcgagcggcgagcacgagcgcagcctggcagggcactcttggtgtggacggggcctggggccggctcagtcacctttggtgagctggatgcccgggcctgccaggcggcatgggccctgaaggctgagctgggtgaccctgcgagcctgtgtgccggggagcctactgccctccttgtgctggcttcccaggccgttccagccctgtgtatgtggctggggctggccaagctgggctgcccaacagcctggatcaacccgcatggccgggggatgcccctggcgcactctgtgctgagctctggggcccgggtgctggtggtggacccaggtgagggccttggagccagtggagaatggaagggggcaagggcagggactataggacaggggttctgctgggactggcagaggcccttggtccccacctgcctactttcacaggcaattataatcaagacttatgagcagaaagtagttctcaggtcatcagagtttaattttcccacaatttgaccaaaaatactaatgatgggattctttaccaaacaacatggatgcttttctctactagctgctcctctgcctgcatctgtgggtctcagatcccgcctcgcaacctcaaaggtgagccttgcctctgtttctcctctgacccatctctgcagacctccgggagagcctggaggagatccttcccaagctgcaggctgagaacatccgctgcttctacctcagccatacctcccctacaccaggggtgggggctctgggggctgccctggatgcagcgccctcccacccagtgcctgctgacctgcgtgctgggatcacatggagaagccctgccctcttcatctatacctcggggaccactggtgagggtgcccattagccctagcaccagcctctgaactctcaggctgacctgaccccacacttgacttgtgactcagtgttgacctctgaaaccactttaccctctgattttgacatttgttttttgtttggctgttttttttttcgaggcagagtctcgctctgtcgcctaggctggactgcagtggtgcaatctcggctcactgcaacctccacctcctgggttcaagcaattctcttgcctcagcctcctgagtagctgggattacaggcacacaccactatgcccagctaatttttgtatttttggtagagacagggtttccccaagttagccaggctggtctctaacccctgacctcaggggacctgcccaactcagcctctcaaaatgctgggattacaggcgtgagccactgctcccagacttgattttgatatttggcctgaactctgacccccaatgtaatttgagaggtcaatgccagaattcttcctgtgtccagtaaacagccactgaaacctttgatcttgacatattactttcagtccaaattcagcctgtgaacccaaccacaaatccctatacttgactgttctctgagagcctcaaaccccaatgtaggcctggctgttggagatctatccctctggtcaggcccctctctgtgctgtcatgtcaccaccctgcccttgccatgccttcatcccaaggcctcccgaagccagccatcctcacgcatgagcgggtactgcagatgagcaagatgctgtccttatctggggccacagctgatgatgtggtttacacggtcctgcctctgtaccacgtgatgggacttgtcgttgggatcctcggctgcttagatctcggtaagcccacttctgaggatccctccagtctacaggaccacgggagtaagtgtcggcgtggggctgtcaaggcaaaaagacaccataggttacccagcaccctgtgttctcacttttgagaagggacacccaccaatgactaccagggccgcatggacagaagcctggacacccacacagtccctgatggccatgctttggtcaggaggtgacaagacctgatacgagtgatggtcacaggcatccaaggaaggtgtggtgctcaggagatgatggggatgctggcccagatttgtgacatggccccaagggcagctggagtaggagtgctctcaagcactccacagggctgtctctctggactcttgattcagagtctagatggggacctctccatagcttgttctttttgttttctctcttttttttttattttaatttttatttatttattttttttcgagacagagtcttgctttgtcacccaggctggagtgcagaggcatgatcttggctcactgcaacctctgcctcctgggttcaagcaattctcctgcctcatcctcctgagtaactgggattacaggcgcccaccaccacgcccggctaatttttgtagttttagtagagacgggatttcaccatcttggccaggctggtcttgaactcctgacctcgtgatccacctgccttggcctcccaaagtgctgagattacaggtgtgagccaccgcacctggctattttctctctctctctctttttttttttgagacagagtctcgctctgtcgcccaggctggagtgcggtggcatgatctcggctcactgcaagctccgccttccaggttcaagcgattttcctgcctcagcctcctgagtagctgggattacaggcacgcaccaccacgcccagctaatttttgtatttttactagagactaggtttcaccatgttggtcaggctggtctcaaactcctgaccttgtgatctgcccacatttgcgggcatttgcctcccaaagcgctgggattacaggtgtgacccaccacgcccggcctttttgtgttttccagctattatcatggccatgtgtggttgctcatgcctataatccctgcactttgggtgccaaggcaggaggatcacttgagtccaggagttcaacaccagcgtgggcaacatagtaagaggccatctgttaaaaaaaaattttaaaaagccacgcatggtggtatcgggggaacctgcccctaatatttcaatgtaggttctttttttttttttttttgagatggagtctcgctctgtcgcccaggctggagtgcagtggtgcgatctcagctcactgcaagctctgcctcctgggttcatgccattctcctgcctcagcctccccagtagctgggactacaggcgcctgccaccacgcccggctaattttttgtatttttagtagagatggggtttcacatttagccaggatggtctcaatctcctgacctcatgatcctcccacctcggcctcccaaagtgctgggattacaggcgtgagccactgtgcccggcctcgatgtaggttctttctattttccgtaagtgctggccagctgagaaataaagagaaagagtacaaagagaggaatttgacagctgggcctccgggggtgacatcacatatcggtaggaccatgatgcccacctgagctcaaagccagcaagttttattaaggatttcagaagggaagggggtgtaagaacagagaataggtacaaagatcacatgcttcaaagggcaaaaaacggaactactgatcagggtccaacaaagatcacaaggcaaagggcaaaagcagaactgataagggtctatgttcagtggtgcacatattgtcttgataaacatcttaaacaacagaaaacagggttcaagagcagagaactggtctgacctcaaatttaccagggcggggtttttccccaccctagtaagcctgagggtactgcaggagaccagggtgcatctcagtccttatctcaactgcataggacagacattcccagagcggccatttatagacctccccccaggaatgaattcctttcccagggtcttaatgttaatattccttgctaggaaaataatttagcaatatctctcctacttgcacgtccacttataggctctctgcaagaagaaaaatatggctctttttgcccagccccgcaggcagtcagaccttagggttgtcttcccttgttccctaaaatcactctcattctgttctttttcaatgtgcgctgatttcacatt

SEQ ID NO: 96344 - DNA, 12330 bp, Homo sapiens
agccatgtgtggcttccattgagtggctcatccgccatgtccatggctgcttttcagtcttaggctagttccagccagcccagagatcttattctcaccttaatggaccctggaggccaaggatccagtgtgacatctggaaggaaaagaggaagattggcccgtcggtcacaggctgtttaaactctcaccaaatttacacatttctggcttagcctctcagacatactcttaaattgaaaaatgtattatctttccacatcaacattaagctctagagttcctcatcagtgtgcagactttttgagttgtttttccaatagtagggaagggtttgggttcagccatcatctgctgacgcacatgtcggggagggctgtggcttmaaaaagcacatactttgacccctaagaagttgactgatctaaactgcagaaaggcagagcttggagaagttcagcgcctgacctcagaagggtctgacactgacattcctggcctcttccctaccaggaaatctatgctgacttgctgactgccttggagtctttccattctgaaaatgccatagtggaaaaaacccagactctagaggcagaacaaaccgggttccactgctgagcccgtgtgaccacatgcctggtccttaatggttctgactcttatttcttcacatgggggcgtcatgaaggttaaatgatggaatatatgtgaaaatgcctagccttgcgttgggctcataatgggaacctcgtaagttgtttccccccatgttttcctctaccatctcattatctctgatttattgaaatctacctacgtggtgaaacaatttatagtcttcagtattaaaaataaaagtctggtttgctttcatttttgaaatgtaggcttcagtttattttttgtttttcttctatttttgttttccaatacctaatgcttgacttcctcaagagctctttcccaaagtccctaaggggatgctgctcccaagtgctgtaacactccagagaatttgcctgccattttctaattacggacaaaaacgggaagcaggtgtgggacacaagctctttcacagaagtaagcagaaggcttccagtactgatataattcattcacactcacgagtcccttgatctccccaactgtcctaggtggtagggataattacccccattttagagatgtggaaactgaggcttaagagagtttaaggagctcaccccattctcttgcacataattggtggagctgggatgtgaacacaggccacctggccccaagtcttttgcacgtctcaaggcatcccctctgctcctcagtggcctagagaccgaacggctgataactgggctttggtttgaagcaactgactcctgtgttacttccttgctgagaaaataattggagcactaytggcttggcttaagatctaaaacaatagttcatcccataattaaatgattgatatacagccattcaaaaaatatcacgggggttgggggcctggagaggaggcttctttgtgctgacagcagggatgtagaaatgaacaaacttggccagtgccctctaggaggtgataatttaaaaggggagataggaaaggaagccagctcatatagggtgggcattgcacgagagataaatgaaggacttaagaatgccttcctttcctgggggactcagaggaggcttccaaagagaagtgtttgagctgggtcttgggtatatgaagagtgaagcaggaggacagcaaagaggccaatctaggaagaggcgagatgttcaaagggtggtgtgttcagcagagtgggactaattcacctggctgacacatttcccctgagctaggtccttttcctggtgcctgggtgtagatggaagattacttcttaatccttggaaagactgcagatcagttaaaggagacttggccagcaacaagtacttgaggatccttgctcacctttgcttctgattgattctgaactgccaggtgcattgctcgttccttctgtgctcatttccctaccacacaactgtctgtgaagtgagatctgggctttgtggctgaccattttgtgaagtatttgaggcacctggaatttcatgtctgcattgcgtaaaaaagcatagactggcagcaattaaaacagaagctgtacagaaactgtggttagtatccctggattaacttggrtagtttcgttatcacttctaaccatctggtcagttggtttaattctacagagccagaatcctattcaagctgcctgcaatcagagtgtaccttatcatggggatttccaggggcccatctatataacatgaatggtcacactccaatgtctgagtaacacggaatccccctgggttggcagagcccctgtctaagagcttttgggctaggaacgatgatggtgcagggagtatgagagagggttgagtgttgctttccagccctaactcggtcattttaactggagtttgagtcaacaggacagaattgcttaatggtagcaacagacagggttcagagtcttggtgaaggtggtggaggtgggaggctggggagccggctgagagtgggaaggctcctctaagcaagaaatgagcttaaatcatggggagtcttatttaacaaagaagtcagccgcttaaggtcttccagagacttctgtttcatttttgtttcagagaaagaatattccaatgccaggcagacaattctagatgaattgtggttaaattaaatgtacaaggaagtttcgttttctgcattctttgtttttccagcccaagaattgttagatgctggaaatggctagtggttggtttcctctgaaccatgtccaggctctgtagagaggagggtgagaatggtcttacgcacctgccccccccgccccccttttacataggggctgtgattaccagcccaagaaatgagtgttgggatggcgacccgacatcaggggaggtcctaaatcctactcagcttcagtttctcctctccccatcatgtttcccgcattcacttcccaccccccacctccctcagggcctgcagaacccggcttggtctctgtgcggctagagcgagagcccccactggcagggtgacaaaagcccctgagggccaccgcggcgcgtgagcgcctgggaaaagccggggcggtgctggcctacggggttgagaaatggaggggcgagtgtcaggaccgcggagccggttgctcccggctggcacagaaagtcctcctcctggccatccaactcgctgatcctcagagcaagggtttcccaaagaactctgtgccatttccaggaagacgaggcaagagcggagattgtggcgccagcacgcccagtatcgaaacgcacagcaggggtgccgggtgtggggggggggcgctgaggacagagacatcggggcgcagaagacagtcgcttgggggacttggccagcggcttttgggcacggcctatgcagtggttttttctctccaaacctagacaaactgtcctttctgtcccgaggtgggggacggggacggatcctagatcgttcagcgtctagggagagaagcccctctttctccgctctgcgcccgccgcctgcctctggcaggctcggatctccgggtgcgctcccgcaggagccccagctggcatctcacggcctcgctcccctcgcgccaggtctcttttgtagggggctgggagagaagttgtcacccgtcgcagctacctgaaatctcgggctaaagggcacacgccacgcacacgggcatgaggctgcgaggacacgtccgttccagcacactctacccacagcccccttactcaggcaagggtacccgttgtcgttcattcctactacaatcaccccaaaaggcacaagagcggagaatcacgcaccgggacctaagctcaggcactcggatgggcacaccaccatcagcgcagatgcacacaggtgcccaagtgcgcttctcgctccctccatctctcttatcacacacacacacacacacacacacacacacacacacacacccctcacctttgcttttccgctgcaatccgctagctccggtctccgacacccagcggctgtccccgagccagctgggcgccggggcgcgcagcagcttggctagcgcctggcgccggacgtttggggttcctggctcctcgaccctcttgtgccggctcccgctagcccctcgcacgtagagagctcccctcgcccgcagacccccggcgccaagcctcagactggggctctgggcgctggtggtcttgcgagcgcgcgcgcatgggtggctgcgccgctgggactggcccagccagcccgggcacctcggcacatttccccacgcccccctcccgctacgtcacagcggcttcgctccgcccccccaacccctcctcccgggtcctgcagaaggacaggggtgagaccggctgaaacgcctgcgggtggccgcaggcagagcttacagacagccggggagcggggagagaggggacccgcctgcgggggcgtaaaaggttaagcgttttcggtctcctcaagactcatggcaaggacaagcgctattttccctctgatttcacagagtcgattcccttccacccatatattctaggcagctggagtggcggccggggtgacccagacttataccgggacctctgtgatttccttagccaaacaagttagcaaagctgtgtttaccgtgggccagccccgggcgcagggcgcagggccaggctaagagtagggagaaaaagggctcaggggatagcgcttctccatgcagttcccaatgagcgcagggagtgtaaacccgcacctggagtccaagattcagtcctaggagccatcagagggccagtggacgtcgactggtcccagctgtccctgcgtcccacagcttggaggtgcagcggccatacaggtggtccccttgctgtagccacgtcagtcagcacctgctggtctgacccagcacagtctctcctacatgctgtgagggagcaaaggggagcaggcaagaagtgggagtcgcatggagttgcagctgtttatttttgactgtgatgattcagcctcttttccaatagtttaataagtcataatcaatcctgcagcctccccttcctcaccctcctccaagtacataggtatacacacacacacacacacacacacacacacacacaccatcctcagtacagttttagaggatgtgaaaacagaaagcaaaccccaactagctttctctgtgagctgagctgccttgatttgtccatcctattatctgatttccaattcaccagggaaaagtaaaagtccagaagctgtgtggcaggtggggtgagccttagagatagatgagtgacatggaaaagcaaccaccaggtacagcagcagccagctctctcttctatctgggccaagctgtatcttggggtacccactgtgagatggggatcaggagtttccatctctctctgagacgttggtcatgatagggcttaaatcttggcatcctggagctcagggtgagatggaaattgagctgcaattgccttaagttccaggagtcaatctgggagccagcatctcttttagacatgtgtatgcaagtggaagggctggggtggstagctcactggaagagggctgtgtctgctcaccgtcagtgggaagagggagaggcagagaggtaatagtaatatcaggagggcatcgtggaattgtgctcaggggaactcggcatcctctggccacacagttgctacaatgcctgttgccacctccagtttaaaaccagtaatctgactggtttccaggaaaagaaggaagagccaggaagtgcccactctgccctcaaattcctttcctaaaagttctcaaactgttaataccagatttacgtttcattaaaaaaaataataactggagccagcagagtccgagatgatgctgctgttctaccctggctgcagggatgggctgatcgtggaggagggacagcgctgccgctgccactccctcgcctgcaacacgtgcctctgtgtgcacttcacccacaaggtaacaaattggaagtactcaaagctgaaagaagtggatgatgggcttgggggagcagctgcctgggaggatgttgactctactgcagagccatgtcctcaatgagaacctccttgtgcttactacatgtagcttcagacccactctgcagatgagccgaagaccaccttctaccagtgctgcaggactcagtgtggacaccactggagggattagggcaaggacggcccaggtgcctgagcgtctgcttacctccgggtagatgctcagctgggaatatgaatcgtgtgtcctgagggtctttgctggtgtggtggaaagctaacccttttaaggtgaagagacagggtgtcaggaaatgtggcctatctgccagtccgaatggatgaagtcattgatgtccagggagtttttctgtgtggggaggggacccataactaagtatgctctgtttgaagtcctgttctttcttccttccttccttccttcctttctttctttctttccttctttctttctttcttttttgagacggagtctcgctctgtcgcccaggctggagtgcagtggcacgatcttggctcactgcaagccccacctcccgggttcacaccgttctcctgcctcagcctcccgagtagctggggctacaggcacgtgccaccatgcctggctaattttttgtagttttagtagagatgcggtttcactgtgttacccagtatgatcttgatctcctgacctcgtgattcacccacctcggcctcccaaagtgctgggattacaggtgtgagccaccgtgcctgacctcttttttttttttttttttttttttttgagatggagtttcgctcttgttgcccaggctggagtgcagtggtgcgatcttggcccactgcaacctccacctcccaggttcaagcgattcttgtacctcagcgtcccgaggagctgggattacaggtgtgcgccaccatgccctgctaagttttgtatttttagtagagacggggtttcactatgttgcccaggctagtctcaaactcctgacctcaagtgatccacccgcctcgggctcccaaagtgctgggattacaggcatgagccaccacgcctggcctaatttttattttttttgagacggagtctcactctgttgtccaaggtggagtgcagtggcrtgatgtcagctcacagcaacctctgcctcccaggctcaagtgattctgctgcctcagcctcctgcgtagctgggactccgggcggttgccaccatgcctggctaatttttgtaattttagtagagacagggtttcaccatgttggccaggccggtcttgaactactgacttcaggtaatcgcccacctcagcctcctgaataggctgaataatcccaaaatgctgggattacaggtgtgagccaccacatgtagccctgtatgctctttaatgtggatgaccaaataaagcaacattccccttcatgcactttccttgtcgagccttcccctccttatcacatagggcagacccagcctggaaaaagtactgatgcacccacgttaggcacacctgtcttactgcagctggctgagtgggctctgaacaacatggaccttgacagcagaaatgtgtcatctaggatgattgttgattttgtccagaaaatgaatgcctcctctcttctcccctccccacctttgaaggcctccaaagagcagtttgggctgccagcagcactcaggggccaacctcgagttcctattccacctttggctcccccaggctattttgactctgccctccatctgctgaatgaagtctgagctgtaatccacatggggctacctcttcttcctctgcagcttggctagtaactaagtaacaaaaccttgagccagaaaaatagaggggttggggaggagataaccttctaactggcttgtttgatatctttaaagcaattaaatagcacccttccctctgtcagcagttatcagagagacaataggtggcaggaaattaagaaaaggaggaggacaaagggccaggccagtgtccagccccttccatggggaggggctgctcggttcactcttgccaagaggagttcatagtctaggagctccacagggaagacacaactcccaaataggtcattatgtctctgagtggcttaataaattaaatgggggaaattgttagtctgcaatcaatttggtgaaagtaagtattgcaattaagcctggaggaaagcaagagagccctgaggggaggattggatgtgtttgagagtgttagataccagtctgagcatccaatgtggtttttatcatctttacgggaatgccagggtgaggtctgccatttctattgatgagaaaagagcaatgcttctgccgtggagaacatcagatatccggtggtttgagggggcgggggagaagatactcggcatggtgatcgtagtaccttggcttcctgggacactcctgtttttagctgttatttcccttgtcccccacaaaccatccgcattttacgaaaatggaaatgtcagcatgtaaaagcctttctgataccatgggtcctgatgtttagtttggaaaatatagagtacagtcaccatatcactgtttaaaaacttgagggctgggcacagtggctcatgcctgtaatcccagcattttggaaggctgaggaaggaggatcacttgagcccaggagtttgagaccatcctgggcaatatagtgagacctcatctctacaaaaaaaaaaaaaaaaaaaaaattagccaagcatggtggtgcacacctgtagttccagctacttgaggggctgagatgggaggatctcgtgagctcgagaggtggaggttgtagtgagccaagatcatgccactacactcccgcctgggtgatagagcaagaccctgtttcaaaaaaaaaaaaaaaaaaaaggaggttgggggggcatttggcatagtcgatttaatagtctcttcaaatacacaaagaattcaaatgaggacctttcttcctctctctgtcccctagccctcaacagctatgagtctggcatggcgtgtcaccatttttctctattagcaacctcgaccctcagggaatacattggccaagtgagtgagtaggcattagaagctctttggaaaccacccccaaacaagtctagaatcaggaatcgtggttagaagacactgtgctctagataggattccctttttttcttctcatccccattttggccgaaatgcatatagacataaaatcctggagccagaagggtccttagacattctcaggtttatagcctacatcccatcattatccaagtaaagataccaggctcagagaggacaggtgacttgaccaaggccacccagcaagggagtggcaaagtcaagagtcaaatcagctcttctgaatcgcggactcatgccccttccacagggaccccactcgcacggggtatgaaagctggaggagagaggagtccccagctcccccaccgtctgtcccagcacttctctggcaccagtacattcttcctgataaccacatctctgctgctcttgcctggtccggctcctctttttcagtgccatggtgacagagttggaaaatttgaggctgtctcctgctgtgactttttccagagtgtgcttcctggaccactaattctcagagcaagatgctacgtagaaaaatcggctgggcatggtgactaacgcctgtaatcccactactttgggaggccaaggcaggtggatcccttgagcccaggaatttgagaccagcttgaccaacatggtgagacccctgtctctaccaaaaatacaaaaaatagccgggcatggtggtgtgcacctgtaattccagctacttgggtggctgaggcacgagaatcacttgaacctgggaggcggaggttgcagtgtgctgatatcacaccactgcactccagcctgggcaacagagtgagactctgtctctcgagaaaaaaaaaaaaagaaaaagagcacaggcaactctgggaaatggtgcacagctgcacattcaccattcaccccatgtcctgcagattcacattcatatatatatcatatgtctctctctctcattcatatatatatatgtctctctctctcacattcatatatatatatatatatatatatagagagagagagagagagagagagagaagagagagaagagagagatagggtctcactgtgtctcccaggctggagtgcagtgacgttatcttggctcactgcagcctcgacctcctgggctcaagccattcttccatctcagcctcccaagtcactgggactacgcctggctaatttttgtatttttaatagagatagggttttgccatgttgcccaggctggtctcgaattcctgagctcaagtgatccgctggcctcagcctcccaaagtgctgggattacaggtgagagccactgygcccggcctcacatacttattataatgtccattacgtgcagggtgcactgagtgtttcacacaccttttatctcatttaattctctcaacctttgtggcacatgcctttatcagtagtaacattggtattttgagaaatcttgcaggaaagacagctgttgatctttaacccagtgtttcccaacttatttagccatggattccctatgagtaattttccctgtatttccctgagtaattttcaacacctattctgtgcttactgtgtgccaagcactgtgctagatgctttctgttaactcatttaatcctcactgtaatcctatgaaataccatcagcattattaatcctcctttttgtgaatgaagcaaggcacagagaggttaagtaccctgcccaaggtcacacagctagcagtgacagtttaactaccaaatcctgaacataattatgcagagcaagaatccattggcaaatgggactcccaccttccttaatcgttcttagaggctgattacaatactagagacaatcccttcccctgatcgatagccacaattgtttgttgtgttgttgtttgagacagtctcattctgttgcctaggctgaagttcagtggcttgatcactgctcactgcagccttgacctcctgtgctcaagcaatcctctcacctcagcctgccgaggagctgggactacaggcatgcaccagcaggcctggtgaatttttgaattattattattattattttttgtagagacagggtctcgctatgttgcccaggatggtcttgaactcatgggctcacgtgatcccccccattcccacctcgaacctccaaagtgctgggatgacaggtatgagccaccacgccgggcccacaattgttttaagcccttctccaggcagttactttcccatcctaagaacgtctttgtggatgagttctggattgtttccaagttctctgaggctctgacaatcatccaggcctcctagaagaattttttcctctcccttccagaatgacccaagtgacagaagtgcctggtgctttcctgctgtgtgactccctccacccccaccctccaccaaatgctgaattgcctgattagcctaatcagaagagcagcctcttccccaaaagaggagctgctgctggggggtgggagggatttatagactcacagcggcagaacgcccctctgagagcacctgtcagggctttgagacaaggctgctacatgggaaaatcacctggggaattttaaaactaagggtgccctggctccgtccttagctattctcatttaatttttggcatggggcccaggtaattttttcaagctccccagttgattttcatgtgagctagagccgagaacctctgagagttaaactgtctcgattctgatgtggagaaactttagatcaggaagggagaaagactgtcctgggtgaagccacaagcaactcaggagctctcctcccccagggaggagactgtggactcacactgcactccatcaccctgggaaccctgttatctgggcagagggcattctgagcagggtttgtgcagccgtggggcctggaagtctctgttccatgagcagatggaaccagagttttctctctcataaggaaaatccccttcaactacctctcctctcctagtgagatagcagggtagacacctcacctcactt

SEQ ID NO: 96345 - DNA, 65992 bp, Homo sapiens
agcatttccgggttcacctttcctgttcccgccacccggaccaacgcgcatgcccactagggcgtgtcacactcagaagcacgaaactcaacctatcccgcccctaccccgcccactcctcacccagcatccataaaagcgctctgcacctttggcacagcgcgacttccctggccctccccctgcggaccagtgaacctcgcccgagagctcagtaaagatttttgccctctttgtctcgcccctcagccttattgatccacagtgcccttccattgcctttcactatcaacaaaacaaccttcaattttcttgtagtttctgcaaacaatttacataatgttcttgatgacaataaaaatattgtgcatattgaaaaaaaagaagggatgttaacaatcaccagatattgaggaagtgtctaacagatcaataaaactgataaaacaatcagtacagtgcaaaagggtaaaaataaaaaattttaagatgtgtaggtttcaaaaaaaaaaattcaccttccatgacccttctctgaaatctatctataatctactgtaaaccaagagacaggaaatagccaatgcagaacagagaaaggaaattctcaagctaatggtgatgggacactccagggccaccctgtgtagcagctgcatataacaaccagtcaggagtggagcaggagaaagaacaaagaaagtgaatctaatagataactaacgtgtgaacattctgaatggagttttatgctcctagaggcaaacaacataaagaccactgtagaaccaatcaagtaaccaaacaaaaatgattaactctggggaaaacaaaagtatccaataaagaaaatatagcctcataacattggcccaactaatgaataatactaatgaagtcataaaaatataaccactaaattatctaaggacacattatcctatatctgaactctgccagaagaaagggcagagcaaggttgctgcatgagctggggtcctgttaggggcacccagggatcggcaccacagcccaaggtctgcaccaggctgctgcacttgctggaggaagagtaccttcccctaatccacacaaaggcatgacaggagctattccaggcctgggcacagtgagtgtagatgtgttttcagagagccagtctcaaatcgcctacaattaatggatatacagtcgcgtgccatttaacatctcaattgacaaaatggaccacatatacaacagtggtcctataagagtaaaatactgtatttttactgtactttttttttttttttttaagacagggtctggctctgttgcccaggatggagcacagtggcacaatcttgtttcactgcaacctccacctcccaggctcaagccatcttcccacctcatcctcccaagtagctgggactataggcctatattaccacacccacctaattttttggattctttggtagagaaggggttttgtcatgttgcccaggctggtctcaaattcctgggctcaagtgacctgcccacctcagcctcccaaagtgctgagattgcaggcatgagccatcatgcctggccctattgtaccttctctatacttaaatatatttagatacacaaataccattttactacaactgcctagagtattcagtagagtaacatgctgtatagtttgtgacctaggagcaataggctataccatatagtctaggtgcgtaccaggttataggtacacactacacatctaggtctgtgtaagtccactctatgatgtttgcatgacaatggaattgcctaacacatttctcagaacgtatctacgtcattaagtgacgcatgactgtaaggaaacctggggaaaaaaaagtcaagaagaaaataaagaacaacataagcaagtttcttaacaaaaaaaaaaaaaaggtaggtcaggtatgggggctcacgcctgtgatcccagcactttgggaggccgaggcgggcagatcaccagaggtcaggagtttgagaccagcctgaccaacatggtgaaaccccatctctagcagcctagtttaggaagctgcttgatgcccacagggctatactgccccagagaaggagcccacatatagcaccatctagaaagccaagccatagctgagtatattctgttccatgaactagtggtcactgcctccttccatcccaggggctaccctgtcattacaacagccttctccaggaaagcagctactgctgtctatatcctagaaacaaactctcaaagaggtttgccttccacatcctagtgactgcaacactctaactgtggaccgattactgatttattgtgccatcagtgcgctcaccaactggccctggtgtttctaggtgatccccatctcaaacctgcagaccagccccagtaatccacagctaggcgagtgtttccaggggagtcccatctcaaactggtgtaccaacccctgtgactcagtaacacagtcactagataggcatgcagcttcctgacaccgccgccttctcccccagcccccagtcctgagcagaaaaacaaactgcacatgctcctacagcctaggtcaccaagacactcacaggtatcaccaaaatggatactagcaaaagaaaaaaaaaaaaaacaggcaagagaaaagcacagatattacactactgtgtcctcctagaactaaagcagatgcagcccatccaactgacaccctaagacacatctccaggtgaaaatctttctctacataagccactctatacaattagaacaggtgaccgtgtcaacagtctcataaatataaacataggagataaaaagcatgaaaatgcaatgaaacttgacaccaccaaagttgcacaataattcttcacaaagttaccctaaataaatggaaattttcaaattgccttaaaaggaatttgaaatattgatcttaagaaaattcaatgagatacaaaagaatacagagagaaaacttaatcgaataataaaaaaaaacaagccatagcctgaatgagaaattcaacaaagacatagataccattaaagaaaacaaacaggccaggcgtggtggctcacacctgtaatcccagcactttggaaggccgaggtgggcggatcacgaggtcaggagatctagaccatcctggctaacaggatgaaaccctgtctctactaaaaatacaaacaattagccgggcgtggtggcgggtgcctgtagtcccagctactccggaggctgaggcaggagaatggcgtgaacctgggaggcggagcttgcagtgagccgagatcgtgccactgcactccagcctgggcgacagagcaagactccgtctcaaaaaaaaaaaaaaaaaaaaagagaaaagaaaaaagaaaacaaaccaacagaaaccttaggaatgaagaattgaatgaattaaattaaaaagtaccactgacagcttcaatggcacactagatcaaacaaaagaatttctgaacttgcagacaggacttctgaaataacccagactgagggaaaaaaggagaaaaaaagagtaaaaagaatcaaagaaagtctatgagacttgtgccatgatactaagataacagattttgaaaatatagaagagaaacagagaaaagagacaaagacacagaaaacttatttaacaaaacaatagctgaaaatctcccaattcttgggagagatacggacatccagttccgtgaagcttaaagggacatattcaacccaaaaaggccttttctaaggcacattataatcaatttgtcaaaagtcaaacacaaagaaaaacttctaaaattagcaagaaagaagcatcagatcacaaataagcaagtctccattagactatcagttttcacagcagaaaccttgaaggctaggaaagatgaggatgatatattcaaagtgctaatgagaaatcagtcagcaaagagtactgtactgagcacagctacccatcagaaattaaagaaataaagtctttcccagacaagcaaatgcttatggaattcatcaccataagaccagcctgacaagaaatgcttaacaagtgcttcaatcgcaagtgaaagaatactaatgcaaaaacaggacactatccacctaactgttaaaagtaaattcatattcaaactgagaattctacattactgaaattaatgctttagaatctttcaaatcacccttgagaaagctgaacatcaaaatagtcaaaaatatttatatctacaatgagttattaataaacacccaatacagaacaatataaattaaggcaaaaaagtacaaattttgtgcactgacaagggatgtgggggtagtatagcaggttcgtgtgtgatcaaaatttttatcagctttaaatagtctatcataactatacatttttaaatgtaagctccagagtaaccagagaaaaaaattacaccagatatgtcaatgaaataaaggaatcaaagcttatcagtacagaaactcaccaaaccataaagcaaacaataaaaaaagaaacaaaagatctacaaaacaaccagaaaacaattaacaaaatgacagaagttaacttcttaccttttaataatatctttgaatatagatagttttgattctccaataacaagatgtagagtggccaaatggtttttcatacatgtttccctagtccagacacccaagagtatgtccctctcttgggcataagaaaacctagagttatatttagggcatcatgtgtggtgaatagttgaccgagctggcatgctcacaatgaccaaattatgtttgtcatattttaatccaatatattgatctactatgaactcgtaaataatgtatttgctttctagacacattccaggaagaccagagaaactgacttttatccatatggaataatccactggcaaatttcttttaggacagaccaaagctgatctagaacataatctttacatacgtggatccttcccatcagacgagaaagaacatctggggtgaaaggctccattagaagagcaatgtgggatggtgctgtgctgacaactggtagttcctgccctacatctttgtagaagactggagcccagagcatgccatggtcaacttctatgctgaagtgaagacctccttcgaggtgtgcacgtgcttattacagatatgccacggtgctaagtaccccagaactacaggaaaaaataagaatagatgctgtatccatgatcatgaggcacacaggccagaacgccagctgtggaatcgcacagcccaggttcaaagcctggctgggccatgaccacctgaatgacctgaggaatggtctcaggcaaatttgtaaaaagcggagaccctgcctgccagggaggcatgtggtaagaggcgcatccagtcaggtcagggcaccgcgtcctctctttggaaacctgcgaagcaaggctggtggcccttgaggccacggcagccatggagaaggcgggccttgctccaggcggcacagaggcactggaaaggccccgggggagcctggcaggatctggctggtcctgtgctctgcttccaggttctggccctgtaacccgggggacagggccgtccaagacagggccactgggtgccagccagcacctgggccaggcgccatggctctggcggatcagccccgcacccccaacagccccacaggggggcccatccagggccacacacctgcccccaggagcaggacgtccctgaggctagagtccagggggactggtggaagggtctcaccctttgccctttgactcctcttgtaggcaccctcgctgggctcctaagcactccttcacaccctggctctgtcaccagccccatagtgatgtcataaactcccagatgcccagtgtgcacccggccacagagaagtgggtgacttcggagtatcctctccgcttctgacccttagtttcgtctgtgcacaactcgctcaaaatgggcaactcactaagcatattttgttcctggttccaccgcaggtcctggccacgccaccggcaacctgctcgtcttgtccgtgaggccttcccagctggccgggctcaccccgcggctcctgcacctgtgcctgccccgggaatctggggccgtttcccactcctcttcaaccgtcagcgacatcttgggccttcttttccagtcaggtgggatggcgcccctgtgaggctgtgtcttatccctcggaacacrggcaccccacagagggtcctgcctcctgtggtctggagcccccccctcaaggaagaaacccgtgctgtctgctcgcaactccaggatgtttggacacctcagccccgtgaggatctcttgtctcagaggcaagtttaaccttcaacttccttcattagatgagcaggtgatcccagccaggctcccgaagatggaggtgagggcagaagagcccaaagaagcaacggaggtgaaagaccaggtagagacccaggggcaggaggacaataaaaggggcccctgtagcaatggggaagcagcttccacctctaggcccctggagactcagggaaacctcacttcctcctggtacaatcccaggcccttggagggaaatgtccacctcaagagcttgacagaaaacaaccagactgacaaggcccaggtgcatgcagtgagtttctactccaagggccatggagtcgccagttcacacagccctgttggaggcatccttccctttgggaagcctgacccacttccaacagtgctccctgccccagttccgggctgctccctgtggccagagaaggcggccttgaaggtgctgggtaaagaccacctgcccagctctccaggcttgctgatggtgggggaggacatgcagcccaaggatcctgcagctcttggatcaagtaggtcttctccacccagagctgccggccacaggtcccgcaaaagaaaactgtcgrggccaccgctgcagctgcaaccgacccctcccctgcaactgaggtgggagagagatgaggggcccccaccggctaagcttccatgtctatctcctgaggcactgttggtgggtcaggcttcccaaagagaaggacgcctccagcagggcaacatgcgtaagaacatgaggttgttaagtagaacatcaaaattcaggagactaagagagctgcttaggaggagaaagaagagacagcagggcaggcgtggtggcccacgcctgtaatccagcactttgggaggcccaggcgggtggatcaggaggtcaagagattgagacctgaggagcatctctgcctgyaccatctgggaagtgaggagcgcctctgcccggctgctccaccatctgggaagtgaggagcgcctctgcccagccgccccaccatctgggaagtgaggagcgcctctgcctggccaccgcaccgtctgggcagtgaggagcgcctctgccaggcccccaccctctctgggaagtgacgagtgcctctgcctggccgcctcacagcccgggaagtgaggagtgcctctgcccagccgccgccctgtctgggaagtaaggagcgcctctgccttgccgccgtcctgtctgcgaagtgaggagtgcctctgcccggcctcctcaccgtctgggaaatgaggagcgcctctgccttgccgccgtcctgtctgcgaagtgaggagtgcctctgcccggcctcctcaccatctgggaaatgagaagcacctctgcctggccgccgtcccatctgggaagtgaggagcacttctgcccagccgccaccctgtctggmaagtgaggagcacctctgcccggccccctcaccgtttgtaagggaggagcgcctctgcccagcccctgcaccgtctgggaagtgaggagcgcctctgcccggccccctcaccatctgggaagtgaggagcgtctctgcccgctgctgtgcaaccttccaagtgtgaagtgacagccttgtgtgtgatctttctgccctccccaagtctgcattttcgacattaaagtttactttttaattaaaaaaaaggagattgagatcattctggccaacatggtgaaactccgtctctactgaaaatacaaaaattaggcaggcatggtggcttgtgcctgtagtctcagctactcgagaggctgaggcaggagaatggcttgaacccaggaagtggaggttgcagtgagccgagatcgcaccactgcactccagcctggtgacaaagcaagactccgtctcaaaaaaaaaaaaaaaaaaaagtaagacatggcaaactgcagtggcacccagcctgcccctgctgtctccacacctgctgagactccctgcccctggccacctacacttcacggatcccagctcctcgtcttactctgactcggcccacgtgctgttgggcccctcattttgcctgtccctccaccttctctcacaccaagaattgagtaaaatttgatatccataattcctaactcttccctggctcttcccactgaccttgcccccattttgggggttccacctaatgagaaaggaggctgctctcattcagctgcagtttcagtgcctctgacctctgacccatgccccacacatcctagccccacatctttctccttccagcctcccttcagaagggagcctcctacacccatatgtgtgcattcctctcctcctctttcctcccctcctcctcttccagcaactttactatagaaaacaaaagacccaagtatgcaagcaatatataccatgtaaatgggtagtgagattaagtatcagcaagataccaagcctcctaaattaatccataaattcaacacacttctaataaaaaacccaaatgcatttttttggttaaatatgatcacctaaacctaaactcacagtgaagaagggtcaagaatagtctagacaattttgaagaacacggagatagaaaaacattctaatcaacgtttattataaagctgtggtatacatgaatgagtctctggtataaggagatacgaatatatccaatgaataaaaataaaagccagaaatagaccctttagaagggaatctggcttaccaaagaagggaaatttccaagcagtaggtaaatactggattattcaactaataatgctgagacaactgaccatcatatggaaaacaatcaaattagatctttagggtaggaaacgattccctaagacttcaaaagaccaaactataaaagattggtaaatttgggccaggtgcggcggctcacgcctgtaatcccagcactttgggaggccgaggccggcggatcacaaagtcaggaaatcgagaccatcctggctaacacagtgaaactccatctctactaaaaatacaaaaaattagccgggcatggcagcatgcgcctgtagtcccagctcctcgggaggctgaggcaggataatggcgtgaacccgggaggcgaagcttgcagtgagccgagattgcgccactacactccagactgggcgacagagcgagactctgtctcaaaaaaaaaagattggtaggtttgatttcagaatatataaaagttttataagactgaagagatctacagaagtaaagaatagaagctcctgtttgatcagatcagaatcagaacaatamtactcaggaaaatatcttgtatcacattttaaaataaaccaagtatttttatggcaacaggcatatatggtaaaattataaatataggcaaagaaaacacaatcaccaacttcaagacagtagttatccgtatgagaggcaagagtaagtgatggatgtgaaggaatttcttaagatgcatttgtaatattgtatttacctgtaaaagtaagtttgaattaaaaatagcaaaatgttaacaccaattaattctgggtggtaggtatataggtgtctgatatctatatctatatctgataactttctatattcttactgtatttcttaattaatgaaaatacatacaatatagcaaagatagccaagagaatgaaaagtaaaaaatagatgagacactggaagcaaggaggaaagaggcataagtgagcggaagctccataattcatattgtggggatcaacaggtgttgtctgtagttgatgaatcaacaaatggtagttaagcatactatacagtatctagaattatgagggtaacgtgcgacaaatttaaaatcagaaaataaccagatgggtaaaaagcagaagtctgttgcttttcattttaagtgttcgaccattggaaatattaacatgtgtgcattcttggaaaaaagggcaaacattaatgcttaaattggagattttaaaaaatgcctgtatcatccctagaataaattttttaaaatcaggagctaaagctgttactccctgggaacttcaaaatgttttgtttcagataaaaaaaggactactacatataaagcactatagactgcaggttactacaagaagccaaatacaagtacttcaggtagcaaaatcaatttaccctgaaacgatgttgtagttgagagcaggatggtcttttgggacaggaggaacaagaggttctggttgccactcttcaatcagttcttctttttcctacaggagaaaaagaattaaaatacagtgcagtgctaatattatcaattattagtgtctctgcaacttcagtatttcttattattctaattctactaactattctcaagttcgctgtcactcttattcaagcttatgtcttcacactattagtacgtctttgttcgcataatacataatgacccaccagacacatgcctaccatagagttgtacctagcccttgaccactaacaggagctctctcggctctcctaataacatctggcctaaccataggatttcactttaattctaccactcttttaactttaggcctactaaccaacacactgactatatatcaatgatgacgtgatattgtcygagaaagtacattccaaggccaccacacagcaattgtccaaaaaggcctccgatacaggatgctcctattatctcagaagtatccttcttcgccggttttttctgggcatgctatcactccagtttagcaccaaccccagaattaggaggacattgacccccaacagctattcttcccctgaacccttcagaagcacctctcctaaatacgtctatattacttgcatcaggagtttcartgacttgagcccatcacagcctaacagaaggtaaccaaaaacaaacaattcaagcactacttaccacaatcctcttaggagtctatttcacccttccacaaatctcagaatatttcgaggccccctttattatctctgatggaatctacagctcaacattctttatagtcacaggctttcatggacttcatgttactattggatcaacaattctcaccatctgccttctctgccaattaaaatttcattttaggccgggcatggtggctcatccctgtaatcccagcactttgggaggccgaggtgggcacatcacctgaggtcgggagttcgagaccagcctgaccaacatggagaaaccccgtctctaatacaaatacaaaatttgctgggcgtggtggcacatgcctataatcccagctactcgggaaggctgaggcaggagaatcgcttgaacctgggaggcggaggctgcggtgaggcaagattgcgccattgcactccagcctgggcaacaagagcgaaactctgtctcaaaaaaaaaaaattcattttacatccaaccaccattttggctttaaagacgccacttgatattgacactttgtagatgtcgtatgactattcccatgtgtctctatctactggtgagggtcctactactcttttagtataagcagtaccactgacttccaatcaactagtttcgacaaagtctgaaaaagagtaattaacctagcactagccctaataactgacactttattaactctattattagtagtaattacattttgacttgcataacttaatacttacatagaaaaatccagcctttatgaatgtagatttgatccattaacctctacccacctcctcttctccataaaattctttctagtagccatcacatttctcctattcgattagaaatcgtcctattcctacccctgccatgagcccttcaaacaaataaccttatactaataatcagtacaacccttctactaattaccattctaatcctaggcctaatttatgaatgaacccaaaaaggattagattgagttgaactggtaaatagtttaaattaaatgatttcgactcattagattatgatagaccatatttaccaaatgccatttatttatattaacattatattagcatataccatagcactgctgggagtactaatctatcgatcccacctaataccatctctattatgcctagaaggcatcatactatcaatatttatcataaatacactcataattttaaacatgcatttcactctaggattcataatacccattatcctcttagtatttgctgcctgcaaagccgcagtaggccttgctttcctagtctcaatctccaacgcataaggcctagactatgtacaaaatctaaatttactccaatgccaaaaattattattccaacaattatactgttacaatataactctccaaaaactctatagtctgaatatagctactcatagcctattcatcagcctcattaccctattattttttaatcaaccaaacaataattcatctaacttctcattaactttttcttctgacgcattaacrtcacctcttctaatccaaacagcctgactactacctcttataatcctagcaggccaacatcacctatctaatgaatcacccttatggaaaaaaactccgtatttccaaattaattttcctacaacttttttaaattacagcatttacagccacagaactagtcatactttacattcttttcgaagctacactcatccctaccctaatcattattacctgctgaggtaaccaaccagaatgcctaatgcaagctcatacttattttacacactagtaggatcccttcccttacttattacactcatccacacctgaaatagctcaggttcactaaatatcctaataataatgtttactaatcaagaactattaaacttctgatctaacaaccttatatgactagcatgtattatggcttttatagtaaaaatacccctatacgracttcacctatgactccctaaagcccacatagaagtctctattgccagctcagtagttaggaggctacggtatcatatgacttaccctcatcctcagccccctaatagaatatatatcctaccccttcctcatactatccttatgaggaatagttataacaagctctatttgtctaagacaaactgatttaaaatcacttatcactcattcctccgtaagccacatagcacttgttattatagctatccttattcaaaccccctgaagcttttcaggcgcagtcactttacttcaacttcggcaatatcaaaattgtctgctgcaatgcaaaagtcacagtgaatacactgctagaaataccatgtctcgttgtggctagaataaaaacaatcacttgtgagttttgtgcactaaccaccctcgcctctttccttatcactagagctagaggttcttttccatgtagttttgtgggtgacttgacaatttatgaaaatttaacttctatgctcagaattcttttttgatttaccatacacataaaaattcaatttgagatgggtatgagtaggattcttttctactctgactctcctttaagaagaccacaggggaatctttatcccatacttcagaaatagttgtgctattctgcagcaactcacacaacacttatgaatattcaaactccagtagttgcccatgcttccctctaaccatctatttgcaagactgctgtttactcctagcaaagtatccaagaccataatatggtcttcatttgggtactgactttatttctagatttccccatattttgcctaccctaataattcattccccttgatttccttacattacagaaaatgctttaacacacwtrgttgagccaccacawatcctttctggaaagacatagcaactataatcacatacccaataattaaaacagagatttaatttcgtaccttgactgtaagatcagatcgttcttgtaatttgtaagtcttagagaaaagaagtctgattatccagaggatcagaatcccttccaaaataagatggtaagcaggagcctaagagtgagtcaaaaacaagtaagatatgaaacatacacttctaacacctgcayataaaatttactacacctgcatatactgcctcctgtgacttttagcctattcttaacaatttactttcgaagctcccttaatttctattcattcctttccccatttctaatagcaggcaatttctccctcacatgaaaaacccctaatatttttagcttttaaaacttctttgggaataaaaattaaaattaaaaaaataaaatctaggccaggcgtggtggctcatacttgtaatcccagcactttgggaggccaaggtgggcagatcacctgagggcgggagtttgagaccagcctgaccaacatggagaaaccctgtctctattaaaaatacaaaattagctgggtctggtggcgcatacctgtaatcccagctacttgggaggctgaggcaggagaatcgcttgaacccaggaggtggaggttgtggtgagccgagatcacaccactgcactccagcctgggcaacaggagcaaaactccgtctcwaataaataaataaataaaatctaacacagaatcccaatattaaccatcggattatttaatttcagtggttcttttttgggtacactatacaagactactcaaattctacattcaacacgcataggatttgggagtaagaagtttatgatgaattttaaaatttgctcatccccctaaatacaattcatttatgaataagtctaaatacccttttagttttctcaatagttggattctagcaagcaaacatctgccccagccactagttaagagcccactccaaaaagaaatcaccctaagaaaagctgagaaactctctctctagtgaattaataaaaatcacaaacaccacttcttttccttcccaggaaatgttacatacaggagttctcccaagtctcactgttggacagtttcggggaatgagaagttacactactgtcagtcttcaaaaagggagcaaacaacatttaacagaaaataatccatttctttaaaaaatcatttataaaaaagatcattcaattttagtggctcattttaggtcactacagttaacctaatactgggcatcacttaatacatgagcataagacagagccacatctgctgtctctgctgtttcaagataaaattcccagtatgtcctgcaatggaagacactgtcattacccctaccagtagacggtgatattaagtttggtgatattaaatcatcaaaagtaaagtgaaattcacttgaaatgaatgtaagctctttaagcacagggacttctgcctatttgttcaccgcactatccctagcatctagatctgtgtggtccaatgtggacagtcactaagttacacgtggctatttaagttaaattaaaaattcagttgcagctgggtgtggtagctcatgcctgtaatcccagcactttgggaggccaaagcaggaggattacttgaggccaggagttcgaggccaggctgggcaacacagcaagcccccgtctctattaaaaaaaaaaaaagattagttgggcatggtggtatgtggtcccagctactcgggagtctgaggtgggargatcgcttgagtctgggaggtcaacgcagcagtgagctgatcgcaccactgcactctagcctgggcgacagagtgaaaccctgtctttaaaaaataaaataaaataaaataagttcttcagtgcccaatgaatagctctgcaagacagcacggggactctcagttattaaatgaatgaacactaagattgacattctggtttcttattatcttatgtatctgaaataactaggcttcaaaaaactcttaactattcttcctttaaaagtctacggccaggtgcagtggctcaagcctataatcccagcactttgggaggccaaggcgggcggatcacctgaggtcgggagttcgagaccagcctgaccaacatgcagaaaccccgtctctaataaaaatamaaaattggccgggcatggtggcacatgcctgtaatctcagctacctgggaagctgaggcaggagaatcgcttaaacccgggaggcggaggttgtagtgagccgagatcacgcccttgcactccagcttgagcaacaagtgcgaaacaccgtctcaaaaaaaaaaaacaaaaataaataaataaaaatcgactaaactagttgtatctttataagacagaaaactgatgtacgcagaagaatgacaaactattttttattcacaaatcctaagtcacttgatttcttttcgacaaaaacaaactccaatttattacaattttattccccaacgaactgtaccgtagttccaaagagctgacttccttaggaccttcccagacgaaggtgttccactcattttcaccactccgttttatcgtccgtctaaactctggtttttgcagacctgtctcctgcgtccccttacacgtgttcctttccggagcttccaggggacccggagcataagaattcaaaccgagaccctcagtcccagcccccgcccccgcccgttcctccctacactcaaccgctgggactagaagctcccggcagtccttccagcaagaggcaccgagtctgggcgtgaccgagccagtcccgccgaggtctcaggccacaaatccacacgcgtcctcccaccctccccgggcccgggtgtggtcgcggaccgctaatggcgcggagcccacctcgtaaagcgcctgtaccatctccaccagaacccactgctccgtggcggtcgccatagttagccgcttccttccggaaggcgggtcacaagcgcgtcccaaaagtgcgcgtcgctgctcrgtgtcgttatcacctccgcagagggcggggcggcggagcgctgggcaccgcctactcgcacttgcgcactggttgacaggaggctggacggggtcaggtgggatgccgcagtttttccargaattgtttaccttgtgtcctattaccctccctgctggattcaggatggagaaagtagtaatgaacgggccttacacttggtcatcagctgggcgcagagagttaaaatgattgcaatacgtttactttatttttttttttttgagacggagtttcgcttttgttgcccaggctgtagtgcaatggcgtgatctcggttcaccgcaacctccgcctcccgggttcaagcgattctcctgccccagcctcccgagtagccgggattacaggcgtgggctaccacgcctggctaattttgtatttttagtagagacggggtttctccatgttggtcaggctrgtctcaaactcctgacctcaggtgatccgcctgcctcggcctcccaaagtgctgggattagaggcgtgagccaccgcgcctggccaatacgtttacgtttagtagcataagtaatccagcaatgcattatcattaagaaatgcataattatacacaaaaatagccaacccatatagcacttcctgttttgtcagacataggccaaggctttgcaggtattaaatcatatagcagtttggtaaagaaccttttagagccttccaatgcatatgcaaacagtatgcacgcgcacatacttaattggattggatttcttaaatataattgagatcatagggacaagacttttctacaactttttttaaattttttttctagcatttttttcctaatatatctcatatttaatggctgaagacttccatggaataatttatgtatattcatcgttccattttatgtaaacgtttccctattggtgaatacttatgttgttcccacctttcccctattacaaataatgctgccataactgtcgatgttccttgtgtgtatatctttctgtgcatgttggagtttttctgaccagttttttcaacatgggatatatctgaagactatgcacgttattaattttgataagtactgccaaaatggctcaaccaattaaaataatttggaagtttttctatgctctagtccatgatggatattatcaatcttttaaaaaaatttgccagtttaatggagataaaatgatacctcactatcctttattattgatgcttctggttactcatgaggttgtgcagcttcttatatgtttattggcatttatagactgtatgaatcgccaattcatattcttaatccatttttctattggttatttttgccttcttatggatttgtaggaactctatacattctgaatatcttatatttttctgtttcatatgtgaaaaatatttttgctcagttgccgcctagttgtttctgctctttcatcatactttaattttaaattttatgtagtgcttcagtctgttttttgcctctggatctgcatattgcttagaaaggccttcttcaccacatctatggtttccaaccattcttgcagcagtttgttgttatttgcaattagctctttactctggaaactatatttttggataatgagagttaagggacttaattatgtttttttctaaaggaataacaattttttgagtgccatttatttgagtaaccctgactttccccagaattctgaaatggtaccagtgctattgatacaggagccaaaaagaaattatttaggcagatagtgaaggtaagagagtcctcagcagagcttctttctgaacaaaaagcaaccccaaaattatttcttttttgcaaagagcagcctgaaaaattgagctacaaacatagataagcaagctggcagtgcacgggagaatgctggcagttgtgccgatagaaaaagactacctggaagccaggtatgttcaatatggagactccatcttccattttctttgtcaccacgtgtacagtgaaggaacaggcaacatggcatcagtcaggtagagaagccatctgcagaataaaatattagggtgggaaggccagcttcttcatgcactatgcaaatggcacacctggtccaaccagtctttcattccctacgtaaatcaaacgccacttcctcaagctcatctataaaaccctgtgcgtttcaccgcagaactggcaacccattttctctgggacccctttctctgcacagatagctcttctctttcgtttgcctattaaacttctgctcttaacctcactgtggtgtgtcgcgtcctagttttccatggctgtgggacaatgaacctcaggtattaccccagataatgatgccgctacactatgtgctrcatttccacataagctggcgatatggagtccgtgtcagtgctctgctcacagtcctgtgcttgcgtgcatttcctcccccgggtgctttccttccagcagccacgcctgcatttctcagaggacccccttgaaggctgccattcccacgtttcctgctctcctggagagttggaagtatctgagaatgtatcttctcctgggcagtacttaccagtgtggattactgatggtagctgggatataaatattgcagcttccttgccctacttagcaagacaactctgaggggtgaacttcaccatactctctgcaattctgagtcaatggtactatctgcaaattcttttacacactcatcaaaaggcatatctttgtggcagcttctataagagaatacagctgccatgtagaaagatcatgtgagaaccacatagaaggggaaagagatgactaaggggccccagctgccccagtccctggctgtttgagtcttactagtccaggtaccagacgtgtgagggacgacaccttcgaggtggctccagttccagccaccatctggttaccaccactgagagaccctgagtgaggtatgcctagctaagcccagatgacacccaaatgtgtgggcaaaaataaacgattgttattgttctaagccactgttttgsgattgttatattttgggataactggaaggaatacaccgtgggactttgcttgatttggaacttttgcttggcctctgtatcagtttcctagggctgctgtaacacacgatcacaaactgggtgccttgaaacagcagaaatttattctgtcacatttctggaggccagatgtacaaaattaaggtgttgacagggctatactccctccaaaggctctggggggagaagactttttttgcctcttccagcgagagccttaacttagttacatctgtaaagaacctttttccaaataggccatgttcccaggttctattccctgattcgaatgttaacatgtctttttgggctctaccatttaacctactatagtccaacctctggccttccaaattcacatctgcctcatgtgcaaaatacattcattccgtctcaacatctccaaaagtcttaactctcacctaaatatcataaaaattaattcaaagagtctcaaatattcacatataaataatcaggtgtaggtgagtctatgggtatgagctatgcaagggcaaaattcctctgcatctattgactagtgagactagaaaagaagttacctgcttcgaaaacacaaaggtgggccacgtatatgatagacaatctcactgcaaagcagagaaattagaaggaataaaagggtcatcaatcccaagcaagttagaaatccaacaaggcaaagtcatttggtttcaaggtctgggaataatcctctgtggcttgaagctgtgtcttttgggctcatggcttcataggcctctttgctcatggcaacttggtaggtctctgctcttgaacattcagcctctacccctgtgcccatgaccctgtcctcatagtgattcttcctttttcttgaagggcagcacatgctgatacctgagtagttctatcagtcctcttcttgcctgaagaattgtgcatatctgacagcctctctttcactttgtcctgtctcagccccttcaggccaagctgacagtgtttcttctggtacaaccttctcaagaacttttgaggctcccatgtatgtcacagggatccatgccattagataaaagaacccccacagatctttcctggataacgctggatctatccttggatccgtgagataattgagggatccatcagttgtatagcagatctcttcagcacaatattgtctaggcacaccctcggccctgtatccagagtacactttcccaacagtgagtttcccaattttagcatcttttgcaatctgaataggccgagaagctcccaatcatcaagtgttgtttctttttgcttaacagctccttcctcaatttgcttatttccttttctgtttcattacaaacagcatgaagaaaccaggctgcatcttcaacactttgcttagaaatctcctcagctaaatatccaagttcattgcctacaaattctgctgtccacctaaggacacaattcatccaagttatttgccactgtgtcacaaggatcactttgccttcagtttccagtaacatgttcctcatttccttcttagccttcaacataaaccacttttaacatctgtatttctactaacactctgctcatgatgagatatacatttctaagatgatggaagaattctctaccatgctcttcacttccttctgttccctcaccagaattgyctttaaaatccataactccactaacagtctcttcaagaaattctatgacttttctctcaagtacctcaaaaaccatccaacctctatttattactcagttccaaagtcacttccacaatttgaggtatttattaaagtagcacccacttcctggtaccaaaatctgtattagttttctagggctcccataacaaattgccacaaactatgtggcttaaaacagacaaaatttttttctccaaagtctggagatcagaagtccaacatcatggtattgacagagccactctctttctgaaggctctaggagagaatcattctttccccttccaggtcctggtggctccaggaattcttggcttgtggcagcatcactgtaatttctaccttaatcttttcatggccatctcttcctgtatgtgtctctcctctgtgtctcttataaagtcacttctcattagatttagggcccacctggataattcaggatgatctcatcttgagatccttcattacatctgttaggacccttccaccaaataaggtcacattgacatgctctggggtataatagggctctcyagggaaacaggataaataaaacatatatagatctctacataagaggagatttattataatgattggcttggccaggcgcagtggctcatgcctgtaatcccagcactttgggaggctgaggcgggtgtatcacctgaggtcaggagttcgagaccagcctagccaacatagtgaaaccccgtctctacttaaaatacaaaaaattagctgggcatggtggtacgcacctgtaatcccagctacttgggaggctaaggcagcagaatcgcttgaacccgggaggcggaagttgcagtgcaccgagattatgccactgcaccccagactgggggacaagagcgagactttgtctcaaaaaaaaaaaaaaaggctcacatgattatggaagttgagaagtcacacaatctgccatctgcaaattgaagaaccaggaacatcagtggtgtaattcagtcctcgcccaaaggtttaagaaccaggaggaccaaagtccaggggcaggagaacatggatgtcccagcttacacagaatgaaatgtacccttcctctgcttttttgttctactcaaactttccatggattgtatcatgcccacccacattagtgaaggcaatctgctttatttagtctatgaatgcaaatgctaatctcttctggaaacacccttacagacgcacccagaaataaatattaccagctatgtgagaatcccttagcccagtcaagttgacacctaaaactaaccatcacatggagattaggacataggcatgcctttttgagatccaccattcaactcactccagtrgccttcccttcctcatcccaactcccctctcttttatcatttttttcttgagaatgctcactaataaattacttttacacaaatccttgttttgtggtctgcttctggggaaacaaacctaataggatttatatctggagtctatatttgattccattagtctatttgtttgtaccataccaatacaatattgctttaaaaattatttattccgagatatttttagattcatatgcagttgtaagaaataattcagaaatagcacatgtactctttaccttcaatgtcatcaatatccagttttccccagtgttaacatcttgcaaaactatagtacaatatcacaaccaggatattgacattgacagtcaagatacagaatcattcatttaccacaaggatctctcgtgttgtctttttaccactacaccaagttcccttcctctccctgcctttattcgttggtccatgtcatccactaaccttctcttcatttctatagttctgggtttctagaatgttatgtaaatggaatcatacaataagagacctttcgggattaacttttttcattgagcataattccctacagattcatccaggaagctgcatggaatactagtttgttccttttgatggccatgtggcattccatagtatgagtgtaccacagtttgtttagctattcatgtgctgaaggacatttgggtagtttgcagttttaggctgtcatgaataaaagatgctatcaacatttgtgtacagatttttgtgtgaacatcaattttcatttttctgggatacttgcccaggattgccattggtggatcacagggtagttttataaaaaatgcccaaactattttccagagtggctgcatcattttgcattcccaccagcaacatatgagatgttgagatgatgccagccggggccccaggtggactacagctcctgttacagtggtaacaggacacacaggctttatactcagcactgcgccagcatgcctcccattccaaggtgctgctttgaatcccctcttcccagcctaaagtttgaagctgtttctggaggtgtaaactgactactttcccactgctagctcgaatacaatcactttcctatccctgtacttcatccttgttactggctgtacaagctgcaagcagccaggcctgtgctaggttacggtgagaacttaaagactccagatgagatcacctaaggaaggaatggggagagaagaggctcaagcctgagcacccgggcacggccagccaatgggactgaatgggaacattgggaaggtctgaggaaaaccaggagaggtgactgagggacagagagcaggagagcccaacagcctggacgcagaagaggccaacagtccggacgtgacagcaggctgtgacccggcaggggtccacccaccccagtgagcaggcccaaggcagcgagggcccacacccctcacatgcaaaactggcctcttctggtcactggtgtctgaaaccaaatccagaacagcctgtggcctgtaaagcatatatttctaacgactgcagactggtgggatgataggagccttctgaatgaccaggactgctttcttgtggagctgatgaaaacgtattcttttagcatgttagaaatcactcgttttactttgtttatttggccaagctgggtctggtgtttctgttgctgggaatagactttgaaaagtcatacttctatcaagaaacaaaagtgtccttgcagaaatttcaggtctcttgttaagcatgtattggtcttaaggttcactgttttttaaattattatttatagaaagaatctataaattcttggggaagtgtgttataagctttaataattacactgagttgcaccttagtggtgtgacattagcatggaatggggttaatatctgaggccgcagatgattttgtaccttttggaataaagggcaaaataaactctcccagagtaagagctgtatcgtgaattgtcatactaattattgagggggacttctgtgcttttattgaatggagtgctttacaatttttatttttgaatggggttgggatctttggaatatttaaataaagttattaatgattaaaaaaaagaaaagaaaagaaaacgaggagagagctctgggacaatggagtggccatctggttgagcagtgctaaaaggccaagaggtagacaaagaactgaccacgcctttagcaatgcgggcatctcagatgacctcagtgagagcagttttggtggagtggtggagatgatgacctggttgggggggcagtaggaaaaccggggggagaaaaactgaatgtaacgcatataaaacaacatcacttgctcctctgaggatgcaattatacttacctcagtgtttccaagtatttgatttattaactgtcttcaggagtattagttctcattcaggtattgattttctataacttcttggtaatatctgggtacacatatttttaatttttatttgcatttattttatgctgaatttcttccctggccataaccttctgtttctttggtctcttctgagatatcctttcattctttgcaaactcctcttctggtttaggaacaatttttttttcagtaagcgtctgttcaaagggacactcgtgtgtgggtaatcccagcactttgggagaccaaggcaggaggatcacttgaatccaggagttcaaggccagcctgggcaacacagagagacctcatctttacaaataatttaaaaaattagccagctgtggtggtgcatgcctgttatcccagctactggggaggctgaagcaggagaattgcctgagcccaggagtttgaggctgcagtgagctgtgatgaagccactgcaccccagcccagaccctgtctttaaaaaaaaaaacaaaaaaaacaaaaaaaaaacggctgggtgtggtggctcatgcctataatcccaacactttgggaggccgaggcgggcagatcacctgaggtcaggagttcgagaccagcctggccaacatggtgaaaccccgtctgtactaaaaatacaaaaattagctggatgtggtggagggcgcctataatcccagctactcgggaggctgaggcaagagaatctcttgaacccaggaggcggaggttgcagtgagccaagattgcaccattgcaccccagccttggggacaagagtgaaactctgtctcaaaaaaaaaaaaaaaaaatcacaaggcataccatgaaacagggaaacatggccctatcaaaggaacaaatctctagacattaaccctaaagaaatggagatcaccaggcaaagtggctcaacacctctaatcccagtagtttgggagactgaggagggaggatcacttgagcctaggagtcaaagaccagcctgggcaacatagaccctgtctctagaaaaaataacaaaataaataataaaataataaaatacaattagctggatgtggtagcatgtgcctgtagtccccactacttacttgcaagaccaaggcatttggataacatgagcctggcaggtcgagctgcaatgagccatgattatgccactgtactccagcccgggtgacacattaagaccatgtgtcaaaaaaaaaaaaaaaggaaaaaaaaaaatgatggagatctatgagttgtctgacaaagaattcaaagtaatcatcttaaagatgttcagtgagctacaaagaacacacaaaatcaggaaaacaatatatgcactaacaaaatgagatcaataaactataatatgtaagatgttagtgatcaggtaaactgcgtgtgagtatatcagctgtatttgcatttttttttataaatctaaagatacaaaagtttatttttaataagtgtcagaaactgaaattaaaaacctattgtaggctgggcacagtggctcacacctataatcccagcactttgggaggtcaaggctggcagatcatgaggtcaagagattgaaaccatcctggccaacgtggtgaaaccctgtttctactaaaagtggattctgtattccctcagccagagacctgtcaacttaaccaggactccatagtgccactgggaattttggttcatgagaagagcttatttacttctagcagtgtcgccatcagctaaagataaaacatgttcttgaaggcaaagctcacacaatttaatactttcccacaacccactccaattgcccatcaattctttagccccataaagcccttccagttctccctgaatgctgctccagggtgggtgccgtcataggggtcttctggtcccctcttagatactcatgtgcaggtggcctgtctgaggagggcctgagttgctcagtctgtgctggaagctccacctcaggcctctgcttatggtcttagttatttgctctcacaagcctgttcttcttgctcatcagacctcccgtgaaaagctctgctgaatgaggcagcactttgctctattaaatgagaatgtaaatgacagctacctcattagaagaagcggggctgggtggcatggtttatgcctgtaatcccagcactttgagaggccaaggggagaggatcacttgagcccaggagttcaagaccagcctgggcaacgtagcaagatcccatctctacagaaaatttcaaaaataaaaaagactgtcatgcagctcaaggtcatgatctgaaatgaaacaaacaaaagtctatccacaaatctaaagccatcttttagaatttaacactttactattgttacacattgtatataatccttatgtataaatgttggttgcactttttgctgttttactttaggtttttctcttgctggttgtattagtctgttctcacattgctgtaaagaactacctgaggctgggtgcagtggctcacgcctgtaatcctaccattttgggaggccaaggcaggcggattgtctgagttcaggagttcgagaccagcctgggcagcatggtgaaaccctgtctctactaaaatacaaaaaattagctggatgtggtggtatgtgcctgtagtcctagctactccggaggctgaggaatgagaatcacttgaacctaggaggcggaggttgcagtgagccgagattgcgccactgcactccagcctgggcaacagagagagaccctgtctcaaaaaaaacaaaacaaaacaaaaaacaaaaaaaactacctgagactggacagtttatttaaaaatgtttaattgactcagttccacaggctgtacaggaggcatggctggggagggctcaggaaatttacaatcatggccgaaggtgaaggggaagcaagcacatcttcacatggtgacgggagagagaaagcgaagagggaagtgctacacactttcaaacaaccagatctcgtgagaactcactatcacgagaacagcaagggggaaatccacccccatgatccgatgacctcccaccacatccctcttccaacattaggggttacaattcaacaagagatttggatggggacacagggccaaaccatatcactggtaaaaggtcatcatattaggtcatttccttctatgtcagtgggagatttgcaatgccttttcttattggcaatatgttgtgagtatttatcttgacttgggcactattatcaacctcttacttcatggtattttccttcccattatctcaacactgtgaactcctcccgtattctgtattgaaggaaatttatttttttgtagtccaactaacttcctttatttttattatggtaaaatatacctaaaatttaccattttgattttttttttttttgagacgagtcttgctttgtcacccaggctggagtacggtggcatgatcatagctcactgtaacctcaaaaatgtcaaacttctggacataagcagttttccctgtgtcagacccctgagtatctcgaactatagacatatgtcaccacagccagctaaattttttttttttttttttgtagagacagggtcttgctatgttgcctaggctggtctcaaactcctgaccaaaagtaatcctcctgcctaagcctcccaaagtgctggaattacaagtgcgaaccactgggtcagcctttttgttgtgtctttttctggttttgttatcagggtaatattggcctcttagaatgaatctgaaagcattccctcctctttgattttttggaatagtttgaataggactggtattagatcgtctttaaatgtttggtagaattcagcagtgaagttatcagatcctgggctttcctttgacaggagactttttttattataggcttcaatcttgttacttgttacgggtctatttgagttgtggatttcttcatggttcaatctttgtaggttgtatgtgtctaagaatttatccattttttatatgcttctcaatttattggcatagagcttatgcctctagtgatcgttgaatttctggggtttatttgtaatgtctcctgtttctctctgattttatttatttggttcttctctcctttttttcttaatctggctaaaagtttgtagattttgtttttcttttcaaaactccaacttttttatcttgtatattatttgtctcaattttatttatttctgcttgatctttattatttcttttcttctaattttgggtttggtttgctcttacttttctagttctttgacagggtttcactctgtcacccagcctggagtgcagtggcacaatctccgttcactgcaacctccgcctcccaggctcaagcaatcctcccacctcagcctcccaagtagctgagactacaggtgtgcaccaccatgcttggctattttttgtagagatggagtttcaccatgttgcccaggctggtctcaaactcctcagctcaagcaatccacccgccttggcctcccaaagttttggaatgacaggcatgagccaccacacccggccatgcttttctagctttttagatgcattgttaggttgtttaattgaagttttctacttttttgatgtaagcatttattctaataaacttttatcttagcactgcttttgttgtataccataggtttcgttctgttgtgttttcatttccatttctttcaagaaatttttaaattttcttcttaatttcttcattgacccagtggttgttcagaagcatgttgtcaaatttccatgtgattctattttttttttttgttttgagatggagtctccctctggtgcccaggctggagtgcagggggtcaatcttgggtcactgcaacctctgcctcccaggttcaagcgattttcctgcctcagcctcctgagtagctgggattacaggcacatgtcaccatgtccagctaatttttgtatttttagtagagacgaggtttcaccatgttggccaggatggtctcaaactcctgacctcaagtgatgcacccacctcacactcccaaagtgctgggattataggtgtgagtgcccggccaatatctctactttccaaagttctgcttgttattgatttttagttgtattccattgtgatcagaaaaattacttgctattatttgaatttttaaaactttgttaagatttgtggcataacatatggtctgtctctgaaaatatttcatgtgctgaggagaataatgtgtattctgtggctgttgaattaactattctgtaaatgtctattaggtccatttggtctatcatgcagattaagtctgataagggtttttgttgttgttgttgttgatgattgtctgtctagattttctatgcaatgctgaaagtggagtgtcaaagtccccagctgttattgtattgggaactctctctctttaatcctaatagtatttgctttatctatctgggtgttccagcactgggtacattaatgtttacaattattataacctcttgttgaattgacccctttatcatcatataatgaccktcyttgtctcttttcacaggttttgacttaaaaatctattttatctgaaatacatatagctattcctgctctttttgggggtgtttcatttgcatggaatgtctttttccatccctgcattttcagtctatgtgtgtctttataggtgaagagagtttcttgtaggcagcatataattgtgtcttttaaaaatttattcagccactctatgtcttttaatttgtagaacttagtacattgacattcaatgtaattattgataggtaagaacttactgctgccattctgttaattttttctggttgttttgttggtcctcttcctttcttacttcctttctgtcttccttttaagtgattttccctggtaatatgttttaatttcttgttttttatttcttgtgtatctattctaggtctttgctttgtggttattataagggttgctagtaacagcttataactagttattttaaactgatgaaaacttaacactgagtagaaaaaaggaaaaaaagcaaacaagcaaagagaaaactcaaaaaaaaaaaactctacagtgttactccatcttcccttgcctcaatggctgtttttttgcctttttttggggggagggtttctctaattatatctttttatatcatctatctcttaagaaactgtcgtttttattattattagtttgaggtcaagtctcactctgtcgctcaggctggagttcagtggtctgatctcagctcaccgcaacctccgcctcctgggttccagcgattctcatgcctcagcctcctgagtagtggggattacaggtgtgcaacaccatgcctggctaatttttgtatttttagtacagayggggttttgccatattgggcaggctcacctcaaactcctgacctcaagtgacccacccacctcgcctcccatgttgtcattattattatcatttttttttcttttttgagatggagtctcactctgtcacccaggctggagtgcagtggcatgatctcggctcactacaggctccacctcctgggttaacgccattctcctgcctcggcctcccatatagctgggactacaggcacccaccaccatgcccgcctaattttttgtatttttagtagagatggggtttcaccgtgttagccaggatggtcttgatctcctgacctcgtgatccacccacctcagcctcccagagtgctgggattacaggtgtgagccaccacacctggccgtcattattgtttttgatagatttgtcttttagtcttcctactaatgatatgagtggtttaaataatgcaattacagtattaggctattctgtatttgtctgtgtacttaagtttaccagtgtgttttatatcttcagttgctttcttgttactcattaatgcccttttctttcatattgaagaacttcttgtaaaacaggtctggtgttgacaaaatcccttagcttttgttgtctgagaaagtctttatttcttcttatgttgaaggataattttgctgggtataatattctagtccaaagtttttcttcctttgatactttgaatgtcattctatttcctcaggctggtaaggttaccactgagaagtctgctgccaagtgtgttggagctmctttttatgttatttgcttcttttctcttgctgcttttaggatcctttctttatctttgacctttgagagtttgcttattgtatactttgaggtaattttatttggcttgaatattctaagtattcttgatcttcatgttcctaggtattcatgtctttctctaagtttggaaggttctctgttattgtttatttgaataaactttctaycccagtctctccatctacgtcctatttaagaccagtagttactagacttgcccttttgagtttattttctagatcttgtaatagtgcttccttctcttttatttatttttgcttttttctccttggactgtgtgctttcatataacctgtctttkaatctactgattcattctgccacttgatcaattctactgttgagagattatgattcatttttcagattgtcaattgagtttctaagccccagaatttctgctagattctcactctgttgcccaggctggcgtgcaatggtgcaatctcagctcacttcaacctctgcctcccaggttcaagcaattctcctgtctcagcattctgagtagctgggactacaggcatgcaccaccacacccagctaattttttgtatttttagtagagatagggtttctactaaaccccatgttggccaggctggtgtggaactcctgacctcaagtaatccgcccaccttagcctcccaaagtgatgggattacaggcgtgcaccactgtgcctggcctctgcttgatttttaaatgttaattcttcattaaattaatctgatagaattctgaattcctagtctgtgttatcttgaagttgttgggcttcctcaagatgggtattttgaattctctgtctgagtggtcatataatttaatcactccagaattggtcactggtgccttatttagtccatttggtgagatcatgttttcctggatgctcttgattcttgtggatgttcaatgatatctgagcattgaagagttaggtatttatttcaatctttgtagtctggagtgtttgtatccatcctttttgagaaggctttcagtaattgaaatgggattgagtgttgttacataagcctgtggtcgttgtggcctcaggcagaactatgaggccaagagtgctcatgcgcaccaggctttctttttgraattcgaggtgaggcctttaccacccgtgagctcagaggagggaagactgggacctgtctgaaggtctggagggaactcccagttgcacacttgcccccactgcccctttcctggcatggggtgagatcggtctacttcagcaaccagtgcctgcccttgatccctgcaggagctgaaggaggtgagcaaggagcagcccagactggaggctgagtaccctgccaacaccaccaagaactgttaaccacatgtgctaccctgtgagtgctgggggcaggaaaggaggcatggcagagggctagggcttggcatgggagcagggggcttcatgtgcccaaccctgaatgcacagctttcactctctgcagatgaccactccagggtcaggctgacccagctggagggagagcctcattctgactacatcaatgccaacttggtcccagtaagggccaccggtgaggctgtccatgggatctgggatctgctcgggagatgggctggtttgcaggccacacttgccttcattagctgtaacagctctctaggagatcaccagcttgggcttcatgagctcaatccagcaggtgtctagcaagggtctactgtgtgctgggctctgtgctgggcctgcaggaggcagagctgttagccacattccccaccttcaaaggagcatgtaggcatgtgtgtgacattcaccacacactgtgacaagggctgtaatagaggaaaaaacactactcagggcacatggaggaaggggaaatttcatccacctgaggaatcaagaaaggcttcccagaggaggggacatttgatttattgaaggatgagtaacattttgataagtgatgaaagagggaaggacattctgttgactggaagaagcagccagagaacagccaggcagtaacgttcaggcagtgtgtgagagtgtgtgtgtgtgtgtgtgtgtgtgtgtgtgtgtgtgtggtggggggtgcgtaggggtgagggagtggggaggtgctgggtggtgggagatgtaatgggaaagatagcctggggctgaatgggctgaatgaaggagggcttgattgttaggctgagggctttggactctatttggtgggcaattgggagccatagaagatttttgagcatggaagaaacgcagtttggttttaggaaggtaactctgggtgggtgaagagggtggcctagatgggctatttaactcatgtcagtatcttgttttcattggggtttttcttgtccctttggggtgggacagggacgggggtgatgtctctgaagtcagcccttctggtttgcattctgggtgcacacgtgttcttgtgtgtgcacacatgtaggtgtgtgcacagcatcctcactcctggaggtcaaatgttggaaatctgctgtgtgcttgacaccaagcattgcccgttaaccatgttcctgatctctgcctcctacaccccagggctacacccgmccacaggagttcattgcctctcaggggcctctcaagaaaacactggagaacttctggcggctggtgcgggagcagcaggtccgcatcatcatcatgccgaccatcagcatggagaacgggagggtgagtgcgccttgcaggckcctagaaaggccaccaggtggcgcacgttctccttgtggggatggccccgttggcatcttcccgtgggaaggcggggcagactggagtgaggccaatcaggcctggagggtagtggamccacctcccacccagacctgggatggggaggcagtgggrggaaacaggtatgtaaactcccagcttggctttgtttctacgggcttcttgccctgggcagagaaggcatcaaggggtagggactgcccagggccggtgtcaaaggtaccatcagggatccttcctttcgataagcctggcagatgcagggccctaggacatgcagagaggctgccgagtctgtcctcttgctggagcagtgagcccagggccgctggccgcggaataagggctgttctgtttggcacaggaaccttgtggctgactcagaatcctgagagtcatgagaggtctgagggcaagggtgccggagcccaggcaagggagagcagctcctggaggaggaagccttggagctgggtcattacagagagcagaatcccagcagggtggcagggaccagaaaggtgggcagggaggggtgggactgagtaaagcagggggcggcagtgatagggctgggcccacagcygcccttcccctctccaaccttctggtcccaggtgctgtgtgagcattactggctgacygactctaccccggacacccatggtcacatcaccatccacctcctagctgaggagcctgaggatgagtggaccaagcgggaattccagctgcagcacgtgcgtgccccaaggatgaggggatgggacaggcattagagctgagacccctgagaaggttgcctcacttcctgggtccctggagccctctctttcggaggaccacaagtactcagtcaccacccagggaagagtgtgttagggaaggggtagagaggcacagagaagattaagggtttatctgaggctgcacagtgagggaaaggaagaacaggagagacatgatggttcctgacctcccccatgccagctcagggctcttgcctcaccccatgccccctgtgcccatcttccttcccagattgtgcacccctggggcaggaaagccagagacccgaatcacttctctgcccaggcaccctctatatgcagaggttacccaggaggctagagaaggacctgagggctcaggaagcatcctgatgggggagacatagctgccaccctcaaggaacagttggtctgcatcatccctgcccttaggcagctggggaagaaagtgtgagatctgggccatgggaacctggagttaggaagataaggagcagcagcagggcccctctgcccccttgtccccttcccacccccttcttaggttgtccagcaacatcaacggagggtggagcaactgcagttcaccacctgatccgaccacagcatccttgaggctcccagctccctgctcgcctttatggagctggtacagtagcaggcaagggccacccagggcgtgggacccatcctggtgcactgcaggtgacagcaggtgagtgcatagggtggagagccccctgcctggcctgggggcatggagggctcttggactgtggggagagctggggacatgggcagcctcttcacccattcagctcctcaggggctgtccctgcggtgtgggcatgggccggacaggcaccttcgtggccctgtcgaggctgctgcagcagctggaggaggagcagatggtagacgtgttccatgctgtgtatgcactccggatgcaccagcccctcatgatccagaccctggtgagggccctgcaggctgggctgggcagctgggaccctgaaggagtgggagggaggtgggtggccacagggctacaggagggaccaggaaagagagctcatggggcacacagaagaccttggggagagggtttcagacacatcaccatcctacctgggctgtgctttctattctgtgaaaggggaggtgggacaggatcctgtcagctttgacaccatgggacggtggagggaaggtttctcagtggctccctctgccctcctacctgatccctgccttgctggtcagggcctgaaaaatctccctgcaggcccccctcgctcctcgctgagcagcctgatgccttttcccctggcagagccagtacgtcttcctgcacagctgcctactgaacaagattctggaaggacccttcaacatctctgagtaagtcccagcttccctgtgcctcccacaggcaggctccctgctcctgttcgtgggcagagctgagcggactagaacggggagctggggaaccttgagtgccttctccctctccaacccccccaccaggtcttggcccatctctgtgacggacctcccgcaggcgtgtgccaagagggcagccagtgccaatgctggcttcttgaaggagtacgaggtacacttcaggccgggaagtgggtgacagccaagggcagccttccgctgctgagccaaccctgcagtgagacctcccagcctcagggcacccatctccttcccagctcttgctgtaggccatcaaggacgaggctggcttttccgcacccccgcctggctatgagcaggacagccccgtctcctgtgagtctcactgtggaccctgtggaggggcagggggccagcgtgggctggggacctctggcagcttcaccctcactgtcttccctcagatgaccgttctcaggggcagttttctccggtggaggagagcccccctgacgacatgcccgaagcctggctcttccctgtgagatgatgctggttttgccactgtttcctgccctctctgaccacctgtacttcccgggctggggctgctgggggctcccagagttgtggactgggcagggggcaccttcagtctctggaagccaatgatctgtgctctgcagggtgggccctctggccgtgatcatacggtgctgactggccccgcagggccaaaggagctctgggagctggtgtggcagcacagggctcatgtgcttgtctctctttgcccacccaatgtcatggagaaggtgacagagcagaggacagaggaagggaggctcaggagttaggggtgaggatggaggcgggtagtttgtggtgctgtctgtgaccagggcaggggcagagatctcaggaagttgcctgagcagccctaacttggtcccagccataggaattctggccaacggagatgcagcccgtagtcacagacatggtgacggtgcactgggtggctgagagcagcacagcaggctggttctgtaccctcctcarggtcacacatgtaggtgctggggccacagggcatggggtgktgcatggggaagagtcctgtgtgggcttcctctgccctctccagcaccaatgctgatcatgtctttgccacagggggagagcaggaaggaaagggaggtgcagagactgcaatttccayacctggagcctgggcatgagctgcccgccaccaccctgctgcccttcctggctgctgtgggccagtgctgctctcggggcaacaacaagaagccgggcacactgctcagccactccaagtgttgttggacaatggtcttgggggagtggacaatggtcttgggggagcggacactggaagcccctccctgcccttctggcatagcctcagatctccctgggcyctgcttgggttatgggtcaaaaggacacagtctcacaatgcccctgtcttctccacaccctaccctgtcctcaggaatatggtgggaatttaccgcctccctccctaggtccaggctggccggctgaccaagtgtccggtgtcccttctcagtccctgcgcccaggttgggttttcccacatccgtggacacccccgccacaccccctttaggtacctcatccacctctaggtcagttgcagcaagggtgcaacccagctgggcaccttcctggccatggagcagctgctgcagcaggcagggtctgagtgcaccgtggatatctttaacgtggccctgcagcagtctcaggcctgtggccttatgaccccaacactggtgagaggcgaccaggggcgaccgggctggcgtgggggctcagctgtgggaaggggcggggggatgagggagcttctgcccaggcctctaggcagcaccacccgggtagccaccaggtggcgctgtggaccgctgtgcrttctcccagayggagccctaggggttggggracacaagggagccyttttctgttagattggggcaggcggggcgagcctcctaaccctatgtccatctccagaagcagtatgtctacctctacaaytgtctgaacagcgcgctggcagacgggctgccctgagtcrgcactggtcackgtgcaggagaggtttgtgccctgtgggatggggacagcattcctgacacatccacgtgggcctgggctccctggaagggcggcctccactgggccctgtgctgsraaggtacagggtcttggaataaagacctgtggccaagcctgaagctcagtgtgttctgtctgtccatcctcaggcctgggcccagygtgtgggtctcgtgggcaaacatggagccgggatggaagctaggacctggagtctggttgaacttggtgacctatggcccctatgctgttggtttttcccctgaagcaatcctctccctgctaatcctccagtttctaaatwtcctcagactttggtctctccacgtctagtttcctgtggtgctaagccctggattcagaatcacagctccaaattgtttgtcctctgcctcatcaccctgtacgcaccatgctgtatgcagtagggtttatcctgtttcccacttcccttctcctgccatccccagccttctctacctgccagagcccccaggggccaccctcagcccccaccaggatggaggtgccagagctaccctgttactcggaaggcaggygctggaggcacccctcaggcggaggtgccaagttttccctgctccttctctgtctccttcttcctcccctctacataagaggtgggggagaaagcagggaaggcatatggagaaaggaaaaaccaggaggagcagcagagaccagaaaagagggtggggaggcagctgtctgtcccacacactgtaggactgcactgcataccatgtgcatgattgctggtggccacatgagctcctgcctgcttccctggtcaggctgggagtttccaggtgcagtgcctgatgctggacactaactgcccctggtggaaggccctgggaggacacagagaaagcctggaaagatcagagcaagagtccctgaaatggagtcgggtctccccaaggggaagcggggagagctctttggccaacctgagttcctactaaggtgcaacgggtcagaagtcaggagggtccttctcaggcctggttgaagaagggtacagaggtcgtgctggctgctcagccgggagctttcccagaacgagactaaagcactggtgccctcccaggaggactaaatgccggtgtcctccatatgccatgtttatcaggagctgagggtgggccccctaatgaccctcacaaaagcaggctggaggctctgctctgagctgcccaagtctgtctcaagcagctgctgctgaggttgcaacagggctcaaccatggcttttccactctgggaaaatctcacattggagcagcaggagctgcaaatgagatggagccaaggctatggttgagtgaaggaagtgcaggctggcctgtggtagctttctgccatagggcaaaggtggctctatctgtgagtctttctggtcatgtaggcccatcctctagccttcttaggaggctcatcttctactttcagcgccatggcaccaacgggaggcctagggtcagggtctgctcatttcttggtccggctatgcagcccctctagccctgggaggttatcggagagtggagaggtgttgatgagaggattctggcatgtggaaggacagggtggaagaaatcctggatgcctctgaggtcccaggtttctggtataccctctggctggaccatggggagacagggcaaaaaaggaaggaggggtgcccacagcctgctctagctctgcactggggcttggctcagcatgggagagaccagagacagcaagaggckgcgtgaaggaagcacagccagctcactatggtctaaggagagaacagggattggcctcagttttaaccaccgtgccctttgctcaccagggctctggggccggccaggtcagccagttggtgggattccagcctcagggtggccgagctgcaggtgcagcacccggcctccaggtggcgccaatctgcttactttgaggtggcctcttgacaagcagctgagctgcacgcagtccctcagcctgccgaggtcctgggagcagggatcaaggtggtccccgtaaacctgacagtaaacctgacagaggctgcaggagtgcatttccacccagggtgcactcagcgagtggaactccacacccgtttctttggagtcaaggcgcgacctctcagggaggagactgctcctggttgcccactgccgggtcatcccagcttgcagtggaaccctccgcagcctggcctcttccagggtagcccctcactcccctctctcttgtcctaggataaggccgaggagggctgacgagttccagctctggggatgccctatcagctgtgtcaccttgaacaaatcatttctcctcttgggtctctgtttcctccagtgtgaaacgtggtgaaggcatgaggggctatgrgagccccaaggcctctttcagagatctcctctgggtcccatgtgaccccgtggctatccccaaaggcaagagggtccccagccctgcagccaaggccctgggacaccctttctaaacaagtgcaggtctctgacgggctgagctttgctcgcttgggtttctttgcttttttcctttttttatctttcctgaatgaaattcctgccagctccgaaggaaggagggaagggagctagccgcagcgtagaaagtttccttgactcctcctccggctgggtctccctcccttgccaagcccagcctgtgaaactgaataacgaagatcactcaacaawgcctgctcctctctgactgcaccgycccgccgccgacgcccagtagagcccccggggcggtccccaccgacggcgcagcccgccgggaccgggagaaagcagctgcggacaccgcgcccgtgcgtctgcgcgcctggccgccaggtgacccagcagcccggccgccgagatgcccarcccgcccaggctccgggcgctgtgacttcgcgccgctgtgtgcgcctccccgagcgccggctgcgccccccagcccggcccggggcctaccgcctgcccggccccctgccactgccaggaggacggcatcatgctgtctgccgactgctcttgagcttgggctgtccgccataccgggggacctggatcccctgacggcttacctgtgagtactgcccgcctgtctccacctggtactgcgggctgctggcttgcacccagtcctggcctcagcaggacacctgcttgcttggtgccctggggcgtgggcatcccggagagggttcacccccttccaagttgaccgttgcgggactggggaggggagaagagtctgagactaaatatcaggcgagcagggagaccaggcttccctgacttggcttccccattggcctccgtgcttgtgggctgactgcgggagcccaggtttggcaaggtgggttctggaccctaagcgggagggcgcggggctggctcccccatctcctgttgctgcattctcttccagcagagcagtgcccaggatggtggctgagggtaaagctgacagaactggaggtggaggtgaggggagcgtgccccagtggggtggaaataatgtctgttcttctgccatggtgaggacaacagggctgtcacactgaggctgggtggccttctttggggggggggtcccagaagctgggaggggggccttatccactcttgtctcctcagaaagggactctgccagcaccatctccctttactggggcctcccggctcccccaggggcctccctaaagtcatgtcccaagaggctgtgttggagacactaatttgtgggcaggcgcggaggctgaaaagcrgagaaccatttttagcgtctgagttggggtgagatggcccgtgaaggggaccctattgggggcagctgtcctgtccgtctggctcacaggagcttcccctcagagctggagggctgggggctctcgctgcttaccacatgggcaggaggagggtgagagagcacattccaggccacctacccgcacccccagccccgctctggggaaaggagacctcctccagcccagctctgcaggctccatcaacttcctcagaggagctgggagcaggtgggaaagcctggggccttctgctgagggctaggatcccagagctccttctggcctgagagagacccctcatggcttctagcatgtgggagttctagcacgtgggagcttagaggaagaggacgctgggcgaatctttataggggcctagcaagaatttgtggaactaaaaggatgctcagtgttggcagtgtcctggtgggaggcagagggtcccagatggcaactcttcatggggctcctctccaaatgtccctgtccctaggttgggatgtcctcctccactccaaaaggcacaggctgtgggccaggtaagggagtgagaagagaaaaataatgcccatcttctagaaggacaaatggaatccttcacagtgcagcaggtgacggcggaggcagtcatgggaataaagctaccaactgcacagaggctgggtgctcagcatctggcaaagcagggcaggctccggccccagcccacacccaggccagccctgctttcagcagttttctatcctgggagtatgtgacattggttcattggaagacagggtcctgtggctaaagagtttagatatgacttctgtggagcctttctctgggtgagctgaaggaaggtcccttgcctgggttgaaggggcaggggagataaggccttccagagcttcctttcccagtgttaagtcttcctagactgattaatgatcctttttctagaaggacctggggkaggaggtacactgtcacctttggaattcaagcatcctaccatccatgctggcagaagattttcccactaacttgtcacaattccctgggagctgtgaagtctgcatytgggttcagtggaggtggggttttctgagctggtctgtgtcttcctggggattgagaaagcccccctctctctcaagactcaggggatgcttctgagaatggcggagagaagagagggagtgggagctagaaagagtacgatgggtcctgaggcaatgtggggaatttagcagtggggtctggaatattggaaggaggtagcagaggaccgtgttccctgccctgggctggggaggggtcccatcaggatggtgcatgagggatatctacagttgtcctgagggtgtctcagaggaggaattttctttctttgccctctctggagaacagctctaccacaaaggcacctgaaggtggggttgagggctggcatggagaagagccagggtggggaagtcttggggctcctttctcttttcagcgatgttaggaggtgcccaccttggccctgccccatgtatcccagcccttgctgaggacagcacagattcgcatctgatgatataaccagcagtgcctctctctgggccactcaaaccttggttccttcctagctctgccacctactgagagtcactcactgaacacctctaagcctcaggttcttgatgtgtacatggagaggaggaagcatgttgctgagaggattaaatgagataatatgttcagtgaaagtccccacagtgcctgacacccgagggtgactctgaaatggtggctagtattatcatgcctcctgtgggtgctccgtggaggtggaggtaaactaccaggcctctccacaccagagggaaattgagcctagtgggtgagtgtagaattcaagggaattgtttgtggctggaggaagagagctgtgtgcttggggaggtgactgtcagggcaactcttgatcaatacttggctggttctggggacttggagcccaaccagttggtgcaaattgggggttggggatcgggagggaaggtggggacttagatcctcctgacacagagttgagaatgaaaaatgttaaaacacttggatatgcaggaagtagcaggccagagaggactcgaagatccttagaaggagccatagacggaaccataggaggcgcccaggagctatgggctccagaaggtacccgcaagtcctcttgcacattccttgacctggtctcaataaaaatgacatcacatctcttcccccactccacggctgtgagattttctctttctagccaatacctttcatgaagtaggtgcttccacctctccatctttgttctagggaagaccrgaaaggcatctttatagtcaactggtattctttgccttgatactcatgtccaaaaactattaccacttttgggctcaatgccaggcctgtttgatcaaggttgggaagacacacttcagatactcacaatccttcatatgtctctcttttttcaacagtttcctcctaaactgtggtctcagcgaggctcattgacactcaccggggtttcgacattctccctggctagggcctgttctggaaatagaccaagggggagatggagcccctggccgtgggacatccaatctgatggtgatgagaaggcatgatgcctcttgttctattcttttttgtttcttctttttttttaaataaaaaagaccagtaatgtgctgacttcataacaaggtttgagggaggcacttctcacacgtgagcatgaaaacccaatcgtcacgcttcttaactgcaaaaggatcacctcttgttctattgtattgcatgtacacatgatgcacagacaggaatacacagacagcaaataacttgttgggcagataatccccggagttgttcctgagtagaaagatctgggtagttactctgggcccccaaggctgagcagtgtcagtaaacagatggtgccagaaaaggtatctcacgcagctagttgtgaaagacgtcaggctcatgcacttgcagtcacacctaagcacccattttcatagcccactgccaccagggctgagggaggggccgctacaccatgcaacccccacttcagactgctgtttgctttcttgggaattataactttaagattgcctgtgataactgataaccactggacttgtttgaaaggttagatggtgtgtgcatgtgtgtsygtatgtgcrtrtgtgtctgtgtgtgtctgcgtgtttctctgtgtgtgtgtagatacagggtaatttgcaggggatgtctacagccaaaatgatggaggcaggatgctggaggcagagagtaaggggttgtggcatttgccacaacaaagcagagttcaarctatcacttactarctatgtaacccccagccagttgattagcccttctgtgacttagtttcctcacctgtaaacagggttaagatctacctcatagggttgttgtgtggattcacttagatgatgtttgcaaagggtttggcataatgtctggtacatgggaagagctcaataaatgttagccagtgctgttattaggataaccagggcgaagaaatgtcagtcatggaagtcttcctggaggaggaagtcctggagctagcatgggagggagggaagcaggcctattctatgaaaggtgtaggataggtgtgtgtgtagttgcgggctgtgagaggtgcaagaagctgcgaagaagatggaatgagctctgctgggaacccagagtaattttagggttttttttttttgttttttttttttttagaatacagtctgaaaaaccagggaggggaggggagcacctgatggaagacgccagcgtgctcccttacatggtctagacgggcccctgcaggggctacagatgaggaggcagagaaacaggcggccttaacaggggagagccagccttggagaggatgtattgtgaattgggggtgggggtgccaacgtgccaggtctcatttctcacttccaaggccacccttccctggcccagtcttagtcgccctttctaatagattctaagagtttgactcctccttccggaaacttggggtttgtgagttctaatcttcagtctctcagttgctatgagaccctgtgcaagtcccaaaacttccctggacctcaatgtccagagaagccatgttttggatgaaaaactagaaagtgggagaggcagggcgcaatcctctttgagtctcctgctcctggtgtgggacagagaaagctcccrgggagagctgctcagctgcaggcagtgagggaagggaaggagggaaggggaggacccaggcagcatccagaccagggtggggaagagaacttattcttaagcaacttattcttaagcagcttcctgttctcttagccttgaacttgaagccaggaatagggacagggatagaagagccaaggcttggagccgctggcctatgcagatgcacttgcttgtccagcaacagttggacagggcctggcctgggcaatgtgctccggggtgcatggaaaatgtggtcattctttgtccgggggattcttcttattccctcccatttctctttacagagaattttacacttccttgcagacactgaattattgtgttaaattattataacttaatagcttgtgaaatatacaaacaacaagattatgccgacatggctgttaraagacaagacaaattagcagactcatgctcatttctgtcattgaacaattcgtctcattccttcctcaaggcgctgccgttttcctgctctccgtccgtgggggtgtttgtttacacatctctcgcaagaaaagcgcttctctctggcttccctctgcctccccccctccttcctgccctctcccctgccttcccttcctccttccttctctccctccctccttttctccccgttcctttcttcccttctctctgtccttcccccttccttcctttactgatgtaacaaccttggtgtgcygtggctaagccacactccacccctgacctgcgggggatgagtcaaacggtcagacttgcctgggcttgttccacrctcccctggctagacaggcgtctacacattctcagttaggggctggacaggggcagctgctagacaggtcctattctgggcctctctgagaaaaagtgtccctgaaaagaaagggagctcccacttccatggacccttagccatgccaaggggcagtaccggctttctgctggtgctgatgagctgtggtgtgaactcacgaaggtcagctgattcacgggccctggatctctgctctccttccgctaagtgggactcgggccagcctgccatgaaggaggtagctgctgcagctttcaggaaggaacaccaggtgtcaaccccaccgggtggccaaccccacctggctaggacccagtccctggtggctgctctcccgagaggcgggcagggctggggctaggggctgtccaggagtgttctggactgtcccttcgccacaattcccacaggctgctcaggaccgaggctgagacgggcgaccaggacgggattgtatggctgcaggaggctacacagtcccaggaggctgcttctaagaggcccacgtggcctgcatggggatgcgcctggctgtccagcatgtggtcatttgaattgkacatgtttcactgggatgcctacagaaaagtagacagaagatgtggaaaaagtttttgaaatgttgcaaacttagctacttttaaaataaaaaaaatagctttataattataaaagcaatatgtaaatcttaaaataatttgctacattctagtaagcatcttatgatctctatgtgccctataacattatgttgtatagtttaaatatatacaataaaatctattttaaaaaatagcaggcaattaaatctcattttaaaaagagtcagtttaactcccttctaatttctacccctcgttttccctctgtgtgtgtgtatgtgtgtatgtcatcttcgttaaatggctcaatgcattccgaatattttttccgttgtcttcatgatatattcatgggaaggggagtatgtggcttattgctgttagtttatcaatagagaatgctggccaaatgtctttaakagtaatgacgatctcaatagcggtaatgacagctaccactttcggagctcctcctgcctaccaggcaccactggggtccctctctgcagcccctcacgccatcctcctagtcactttctgaggtgtgtgtggtcatcctcccatttgcaggagggctctgaagcacaggaaggttcgatacttaccccatggccgggataagatgggccagggccaggctgtgaactaaggcagagaaggggctctccagcacctttcctgagcccttgcctcctctgcctctgccccatggccatctggtgggtggacacagctaagccatggctagaacccagcattctcatgactgctttaaccatagaaaatcacaagttgcaagcaacgggacacacatttacttgtctacattagcacttgtgatgaagataattcatgctatttttttccccattcggaacgtacctgtccttagaatagttagagaagttttatgaggattgtgtaactagcattaacttaggtcacctaattcttgatcaaccaaatcgcaggtcaaacaaaggaggcctatgccttcatagaaagcatcagttaatgtccatttaaaaactgatgctggccgggcccggtggctcatgcctgtaatcccagcactttgggaggccgaggcgggtggatcacgagctcaggagatcgagaccatcctggctaacacggtgaaaacccatctctattaaaaatacaaaaattagctgggcgtggtggcacatgcctgtaatcccagctacttgggaggctgaagcagggagaattgcttgaactctggaggtgaaggttacagtgaaccaagatcgtgtcatttcactacagcctgggtgacagagcgaaagtctgtctcaaaaaaaaaaaacaaacaaactgatgttgcatcttccagtctaaaataaaaatacattgttaaccatttttatgtttacaaaacctacagttttatagttctaaaagtagtacatgttcattactttttatttatttatttattttttgagacagagtctcactctgtggctggagtgcagtggcgcgatcaaggctcactgcaagctccgcctcccgggtttacgccattctcctgcctcagtctcccgagtagctgagattacaggcatgagccaccgcgcccagtccatgttcattactttttaaagatcagtcaattaaagctaatttttaagaaagaattaagcttatatattcttccaatgtctaacatctattttcttataagtgtgtcttatttcatggaaataatgcctcatttattattttagtaagttttggcaacctagttaactcagttcacttgtccagtatgtcaaatcttcattttactctgggaccaactgtgaagacatctggaaccaaggggtgtggtaggggttatatggctctgttgtttgtagttagctttgcatttttgcttcttgatcattagatcagaaactagacctcatctcatgagtgcttatgtattgattgattatttgggtcagtcagggttgctgacatttgaaatgcatgcagggtaggaataaaatggttgtgatgcatttggttagcaaatagcccactttcccaggactgatgagagggacatttggaggctcatgacaggcagcatgatagaggggagtcagcctggtctcacyggcaggtcttcaaagctcagactttcgtgtctgtggaaggctgggttacacgatttaacaaaaacaaacctgaagagtcctcttgtcattggtaagctcccatccccagaaatcatccagtatatttctctctccacacctgggagacactttcgattcatctagaagtttcttgaattgttctttggctagcagcaatttacttttcttttccttgtattcttcttttattcttgtcttgacaaactgttcaaatatcttaaaacacagacacagaagaaaaacatctgacattttggtatctttcatctgaccatccatatccaatgttctcatttaaacattacccagcatcattgtttataatcagaaactctggtcctcctgtctggtggcacttagagtcttttgtgccataatgcagcagtatggagggaggattttatggggaaatggggatagtcttcatgaccacaaataaataaataaaggaaaactaagctgcattgtgggttttgaaaaggttattatacttcttaacaattctttttttcagggacttttctagcagtatgactgttacttgaccttcttttaaaagcattcccaaaatgctctattttagatagattaacattaaccaacataattttttttagatcgagtcagcataaatttctaagtcagcctctagtcgtgtttcatctctttcacctgcattttatttgctgtttgtctgaagaaaggaaagaggaaagcaaatacgaattgtactatttgtaccaaatctttgggattcattggcaaataatttcagtgtggtgtattattaaataaaaaaaaaaytttgtttcctaggttgaaggtctaattgatacgtttgacttatgatgaccgtttatgcactttcaaatgaatttgctttcaaaataaatgaagagcagctgtccttctttcctcttttaagtgttcagctgtggcatgctcagaggttcctgctggattccagctggagcagtgtgatacccttctttttcagctgttcgtgccttcctttcttgtatccaccaaagtggagacaaawacatgatctcaaagatacacagtacctacttaattccagctgatgggagaccaaagaatttgcaagtggatggtttggtatcactgtaaataaaaagagggcctgggaattcttgcgattccaaaaaaaaaaaaaaaagaaaaacatcatgaaattgcatattagaaatgaaatcttgtattccaagcacaacatgagaaagcagcaagaatctatggcaaaagctgttcttgttcacagctgctggagttatgagcaatagcctttcagcatagctctcaaggatccaagcggtctgaataattaaacctgggtccccacacggcccggcgtttctctacatgcaggtgccatttctgggtcaaatgtgaaacagccctgctggagaaacccggagaatgacttggctgccctctctgcaggcgtctggaaccaagtggtggtttggaacctgtgctgtaggctgcagtggtcctcactgtggcctctgagcagcatccgtcatgcgcggcctcctcactttctcatcacggccagtggcaccagaacatagtagagcacttagttcatgctagtcacttcctagggtgacgtaattgacattctcccaaaatgagtctcccaaaaatgaccttaacttgtgaaaagaaagtaaattctgcatctctgatccccacttgtgaacctgggtgtctggcrccttggggaggactcagggcgcataagcggcctcttctgaggaggtcacgggatgccaggctgcctgggtcatcagtgtggaaacaactggccaggaggcctgaccctcaggtactgggcacgcccctgtctgaccagaaatgcatctcaaatgctgccccaaacaggaaaaccctgttcttcagtgggaagaacacgcacatcagccggcaggcaattctgggcaagtctccagggcacttctcctggaacctggcagcccacataacgagatgcaatctctttgtgacaggccacagaacctcttctctgtcagagtaagatggatcactgttctaacaactgaaaaacggtcatttatggactacagagtcaaagagggacaaagttctttcattcctcatgctaccccaaactcaagaatgttaaaaataaactgaagataagtgcttatgcaaacataaataaaaatatcaagagaaagtccacataggatcctataaggccaataaatagcaactgtgcaccaatccaaccaactgccaggccgatcctagaatgtgaccgaggaccaagcaggcagcttcttctacactcatgccaagtgagtggggatgagaaaggaagggcaggcaggtgaaagcctcgaccccagcactgctcagccccttctcctgagcagctctcttcccacttttcttattgtttcagattccatgtcagtagtggcaaacctttacaggattatgaatacaaaatgccactggtctcctgaagatacagcagcaaaatgaaacatccacaaatatgacttaaattgagaatatgtgcatgtctatgtaagtaagaatatgattggcttcttttttttttcctttctttctttttttttttttttgaggcagagtcttgctctattgcccaggctggagtgcaatggcatgatcttggcttactgcaacctctgcctcctgggttcaagcagttctcctgcctcagcctcccaagttgctgggactataggtgtgtgccaccatgcccagctaattttttttgtatttttagtagagacagggtttcaccatgttggccagcctggttgcgaactcctgacctcaggtgatccacccgcctcagccttacaaagtgctgggattacaggtgtaagccaccatgccaggccataattggcttcttataccttcaaggcaaatagcaatgtaagttcttagttatcttatatttaactaataaaaaatgaatgcagggttattatccaaataaaagcatgtggctccatcattagctagagttttgctctattaattttagacctagagagaaagcctggctggctgtggggtcagggctcttcagaaatgcctgcttctctctctgcctagaaccgtttctccatctcatcaaatgcttctctctttcctctccctttgctctgttactttattttatgctgctataatttaacatcgcaggttttgtttttcatccttaacaaattataccagctttatccaaagtggagcatgactttttaaaagagattccattggctattatatcattgctgtatgttctaccgcaataaaacaaaacactatttgttgccatagaaacaggcctgattcacactgccttgaccctgattctgtgtaggatcaccctcttctcctgtgcagctcatccagcagaggaagggctgtgattttcacaccaggggccttagctttccccatgaaaacgctgtatgacactaggtcctgtacagattctatgtctgatacttctaacccaatttcttcctaaataggactgtggtctttggatggggtccagctatgatttctttccatcccactcctcatacgagctgccatgctcccctttgatgaggttgcaggcacttcttctgagcactctctggaccctccagtgcactggctacggcgtggcctgcttcctcctctttcccactggaccttctgggaccaagttgcaggacgttaggacaggcccacagtttcctctgggtgatctcacggggacctttaaaggttttccccaggcaataggtacttagcatgagctatattctcatctcatctatttgcagaggacccacccaggcaaggccagggcatcccagcccaggyaggcccaaccccatcagggctggcatctgtggtctctgacgatggcctgaggaaggtccagcctcacagtgctccctttgatgagccctgggtgggatgcccacgtcccccagacatcaggggaccagccctgccctgcccatgaaccacttccaaccagcaagcagactgggcccctgtgttcccagctgttctaagagatgtgccttagcatttaaactagaatatttggaaggggcttgatcataaattgtaattttctttttgtggtgaggatgatcttacttattcaatgttttttaaagggactaacagcctcaaaaggtatctatggcacagagagagaacaactggcaacagcaaacaagtcggtggtggcacacgtggcacgtgccacgcacaccacacacaacccacacaccacacacagcacacatgccccacacaccacacacaccccagatgtactgatgattttagacactgcccggtttatggctcctgcctctgtcctccagtgattctgtcacataaaaacacaggctccttgttatgctttttcacagccgattttttttttttttgagatggagttttgctcttattgcccaggctggagtgcagtggcgtgatctcagctcactgcaacctgtgcctcccgggttcaagtgattctcctgcctcagcctcctgagtaactgggattacaagcaagcaccactacacttggctaatttttggcatttttagtaaagacagcgttttgccatgttgtccaggctggtctggaactcctgacctcaggtgatccgcccacctcggcctccaaaagggctgggattacaggcatgagccatcgtgcccagcccatagctgaaatttttgatttttaaaattgcaaaaaagggcgaaatatgaccagttattaatgtctatggttttcctttgctataggaaaaatatatataacacccaaactcagctaactctattgtagcattattttgaggctgtgataacacattttgcatattttaaaatatttctttatagaaaatgaaactcagctagaagacaataaaatattattaattccaagttcttgcaaggttcaagttctgtattccaaggcagtcaatcctgggaacacgtcacactgcccagcctacccctgagcctgcaccagcgagagggtacagttccaacgagcggagtggtgggtcgagggctcggaatgggagtgaggacagagcgggagttggttacaacgagcaacgcgggtccatatgactgagactctgtgggttcgcgcttcactgacaccatctcaggcatttgcttaaagggactttatgagcagaggacagaattgaaaataaaatggcaattcccataccctccatctggggctttatcagactctgctggtgtgagaaatccagtggacaccaacatgggggcccctggtcacagaacccctcctcccctaattaactctggctcttctgttttcagcggctcttcttgatagctcaccttccacgtgcatcatttctgaactcaaagggcaaagagagggcaagatgtggccgcacacatggagtctaactggggcagggaagtccggaccttccagagtctatctcagggcccttctcagacacgctccacgggccacacaaacccaggctgtgcccgctgatgctgtcagaccatcggtccctctcccagcaacaacaggcccctcctgtgagccaacaccatctgtccctctgtttgatacggaaagcagtgttggctcagggacctactttgtgaaaagctagggcagacccctggcaagtctctccttaaaatagcccccggagaaccccctctaatcaattccgtgttttgtgggcggtgttttgtagaactccacccttcactgtgctgcggttgttctctggaccactcctatttcatcagtgttattgtcaacctgaagaacaagcagaaagaggctctctgaaatgaaatggatgcttatttgggaagagagcattgcaacgggaatacacatgccatcgtaaatgacaagaatattcagggaggtaaaaaaaaagacaataatttttaaggaaaaataaatgagaggattaaatcattgttttgaaataattatctttggctacagagatccataccaggacaaagccagtctgaggttggacaggcagttgttgggcaggtgtccttgcagaagtgctttttgtgtgtataaggttgtgatgagccaggtgcggtggctcacgcctataatcccaacactttcggagcccaaggtggaaggattgcttgagcccaggagttcaagatgagcctggggaatatacagcaaccaaatctctacaaaaagtacaaaaattagccaggcgtggtggctggtgcctgtagtcccagctactcaggaggctgaggtgggaggatggcttgagcccaggaagtggaggttgcagtgagccaagattgcaccactgtactccagcctgggcaacagagccagatcctgtctaaaataaaatgaaataaaataaaataaaataaaaggtttttacggccttgtgtgcaagactgtggttctcgtagagtctttttagttatcaggtatacaagtatgagaaccctctcttcatggccttcctccattctatttgttaggggtttcttaacattagtgacttcattttgattctgacaactttcatattacataagactttaagcatataaaaccttaaggtcttatgtaagaccacctatttcactatctttatataatacctgaagtatttcgtatttttaacatatgatttatagtcatttggaatgagggttaatgttcctaaaatttacatgttcatctttaaaagtatttgtcttccagggtcataaccaaatactgaggtaagaataatgaccagaataaccttcctcagtccctctaactctgcttacaagctcgcaagctacagtactggagctgtaactcctccccactggccaaatttacaacatgggtgtctgttattcagcaatgaaaagctccccagatccaggatgcaacagtcgctttcatgctgcgtctctgcagtcaaagtgccttcccaccccgttacctgctttcgttcctcagagttgagcaggagatagcgtgggtcaaacacgattttgtgtaattctttctcccaggtagaaaatgctgatacctaaagaaagatattcaatagagtggctgttagcatctaatgctaagcctgaagctgcactgaaatgatccacagttaaaaacaagtgaacaacaaaaaccatcattaaagtacaatagattcagtgatgtggtgcagtataagtgttagacatgtcagacgttccaagaaaatcaatacctagaacatcagaaaatttaatttctagacttgtgactatttctttcttgggtatctttcagggctgtctctcccgatctgaaaccccaattatacctgtgaaggcatggcattctggaacaccccatttcaaaaggagaaattatatttgtaaaaattttcagaacccctacagaccataacaaagagtaatgtcttgaaaacaggctgagtttagttgatttgtaatcaaagtttaacctcttttaggtaggtcatttttaaaataaattattttgtttgcaatagttttacatgtactaaaaatttgcaagaatattacagaaagttatcatatactcatacccaatttctcacgttgttaacatattagtaggctagattcgtcaccactaacactgatacattattactaacaatagtctgcatttattcagatttctttaggttttacccaattttctgtttttgcccaggaccccatcacatttggctgccatatctccttggactcctcttggctgtgacagggtctcagacggcccttgccgttgatgaccttgatggtttgaagagccctaatcaggtgcattgcaggacgctcctcagttgggatttgtctgaggctttcctcgtaaatagcctggggttatgggttttgggaggaagaccacacagataaatgccattctcatcatgtcataacaagggtacacacgctgctgacatgactcttcactgacagtggtggctgtagtcggctggctgaggtctccccactgtgaagtccccctctccatgctgtactctctggaaggacgtcgccatgcacagccgacacttaggggtatgggttgtgctccacttccgaggaggagaagtagctacatgagtgactgggaaatgtcctgggggggatactcatccatgcctccacattacttatgtactcaatcttttatttatattgctatggactcatggatactcagcccatgctcgggctggactccagtgtgactttgcttcttttcctgctcagcttcttcgaggttggccttggtgagctcccgtggtgggttcccagctcctgtgtgcctctgacaggtgctcatcacttggctttttgggcatctccttaatttctgctactaaagatgctcctggcttatcttctgcatgtcctgcctttgcccttgaatcagtcaattctccaagaagctctggctcctttcctagaacagtgttagaaaccaagatctgggcactggtgtgttcattgctagtgaggtgttgttgcttctagactctctcagctgatagagcaagggaatgtttaagccatttagaacataaatgcattcatttaaaaacatggactatgtattcactgtgccttgggccccaagctgggtgttgaggatcttgagaaaataaatcaaggaagcccatggtctagggtagtgctggtgaggagataacagactcttgagatggcactagggccatggcggagacagacctggacactagtgggacccagcaaagacccacagcagcctggggaggcggcttccagagtgctgcgactttggaacatgaatactcctgagggttcacaaacgagcctggggggtattccaggaccagctggtaggggggcaaaggttgggtcatgaactatggggaatgcaagaattgcaagaggttgaacatgcctgggggtgcagagacagaggctgaggtgcagggcagtctgagacatggttaggagcctgggcattctcttgagagacaggggagaagaaaattcagatggagcgttcatttcaggaaggccaccctgggatctgggcaggagatgaatacctggcagggtcagggaagggaaggtaattgaaagtttacaaaaacaaaaccccattcacattcttaaagtattcttcatagaggtactatttcaataaacacatgctttatttgtatattataacagatgaattttcttcactggcaatttctatctttaactgtcaaatttaagccttttctgtaatacccatgagctcttttattgggtgggatgacccagggtccagccagggattctcctccacagagtgagaacacggtgaagcatagctgggactcagggcgaggtggcgattcaggggggtttccaggcagaatggatccgtttagcttcgactgagtgcacctgcccccaggagcgggtctccaggcagaatggatccctttagctttgactagtgcacctgcccccgggagcatctggggctgttagagaagctgtgggcagcctccactcagcccaatcagatggcacacacccacctcatggggacctgtgcacagctggatggtcccagctctgcagggagagaggattagaccctgtgtggcataacgacaccagtttctggaaaatgttggagttctagaagtataataaaataatttttcaattaatgatgtgtagtttttgcccccgaagggatttataatctctatagaaggtcagataagccatctctacaatgattacaactcataatgataaaaccaactgtgtcatgtcagggacagttcagggaagggtgagagcacagtggctgggacccaggatggaggtgggggctgaagtgaaggctgcacagccatgtgtgaaacagggtctttccctgacctccaggtgggcgcaggacttctcccaaagggtcctgacagctatggggacgaggagtcctatgaactgctcctgagggaagcccgtcgttcccgagcctgtgtgaaacacttatgatgcccagagagtacattccatggggccacgattgcacacgtgtgtgtgactatacacacacacataagcacacacaccacacatacaaacattcacagaggcgcatgtacacatgcaaacacatgaacacacccaggacacgctaagatatgcatacacaggcacacatgtacatagttgcacaaatgcatacatatgtacaaagatgcacacattgatacacacatgcacatgtgtgcctacacacacacacacacacacacacacacacagtaccactaccaccaccaaggaagtccaacattgtagaacaaccaggggaagaaagcccgtcaactgagtagacagcaagctgcgtatctcttttaagtccgtctatgtcgtgggactgttctgtaagtggccgtggacaaacccagctctccctgtttctggctggtacctctccagaatgactggaatgcactgggaatgcaacagactgagaacaatcaggctttgtttgggccccgccccagaaacaagacatccttcaagctttagcccagcattcacaggaccccagggtataaaacccactgcgggctgctttctgggatcccttggttacagcaaagggtagatgcgactccgtcccctccttgcagctttcctgggcctgggggactggcttacaagcaccttcatcttctaccacccttgcttcctgtctgcggggaataaacgcacttcagatgatttgctgctcatcttctaccacccttgcttcctgtctgcagggaataaacccacattccctgccctccagcactgaatagtatccgtggaggactagtggagaataaagaattttgctgttgcccagagatgaccaggccacccccacgtcctgtattgtctgtggaggtcacatgcggccagtaaggaggaatgtctacctctcccaggcatcggggtatcaatgggcaccccaatggggagccaggattgctatcctcacctatgctgtaataaaggcccccctgtgtgtattgatggagctcaagtggaaagatggattataccctcaccgaacagtaccaaagtgtcttctccttcacctgctggagggatgccagctaaaaccagccagaacagaagattcagatcatacacagaatctcataatatcccgaatgaccagattgcaatagaaaaatcactcatatgaagaaagcagaatacttcaaagcaaattaaaacacaaaatcagtagatgttgaaattgagatgacagtgatgctagaattatctgacaaagattttaagtcagccatcatcaaaaatgtgtttccatttatgcaattgtggacagatttaagcaaatgaaaaaaaaaaaaaacccagaaaattgctgcaaataaacagcagatttataaaagaaacaaaaagaaatgttagggctaaaacatacaataacaaaatgaaacactaaaccacagaacaggggggcagagggaataatcagatgatactgcacctggaagactgtttgccacttgaatatagaacaataaaattacccaatctaaataatagtcagaaaatagaccaaacaaatgaacagagcttcagggatgtagaacaataaaattactcaacctatagtcagaaaatacacacacacacacacacacacacacacacacacacacacacacacacacaaaatgaacagagcttcagggcctgtaggacaataagaaaagttctaaagtttgtgtcaacagtcctggaagagaagaagggagagggtgggtgcggaaagtacacaaagaaagagtgtctgaacacttcccaaatttggcaaaggacaaaactatagattcaagaagctgagcaaatcttaaatgggataaatggaaagaaatccacattaagacacattatagtcaaacttatgaaatgcacatatcatagtaaaagtataaagactagagacaacaaaaatattttaaaagcagcgagagccagacatggtggctcacacctgtaatcccagcactttgagaggcacaggcaggtggatcacctgaggtcaggggttcaagaccagcctggccaacatggtgaaaccccgtctctactaaaaatacaaaaattagcagattcttcatcagaagccataaggccctaaggaaatggttggacagttttcaagtactgaatggaaagaaacatcaacccagaatcctatgcccagcaaaatatacccttcaggaatgaagagaaaattagaacgttcgaagacaatagaaaactaagagaaagtattgccaatagattccttcaaaagaatggttaaaggaagttctctagacaaacagtaagcaataaaagaaggaatcttgggacactaggaaagaagataaaaaccttggtttttccacaaccctttactgtaacccagacattcttttctgttgattccagctctttagataataaccaattgctaattagaaaatctttgaatctgctatgaccaggaagcctctgcttccggttgtcctgcctttccagactgaaccaatgtatatcttacatatattgtttgatgtcttatttcttcctaaaagacatagtttataaaccaatttgtaggctgactaccatgggcacatgtcatcagggcctcctgaggcttgtcacaggcatgtccttagctttggcaaaataaactcccaaattaattgagactaggctcaggtacttttggtttatagttttctcagtagagggtgcttggagaacactgcaaggagaaacgggctgtcctgctgcttctggggccataaagttgagaagtggtatgaggtgggtgctctgcccagtcatgtgcccagaggggagtcactcagtgacctcagagcctggcctgtctcttgccctctggacatagacacagcactcactattcctccagtcccgctaatgcattcacttcctttgctcacctgcaccccacctgcactgcagagggttgccattggcaccttcctccctctgaaaacctgcatgccgggtttcctgcaccccgaagttgcttcctgcctgcccaactagcaactgagggccaactcgcctgggaaaatcagcaaatgtctctacctcccagtgggttgcaactgtaccttctccagtgaggtctgaacctcagacttggggaggggtccccctttcaagcttgtccttctttgagtactctacctcagtccaaaagtactacagagttttattatatattatagttactcttttcttttaaataaatttttaattttagaaaagctttagatttacagaaaagttgcaaagacagtacagattgttccaatatactctacatcctatgtctgccattgtttacatcttacattaccaacgtacgttagtcatagctaatgaaccaacattggtattattatagtttactattagctaaactctgtatctaattaaaatttcattagcttttccccaatgttctttttctgttccaggatcccattcaagatactacattaaatttactcatgtctgaaaaaaatgtctgtgtcctaactcccagaacctgtcaaaatgttaggttacatggcaaaaaggaactacaatttcagatgaaattaaggctgctaatgcactgatcttaaaataggagggttagaggagtaatgtcagcaagatggaagactaggaagcttccagaaatcccccata

SEQ ID NO: 96346 - DNA, 53538 bp, Homo sapiens
gacagtagtctctccaggtggcatgtggcttgagaatttttttggagcttactctatgagtctgtgcctgtctaggtattgtggctcacgcctgtaatcccagcactttgggaagctgaggcggaaggattgcttgagcccaggagaccagccctgggaacatggtgataccctatctttaccccaaaaaaaaaaaaaaaagccaggtgtggtggtgcacacctgtagtcccagctacttgggaggttgaggtgggaggatcacttgaacccaggaggtcgaggctgtcatgagccatgatcatgccactgcactctagcctgggcaacagagcaagaccttgtctcaaaacaaaacaaaaaaaagtgtgtgtgtgtgtgtgtgtgtgtgtgtgtgtgtgccttcagttctgtgtgtgtgtgtacctgtctctatccctaccaggggttgtgtctctatgtctctatttatatctaaatggatattttttgtgccctacattttccaagaggattccttgcaagtttccttttttgttcagaagatcttcctggccgggcacggtggttcacacctgtaatcccaacactttgggaggctgaggcaggtggatcacatggtcaggagtttgagaccagcctggccaatatggtgaaactccatctctactaataatacaaaaattagccaggcatggtggtgggcgcctgtaatcccagctactcagaaggctgaggcaggagaattgcttgaactcgggaggcggaagttgcagtgagccgagatggcaccactgcacacagcctgggcgacagagaaagactctgcctgaaaaaaaaaaaaaaaaagatttttctctatctggtaagcttttaatttttaactttctgccctccaactatgcacatcttcacagtgcagatgtatctctaattgattaactgggtcccttgacagccatcactaaggcaaagctggactgctttgttttgggcatttcttttgtcttctaaaggctcataatgtaggagtctgcagggccaggctcccggctgagtgcttcgagaggatcatcccaggagttgccaccgatgcaggatttttctcagccacattgctgcccagagacctctggccagcaatgccactgccctggccttgcactgttcccaggtttgttgcaggaggcaccctgcccactcagcccaccagggcacagctggattgcactctggcatggatcccacagccaccgtgactttgcactcagcccctgggtgggagggggtgtgtgaactagcaagtgtggggtcccactggcccctgcaagcactgacacaggggcaggctccatgtagggtttgtggctggaccaggtgtgttgcaagcggctcccactgtgtactctggcgttcagacaaggagaacacggcggcacccaaacagggaagcccatgaccctgaagtcccagaggtggtgttatagcatgctaacagctctgttagtccctccacagcctgacgaaaggaggcatgttagtagttctgttatgttgccccactctggcctgtagctccagggctggcctggtcttgccactgctttctgttgcatggggtggccgctaggcaccaatcgtggggagctatggtgctactgccttctttgtacctacattcggcagggtcccaagttcttgtcccacgtccaagaagaatgagatcacacttacaatccaagggtgagaagggtggagaagatttttattattaagtgacataaaagctctcagcagagaggggatgtgagggtagtcccccacctgaagtcaggtggtctctccctcagtgtggctgggtctggggcttttatggacttagaatgggggagtgcatgctgattggtttgtgagtatgcaaaagaggctaaaacaaaggcaccattcaaagatgggcatgacagtgtaaaaaaccaattacgggctgggtgtggtggctcacacctgtaatcccagcactttgggaggccagggcaggcagatcacctgaggtcaggagtttgagaccaggctggccaacatggtaaaaccctgtctctattaaaaattcaaaaatgagccaggcgtggtagcgggcacctgtaatcccagctacttgggaggctgaggcaggagaattgcttgaacccaggaggcggaggttgcagtgaaccaagatcatgccactggactccagcctgggcaacagagcgagactccatctcaaaaaaagaaagaaaagaaaaaaaaattagggaagggtaggtacatgtaaaatagatgaagggtggggaggaatcagaggaaagtgcaccaaacaggaagacaagttctcaatctggtccgtggatttatctgagacttgcagcttggccttcaggcttaaaactgtctttggcttgaagatgaggtttcactggggaaccacccctatctgccaagggatttgactgcctcctgccactatcaccaccacagataaccacaagccaggatattaacgttatggatgatgggcccaggcaatgcactgcacaaggtaagggactgtgagaacacgtgccctatagcgtaggccatctctccagaggctggaaagttagatttgtatgtgacatccgtccatttttcactgtttgcaataattgcaccattttttttttgagtcggagtctcactttgtcgcctaggctggagtgcagtggagcaatctcagctgactgcagcctctacctcctgggttcaagtgatcttcacacctcaacatcccaagtagctgggattacaggcatctgccaccactccaggctaatttttgtatttatatttgtatttttttatatttatttatttttgagacaaacttttgttctgtcacccaggctggagtgcagtggcacgatctcagctcactgcaacctccgcctcctgggttcaagtgattctcctgcctcagcctcccaagtagctggaaccacaggtgccctccaccacacctggctaatttttgtatttttagtagagacaggatttcactatattggccaggctagtctcaaactcctgaccttctgatccgcccgacttggcctcctaaagtgctgggattacaggagtgagccactgcactggcccattgcaccatttttaaaacacaacacctgaccagtaattgcagaaaaatggacaaaggtgattaatgacaaactatgtagaaagaaatgcaaatagctcttaaacacatgaaaagatgaccaatgtcctcatcttaggagaaatgcgaaggaagataccagggcaatacctttttttgttttcttttgacttcttagataggcaaagatgtaaacttcgtttgtttgtttgtttgtttgttttgagacagagtcttgctgtgttgcccaggctagagtgcagtggcacaatctcagctcagtgcaacctccgcctcctgggttcaagcaatcctcctgcctcagccctcctagtagctgggactgcagacacatgccaccacacccagctaatttttgtatttttagtagagacggggttttgccatgttggccaggctggtctcaaactcctgacctcaggtgatccgcctgccttggcctcccaaagtgttgggattacaggcgtgagccaccgcgcccggcctgtttatttgtcttgagatagagtcttgctctgtcactcaggctggagtacagtggcaccattacagctcactgcagccttaacctcccaggctcaggcggtcctcctgcctcagccccccaagtagctagaaccacagtcacacaccatcatagccaggtaatttttaaattttttgtagagatgggggtctcactatgttgcacaggctggtcttgaactcctggtctcaagtgatcctgctgcctcccaaagcactaggattacagacatgagccaccgtgcccggccaatgtaaacatttgataacacatcagattggcaaatgtcagggcctcctagttcagttcttcttggttgatgggaatgacagttgaggttttattgtgatagaaggctttagatttaattgggtagaaacaggccttgctcagcagaaagagctgcaaagtaggcacatcagcctgcaccatgtgaggagacaccaggaacaaatgtgactccgagggaaagcacgaccaagaccataaataaaacctctcttcctgttcagatccaagcacatggacaggctctgagtgacaaccgcattcagtgggctgccctgctagaggttccccaggcctctccaccggtcctgaatcatcagccttcctgaaactggctctgacctaaagccgaaacctcagcaggtctgaggcggttaccagggctccttatattgggtgagtcaaatcacactccctgcaggaaaggagtctaaaaactagaataccaataataaagaaacaaggccagatgcagtggcttatgcctgtaatcccagcattttgggaggccaaggcaggcggattgttgagctaatgagttcgagaccagcctgggcagcatggcgaaacctcatctctacaaaaaatacaaagattagccgggcatggtggcgtgcccctgtagtcccagctacttgaggggctgaggtgggaggatcacttgagcccaggagatcaaggctgcagtgagctgtgatcatgccactgcactccagcctgggtaacagagccagacgctgactcaaaaataaatcaataaatgaaaaataaacaattccactttttgtaataataacaataaagaaacaagctcaagtccatgggtatcagcacactggtgacacgtgtcagcacaagtatgcattagctttgtaatcattataataacacacaattgctttgtctatttgttaaggtatttacaacaatcgcaaacatctgacattagatttgggaaggctttaagcgatggcttttggaaggaatgttgaaatgattagggaaatctggtttcgaggaagacttagaggaacaactgtttaatgttttatcaaagaacaaagattagttagtattcttgtccctacatatgcaagcccctggatgtcagagaattgagcagcatgaagaaatggctacttacggccaggcgtggtagctcacgcttgtaatcccagtactttgggaggccaagacaggcagatcacctgaggtcaagagttcgagaccagcctggccaacatggccaaaccccctctctactaaaaatacaaaaattagccaggcgtggtggcgcgttcctgtaatcccagctactcgggaggctgaggcacaagaattgcttgagcccgggaggtggagcttgcagtgagccaagatctagccactgcactccagcctgggcaacagagcgagactccgtctcaaaaaactaaaataaaataaataaaccccccaaaatccggaatgcaaaacaaacctaggcctacgcctttcacataaggaactgcgtgtggatctgtgctaaaaactctaccaataatacagtaattttacaacccacagcagaaaatgctttcaaaggcggttgttacaaataatgtaatagtagtcaaattagcgttggctctgagtccagcactgtgctccgcgctgcacacgcagtctcacgccgtcctcacgatggcgctgtggggcctggctgaggtttctaggggaaggggctttagggaatccaggctctctggctgtgtgacccctccaagctagcgacttggactacgtgcaacagaccaggtatctctggacttcagtttctcgggagaggcgtccatgaggaggtcatgcatacaaagcatttagcacagtggcagatatgagccagtgggcctggagaatgatttaccagcgtgggggaggcctggcttccagaaaactagctctggggtgtctgagatcagtcaccttgaggtccctggtgcaatctagggccatcagaagggactgcaaagacccaagggcagaggtaaagggagaaaatgggtcgcggccccagcctgaccgaaactgaacctccggattaattcagttgtctatagctggggggatggggaggacaggggagtcctaaggtggaagggtacaggtttgtcattgccacagagagtgcgtgtggtgaagggatttaatttaagatcagccccgggcttctgagaatctggccctgggaagcaacgtaaatacaagaaaatccctgtggccagggactttgatccaagtgtttcgaatcaggccctgggtcgggctcacagctaagcggtttaccaaccgtggacctgtgcaggatcccatggatgtgaggggtggagacggccgcaagcaggaggccaggaccagaaggaaacggaatttgggtgggggtggggagctaggaccagtccccccgcgggggcgtcttggggatgtggaactcgcacacccagaggaggtggctctcccaggggtgggccccggatcctaggggcgcggggctggccccgctcccgctggcctcgcggcaactgggcctccccctcgctgcacgcagccctccaagctcccccgcccgcccgccctcgctcccgctgggccccgcagccggaggaggggcggcctcccgcccccgcccgctggatctcagagtcgccgccccsggcgccgggctgcagccgccacgccccgggagaggaccgaccgcccagaccgccggtcccggggccccctgggccacgccgatcacggggagcccctcgactgcctcccagaacaaagtgggaaagggaagcttagcccgccgctgccgcctccgagcagcccgccaggtgagcgccgggacaggtaggggacccaggtcgggacccaagcgtcagtcccgttctcgcccacagctggggcgccccgggaaggattcccgcgccaggccctgcccggaggggcgggtccctgggagtcccataacccgcagcgtcgctttcccgggccctccctcggcctgaggctcctttaaacccaaagttatacaaatgcacgttagawagccctaaatctggaagggctttgctttgaacgtgggtgttcgaacgcccaggcctctccatccctgcgctcgtccgcggaggccaccatccaaaacccctgccaaacgctgcaaaccaacacgtgggcgcaacagcccggggaaggccaggccgctttttaccgttgctggattttctgtcttctggccgtcagtcccttcgcagaatctgtgaatcagaagccttggagggcggtttctcgatttagcaacttgggcacattatgtgtttcgctgcggccccaaccctcaatttaaattttgttctgccaagttacttttgcaatgttcagtgatatgttcgaaagctctgtatactgcctcttcaactttagacagcgtctatttactccatattttgaaagacaaatattatgggagtctagttgtaaaataaataatacttctttaaaaatgttccagtaatacacgacactcagacacgtaggacaggacagagctttgcatggaaaacaacacgcctttaaacaacaacctctccctcaccaccgcccccaacccctgtcggccaaatacatttttttgttaactacattacttttcaaaaatggcaagaagtaactcgtgatcgctggtgcctcgtttttaactttttccactttttattcctctggtatctatttccaaatctttacagcatatttttggattgttatttcttatttcatcaacttttagacaacgcgtccatggatcccttgctaaaaataggagacaactttgatcatctccgtggttttcctcctccctatataatcacctccctgtatagtcaggacattactttcgacttctctattggctacttttctaacataaaataatttttttaacttgtatttattgttccattaaatatacctagtatctgttgactctctttttgtaaggcttggctaaggagcttctttttaaaaaatatatttttaggccgggcgtgcgcggtggctcacgcttgtaatcccagcactctgggaggccgaggcgggcggatcacctgaggtcaggaattcaagaccagcctggccaacatgaaccccgtctctactaaaagtacaaaaattagccaggcgtggtggtaggcgcctgtaatcccagctactcaggaggctgaggaaggagaatcgcttgaaccctggaggtggaggttgcagtgagccaagattgtgccattgcactccagcctgggtgacaagagcaagactctgtctcaaaaaaaaaaaaactatatatgtacatatatatatgtgtgtatatatatgtgtatatatatatatgtatatatatatatacacatatatatttgagaccctgtctcaatcaaatcaaatcaaatcaaatcaaaactgtgttgcccaggctggagtacagtgtcgtaatcatggctcactgcagcctcaacctcctgggctcaagagatcctcccacctcagcctcctgagtaactagggctacaggtgcacgcccccccaccaaaccccactaatttttttattttttgtggatacggggttttgccgtgttacccaggctggtctcgaactcctgggctcaagccatctgctcgtcttggccatcaaaagtcctgggattacaggtgtgagccaccggcgcccaaacaaaaagatatatttttaaaataacatttttgtatttatgtaaatattaatttcttcaattctaatcaaattctacatatggcttagaaatcaaatagaaaagtttgccttaattttttctataataaaagtatgtaatctcttttagaagaatggaaaacgaagtgttttagattaaaagagatgagtgagacctgccacccccactggtgtttgagcccccacggggatcttgttaggaggaaacagccacagaagacctgctagagacagcaggggaaattgttcacggagtgggtattgatggcagaatgaatttttgaggcagaatctctctctgtcgcccaggctrgagtgcagtggcacaatctcggctcactgcaacctccacctcctgggttcaagcgattctcctgcctcagcctccctagtagctgggattacaagcatgtgccaccacgcctggctaatttttttgtatttttagtagagatggggtttcaccgtgttggtcagcctggtctcgaactcctgacctcgtgatccacccgcgttggcctcccaaagtgctggaattacaagcgtgagccaccacgcctggccaggttgcccttaatcttaggagattcattaggaagtactgaagagtagttcatcaaggccgccaggccggtgacttatgcctgtaatgccagcactttgggaggctgaggagttcgagaccagcctggccaacatgttgaaaccctgtctcgacaaaaataaaaatttagcagggcatgatggcgggtacctgtaatcccagctacttaggaggctgaggcgggagaatagcttgaacccaggaggtggagcttgcagtgagccgagatcgcgccattgcaccccagcctgggcgacaagagcaaaactctgtccaaaaagaaaagagagagtgcaaatatggcaaaatatggagcagatagtgatgttcatttgattactctttcaacttgtctatagaatgaaatttcatagtaaaaattgggagaaaataaagtaagattattttgaaacaaagaaagagacagaagacatgtatacagtagcacaaactatggagtccaatataccaagattcaaatcccagcaggttttttttttttttctttgagatggggtctcactctgtcgcccaggctgcagtgcagtggcacaatcacagctcactgcaaccttgacctcctgggttcaagcaattctcctgcctcagcttcctgagtagctgggattacaggtgcgtgccaccacacccagctaatttttatatttttagtagagatggggtttcatcatgttggccaggctggtctcgaactcctgacctcaggtgatccacctgccttggcctcccagagtgctggggataacaggtgtgagtgagccactgctcccggcctagtttttttgtttgtttttttctatcattcttttcccttggtcccagcttataaaacccaccattctcttactacccagtgggggtctcagtctgttttgtaaaatggaggctgccccattcaagaatcttgaataaaagcccattagatctataactaaatttgttgtaattttgtcttttgacatggctctgttgcttctttgttgggtgaccttgggcacgttgctgtcatcctccaagcctcagtttccccatgtgcctacttcatggggtggtttgaggcttctgtgagattttgtaaagcaattcccacatgcctagagcaaagtaagtgctcagttaacagtagctgttagtattctgtgaaggcatctccttaactattatagcctgttcacctatgactaacactgtcaacataactgctgcagctgggccctttttcttttcttctttttttttttttaattggcacagggtttcactctcacccaggctggagtgcagtggcacagtcttggctcactgcagcctcaacttcctgggctcaagtgatcctcccacttcagcctcccgagtagctgggaccacaagtgcacaccaccatgcctggctaattgttaaattttgtttgtagagacaggggtctcactatgttacccaggctggtcttaaactcttgggctcaagccatcctcctgccttggcctctcaaagtgctgggattacaagcgtgagccacagcacccagtcaccacccatttttctagggatagatttggaacttggtattttctttttccttttgcaaattcaacgaatgatcgtgccagaggttcagtttttgtcctgctgtgtttcgccttgttttttcctaagcgtgtctgtccttatcccacattcttctagtctctgatggcagcatatggaggtgcccacgtggactcctccaatcccatagctgggtgtttgctgctaatcatagtaactcctcacagtggcagcaaacatttgtcgagggccagaccctgatctcatgaaatttccctacaaccgtgaggggcaggggttattagaggtccatcatctctgatccaaagctcttggggccagatgcatttgggagtctagactttgaattttttttttttttttttgagayggactctcctttgtcacccaggctggagtgcagtgttgtgatcttggctgactgccacctccacctcccaggttcaagccattctcctgcctcagcctcccaagtagctgtgattataggcatgcaccaccacacccagctcatttttgtattttagtagagatgggtttcactatgttgaccaggctggtctcgaactcctgacctcaagtgatctgcctgccttgacctcccaaagtgctgggattataggcgtgagtcaccatgcccagcctagactttgaatattaagcaagtcatacggagcccatttggtatgttacataagtcccctagtagggctgaggagcatttgtgtaatcaaacactaataggccttcagtgaaatgcacgttcattctcaggggagtaactaaagactatacaaaacctcatgacagctcaagtcagctcctgccaccaaatgggtctgggaaaaactgttggttttctgagcttttgaacatgtagattgtggatgacagatgtggacctgcatatttcccatcttgcagaggggacatcctcacacacgaagagagaaagggccagccgtggtggctcacgcctataatcccagcactttgggaggctgaggtgggcagatcatttgaggtcaggagttctagaccagcctggccaacatggtgaaaccccatctctactaaaaacacaaaaattagccaggcatggtggtgtgtgcctgtggtcccaggtccagaagaggctgagtcaggaggatcgatttagtccagaaattggaggctgcagtgagctatgatcgtggccatgcactccagcctgggcaacacagtgagaccctgtctcaaaaaaaaawttttttttttttttgcttttgataatcattcatgttctgggtacttgtggcttattccttattttgtatttgtattatttataatatttgtatttgcaatatttgtattattgtgctatatagtagtccatcttatcttattaatgacttatttgtatgtgctacagtggacaggcatctgggacttttccaatctgaagctgttaggaacaccaccaccatgaatattcttgtatgtgttttctggctctggggtggagttgctgggtcatggggcaggcacattttcatttttacttcagtaaaaaatgtccagtgggccaggcacaatggctcatgcctataatcccagcacttcgggaagccaaggcaggaggatcacttgagctcaggaggttgagaccagcctggccaacgtggtgaaaccctgtctctactaaaaatacaaaaattagcagagcatggtggcagagtagctgtaatcccagctacctgggagtctgaggcacaagaatcacttgaacccagaaggtggaggttgcagtgagtcgagatcatgccactgcactccagcctgggcgatagagtgagattcagtctcaaaaaaaaaaaaaaaaaaaaaaaaagcccagtggtttccaaagtgattccaaatggattmcaccaggaatgtatgggagttctctttgatagtatttttagtgaattgcagtaacattgcactgttttgtgtttgctcattttcttttttcttttctttctttttttttttttttggagatggagtctctgtcacccaggctggagtgcagtggcgggatcttggctcactgtagcctcaacttctgggctcaagcgatyctcccacctcagcctctctaataactgggactacacacacacgccaccatgccctgctaatttttttgtagagacgggggtctcactatgttgcccaggctcgtcttgaactcgtgggctcaagcgatcatcccaccttagcctcccaaagtgctgggattacaggtgtgagccatcgcacccagctgtacatttgcttttacattgtcaaggtggaaacatctacagtctgttctgtttccatatttaagccctacatgctttaattgcaaagtttgctgtgtttttttaatcagcttttttgaggtgtaatttacataccaaaaaattcagccctgttaaagtggacaactttgtggcttttagtgactttacagagttgtgcaaccatcaccaccgtaacaaagcatgttcatcacccccaaaatatcccttgtgcctatttgtagtcactctgttcccagcctagcccaaggcaactactaatctactttctgatcaaaaagatttgtcttttctggtcatttcatagaagcacatcatataatatgtgtccttttgcatctggcctctttcatgtagcatattgctttggagtttattcatactatagcatgtttattcctttttaytgcttaaaaatattctattttgtggacatggcacattttatatatccattcatcagctaatagacatttggagtgtttccaaatgtataaagctgctatgaacattagcatatgagagtttgcatggaggtagaaggtgtattttcatttctcttgggtagataatctagtcgtagaattgctaggtctcatataagtttatgtttaactttttttttaatttttttttttttttagagacaggctcttattctgtctcccaagctggagggtggtggcgcattcatagctcactgcagcctggaactcctggactcaggggatcctcctacctcggcctcccaaagtgctgacattacaggcatgagccactgcacccagccatgttcaactttttttttttggagacagagtcttgctctgttgcccaggctagagtgcagtggtacagtcttggctcactgcaacctccacctcccaggttcaagtgattctcctgcctcagcctcccgagtatctgggattacaggcgcctaccaccatacccggctagtttttgtgtttttagtagagacagggtttcaccatgttggccaggctggtctcgaactcttgacctcaggactcccaaagtgctgggattacaggtatgagccaccgagcctggcctcaacttttaaagaaactgcctaatggttttccaggttagctgtacatcttacatccccaccagcgatgcctgagggttccagtttctttatatcctcgactacacctgtcagtatcgtcagtttgagtaatagccagggtagtgggtatgaagtggtgtctcattgtgaatttaattggcatttcccagctgggcatggtggctcatgcccataatcccagcactttgagaggtcaaggaaggaggatcccttgatcccaggagttcaagaccagcctgggcaatataggaagacccatctctatagaaaattcaacaattagctgaatgtggtggtgggtgcatctgtagtcccagctacttgggaggctgaaatgggagactcacttgagcccaggaggttgaggctgcagtgagccaagatcgtgccactgcactccagcctgagcaacagagaagaccatatctcaaaaaaaaaaaaattgcattttcctaatgactaatgaagtggagcatcatttcatgtgctcattactcatttgtatatgttctttggtgaaatgtctactcaaatcttttgtctttctttcttttttatttttatttttttgagatggagtttcactcttgttgcccaggctggagtgcgatggcgtgatctcagctcactgcaacctctgcctcccaggttcaagcgattctccggcctcagcctcttgtgtagctaggattacaggctaattttttgtatttttagtagagacagggtttcaccatgttggccaggctggtcttgaactcctgacctcaggtgatccacctgcctcagcctcccaaagtgctgggattacaggcgtgagccactgtgcccggccttttgtccattttttaactggtttatctcattgagttttatgagttatttatatattctatacacaagtgctttatcagatatataatgtgcaagtacaaaagttttaacttatgataatgtctaatttatccagtttttcttttatgaatcatagtttttggtgttggatctaaaaaatctctgcttaacacaagatcatgagattttctcctgttttcttctcaaagttttatagttttaactcttaaatttagatgtatgattaatttcatgttgattctggtatgaggtaatagtctaaattcatctttttgcatatagatttccagttgtcccagcaccatttgttgaaaagagtctttttcccaagaaaacccgtaagtaaagccaatgtaaagagaatgcccctagcctccaggtcaaaaggattccttttttgtgaactttatcaaatagctgtaacacagatacagttttatgtttttcctagaatttctcatagctttaatttttccattttgaaagaggcgtttttctgttagtaactcatccaatccatttctttggatttctttttcttcttgtagacattcttccttttatagtatcctgttcttactctgtttagaacatctttgcaaatctaagtgttcccaggactagctacataatttgcatggcccattgcaaaatgaaaatgcaaggtcccttgttcagaaataattaagaatgttgaggccaggctcggtggctgaggcctgtaatcctagcactttgggaggctgagacgggagaatcatttgaggccaggagtttgagaccaacctgggcaacatagtgagaccccatctccacacacacacacacacacacacacacacacacacacacacacaaaatttttaatttaagagaatgttggccgggcatggtggctcatgcctgtaatcccagcactttgggaagccgaggtgggtggatcacctgaggtcaggagttcgagaccagcctgactaacatggtgaaaccctgtctcaactaaaaatacaaaaattagccgggcgtggtagtgcgcacctgtagtcccagctactcggaaggctgagacaggagaatcgcttgaacccagaagtggaggttgcagtgagccaagatcacgccactgcactcctgcctgggtgacagagtaagactccatctcaaaaaataaataaataaataaaaataaataaataaaaagaatgttgaggctgggagcaacggctcatgcctgtaattccagcattttgagaggctgaggtgggcagattgcctggggtcaggagttcaagaccagcctgcccaacatggtgaaaccccgtctctactaaaaatataaaaattagctgggaatggtggctcatgcctgtaatcccagcactttgggaggctgaggtgggtggatcacctgaggtcaggagttcaagaccagcctggccaacatggcgaaacctcgtctctactaaaaatacaaaaattagcctggcttggtggttcgtgcctgtaatcccagctactcaggaggctgaggctggagaaccgcttgaacccaggaggtggagattgcagtgagctgagatcattctgttgcactccagcctgggcaacaagagcaaaactccatctcaaaaataaataaaaataaaaatactaaaattagccagatgtggtggtgggcgcctgtagtcccagttactcaggaggctgaggcacgagaatcacttgaacccaggaggcggaggttgcagtgagctgagattgtgtcrtgcactccagcctgggcgacagagagagactccatctcaaaaaaaaaaaaagaaaagaaaaagaatgttgagatggccacagtggagcattgaaaagagggtgggccacatgtgaacgcacaggttgcatgcccatgaagccagtcctgagtgtaccagttagggttttttcttttcctccatgttcttttggtcctgtgaattgtctgtttcctctggggtcagttcactttccttctgcttgtttacttaaatgtttctctttcaggctgctagttttcttaaacatctgatggtccttgctatcccgccactttttcaaacaagaggctgggtgactgtggttttttgtttgcttgtttttaagtcactggtatgacatttggggctgttataaatacagtcctttcccactggcctcttggtcaagttggatggatgactgtgaactctgtgttctgtggacagcacttgttcatgttagcagggacgaaaacagtctttgtgctgggagctcactcccggatgccagatggggagggctttactcagtaacaccagcagcatccacacttcccaggggctgcatgcaatttttttttcttttctttttttctttgaaatggggtctcactctgtcacccaggctggagcacagtggtgtgatcatagttcactgcagcctccacctcctgagctcaagcaytcctcccacctcagcctcccgagtagctgggactacaggcrcttgcaaccatgtctggttaattttatattttgtagagatggaggtcttgctatgttgcccaggctggtctggaactcctggcctcaagcaatccccctgcctcattctcccaaaatgttgggattacaggcataagccaccatgcctggctaaaatagttaaaaattaataagggatgggaggctgaggcaggagaatcgcttgaacctgggaggcagaggttgcagtgagccgagatcacgccactgcactccagcctgggygacagggtgagactccgtctcaaacaaacaaacaaaaattaataagggagaatcgggtagaggaaagtatcctgaaggtatgaaaaggaaaccattctgtgtaaactttttataagattgacaataccaataccaggtgctggcaactgcaatgcatatagaatttttgggaatgcagatggcacaatcatgctggaaaactgctgggcattttcttgtaacgttaaatatacacctgccatgtgactcaaaaattctactcctaagtatctactcaagagcaatgaaaatggctggacacgatggctcactcttacaatcccagcactttgggaagccgaggcaggcagatcacttgaggtcaggtgtttgagaccagcctggccaacatggtgaaaccytgtctctactaaaaatacaaaaattaactaggtgtggtggcgcacacctgtaatcccagctacttgggaggctgaggcaggagaactgcttgaacccgggaggtggatgttgcagtgagccgagattgcaccactgcactccagccttggtgatagaacaagactctgtctccaaaaaaaaaaaagcaatgaaaacatatgtcyacacaaacacttgtacatgaatattcatagcagccttattcataatacccctaagctggaaacaacccaaatgtccatcatactgagtggataaacaggttgtagattatgtgttcagtggactattacccagcaataaaaaggaatagactactgattgatacacaacaagtggatgggccaagcgyggtggctcatgcctgtaatcccagcaatttgggaggccaagctgggaagatcgctgagcccaggagttcaaggctagcctgggcaacatagcaagaccctgtctcaaaaaaaatttaaaaattagccaggcatggtggggtgcacctgtggtcccagctacttgggaggctgagatgggaggattgcttgagcctgggaggtcatggcagcagtgagctatgatggcgccactgccctccagcctgggcaacagagtgagaccctgcctcaaaaaaaaaaaaaaagtatgagtgaatcacacggacattatgctgaaggagaggacaaataaccctaagccatgcctacaactcaaggaatattacaggcatgagccactgtgcctggcccagatgacttcttcacaaggagacacatactgtgtgtatcagtcaggatccaaccaggagacaaaccacacagtaatttaaacagcgattgtttaatatacagaattgttaactatgataggggatttgagtaagaggaactggttactaagaaataaagagaatgctaacgaatgtagaaatagactgggcacaatggctcacacctgtaatcccagcactttgggaggcaaggcaggtggatcacgaggtcaagagatcgagaccatcctggccaacatggtgaaaccccgtccctactacaaaaagtagctgggcgtggtggcgtgtgcctgtagtcccagctactcaaggaggctgaggcaggagaatagtttgaacccaggaggcagaggttgcggtgagccgagatcttgccactgcactccagcctgggtgacagagagagactccatctcaaaaaaaaaaggaaagaaaaagaaaaaagaaagaaagaaatagcagatacaaggagcagccactcctcctaagtctaagatagcccgagaaagatgagagccccaggctgagaccccgaccttgctggagtagtcttggccatggctcaccgaaggacaaaggcatccctatggtgcggcaccagtagaatgcggcagaagtccattcagtaagatggtggggagagcagctgacagggaagtgtctcagctgaggtgggtgctgctgactgccatatttcaggagccatgtgccagagaaacttcctgacactaaagaaaccgcacgcatgtaggagtcagaggctggagaagcatgctcgctgcaggagtagctgccctgcaggagccaagtctggaaactggaagccaaaccctttcctcctacaacgtctctccagcgccctctactgaaaaaaacttagcatcatgtcagtcagcaaaggaagaagatttaaagggccaaactccaattattatttatttatttttattttttttttttgagacgaagtttcgctcttgttgtccaggcaggaggcaggcgtaagccaccgttcccggagcttttttttttttttttttttaacagcgtccctgggtgggctagaaccaaactccagtttcgcagcttagaacaatgaggtcgtaggttgatagccgacactctatatgattccatttacgtgaaattatagaaaagaaaaattgaatttatagtaacagaaagaagccgggcacggtggctcacgcctgtaatcccagcactttgggaggccgaggcaggcggatcacttgagctcaggagttcaagaccagcctggccaacatggtgaaaccctgtctctactaaaaatacagaaattagccgggtgtggtggtgcgcacctgtaatcccagctactccggaggctgaagtagaaaaaatctcttgaacccggaaggcggaggttgcagtgagccgaaatcgcgcccctgcactccagcctggaggacagagcaatactacgtctcaaaaacaaaacaaaacaaaacaaaccgaatagtagttgactttgggtgggagtagggaggttggctgggaagggataaaccttttggggcaatagaaatgttccatatcggctgggagcggtggctcacacctgtaatcgcagcactttgggaggccgagttgggtggatcacctgaggtcaggagtttgagaccagcctagctaacatgtgaaatcccatcactactgaaaatataaaaattagctgggtgtggtggcgcacgcttgtaatctcagctacttgggaagctgaggcggaaggattgcttgaacttgggaggaagagattgcagtgagctgagatcatgctactgcactccagcctgggtgacagagtaagacgccatctcaaaaaaaaaaaaaaagatttaaaatcaattgaaataaaattgctacattttaaacagatacaattaataaaacttaactaataaagtaaaaataatactttataaaatgaacacagttaattgaggctgctgctgtgttagtaaaacccgttcaatacaatgaaccttgaagatgaaagtatattatctgggccatgcgcagtggctcacgcctgtaatcccaacactttaggaggccaaggcgggaggatcacttgaggtcaggagttcgagaccagactggccaacacagtgaaaccccgtctctactaaaaatacaaaaaatcagcctggcgtggtggtgcgcacctgtgatcccagttactcagaaggctgaggcaggagaattgcttgaacttgggaggcggaggttgcagtgagcggagatcatgccgttgcactccagcctgggcgacagagcaagactccatatcaaaaaaaaaaaaaagtggccgggtgcaggggctcatgcctgtagtcccagcactttgggaggccgaggcaggtggttcacctgaggtcaggagttcaagaccagcctggccaacatgtgaaaccctgtcttcactaaaaatacaaaaattagccggtgtgggtggcacgcacctgtaatcccagctactcgagaggctgaggcaggagaatcccttgaatctgggaggcggaggttacagtgagccgagatcgtgccactgcactctagcctgggggacagagcgagactctgtctcaaaaaaaagatattatttggtttgtttccgaaagtagctggacagaccaggtgaaaatagagagaaatgtctaaggagcgccagctgttcgggtctcctcacttcagctgctagactaggatggaagaagcctcagatgacccagccccatccaccatctgacggcaaaggcacaagttccctaagtgaggaccgcatagctgatcccagtccccagagccataaaaaaaaaaaaggaataatggcttattataaatatactctggcaaaattatactctggacagaccaaaaacaaactggtatcatgattcacagaggtattttttgtgcagaattttccagtcagtataaaaaggtctctggcctcaaaaaaactatacaatttgagaatctgctgaggagatacttataagctaactcttaatcattttcacagattcttctattttaaaatagtaacatcttttgtttgatggctttgaggaaagtttttggacatctttttgttcctttccatggactgccatatctgtttttcttgttttcatcatttttagcaaacgttgagggttttgggtatgtgttctgttttggtagtggtggtggtgttttttatttgtttgtttttggagacagagtctcactctgtcacccaggctggaatgcagtagtgcaatcatagctcactgtacccttgaactcctggccacaagcaatcctctcacctcagcctcccgagtatgtggtactacaagtgtacaccaccaggtccagctaattttttaatgtttacttttttagagatcgggtttcactatgttgcccaggctggtctcgaacccccgggttcaagcgatcctcccacctcagcctcccaaagtgctgggatgacatgcataagccatggtacccagctcatttttagcaaaccttttatagaaagtgcacaaattgcacagcctaatgaatcccagcactttgggaggccaaggtgggctgatcacaaggtcaagagttcgagaccagcctggccaacatggtgaaatcccgtctctactaaaaaaaaaaaaatacaaaaattagctaggcatggtggcgtgtgcctgtaatcccagctactctggaggctgaggcaggacaattgcttgaatccaggaggtggagattgcagtgggccgagattgggccattgcactccagcctgggcaacagaggaagactctgtctcaaaaaaaaaaaaaagaaagaaagaaagaaagaaagacaggcagaggctgcatactcttttatgatccagcctcagaaatcccttagcaggccgggcacagtggctcctacctataatcccagcactttgggaggccaaggcgacaggatcacttgagcccaggaagagaccagcctgggcaacatagggagacccctcacttctagaaaaaaaaaatataaaacaaacgaagctgggcatggtggcatgtgtctgcagtcccatctactcaggaggctgagttgggaggatcgcttgagcccaggagttcgaggcttcagtgagccataatcacgccactacactccaaccaggcgacagagtgagactttgtctcttaaaaagagagagaaagagagagagaatgaaatcccttagcaatgtctcttctgcagtgctctgaaagttgaggcagttgcaaaagcctgcacgtgcccaggggaggaatgtggaccccacagcttcacgagcagtggtgaactgaaaaagcgtgtcagataggaaatgttctcatagccacttttgaaaaatacagtctgctgtagtagcatcctgggtccctttgggtagctgagtaccaatagcattccccggtcactctgacagccagtaaccttcctccaaacacacactctcccaaaaaccctggaagcaggcaatactaggccctacttgtcctattgtgacccagctagtagttggcattcaatcttgcagtgggtacttttcaacctttcccaaaattggccagaagcccctctcaggcttattctccaaaataagcctgtctttgactgttgagccacttttcgtgtttctttcctctttcctttttttttttttttttttgagacagtttcactcttgttgcccaggctagagtgcagtggcacaatctcagcttaccacaatctccacctcctgggttcaagggattctcccactagtctcccaagtagctgggactacaggagcatgccaccacacctggctaattttgtatttttagtagagacgggtttcaccatgttggctaggctgctctcaaacccctaacctcaggtgatccacccaccttggtctcccaaagtgctgagattacaggcatgagccactgtgactggccacaaacttttttttttttttttttgaggcaggatctcactctattgcctgggctggaatacagtggccccttcacgattcaccacagcctcaacctccctggctcaggtgatccttctcccctcagctcccaagtagctgggactacaggtgcatgacactatgcctgactaatttttttgtatttcttttgtagagagagggtttcgtcatgttgcctaggctggtcttggactcctgggctcaagcaatcctcccgcctccacctcccaaagtgctggaattacaggcgtaagccaccacactggggccccatacaagcatttaatatggtttgtgtggatagctgagggctcattcagtacatttcttgaacatctctgctccttggtgaagtctggctgcccttgttgggcgaggggcctacccctagccccagagatcctccttttgccagtgggaacacactcctaagaagaacaggaactgccgggcgcagtggctcaagtctgtaatcccagcactttgggaggcctaggcgggcggatcacaaggtcaggcattcaagaccagcctggccaacatggtgaaaccctgtctctactaaaaatacaaaagttagccaggcgtggtggcaggtgcctgtaatcccagctacccgggaggctgaggcagagaatcgcttgaacccgggaggcggaggttgcagtgagccgagatcatgcaactgcactccagcctgggcgacagagtgagactccgtctcaaaaaaacaaaaaagaagaagagtgggaactaagaactcctcctaagaagaactccaggaaactaaactctggtgcacatcacacccatgccaggcagactggtagacttgtttataaacctagggaatttatttatttatttttgagacagagtcgctctgtcacccaggctgaagtgcagtgagtgatgtgatctctgctcgctgcaacctccacctcgcgggttcaagcgccgggcctcagtgaactattaatgcaactcagaaccacctggagaaaagcacagcttggtctttgtaaagtctgtctccacagcttcattctttctgcggtaggaataaagatgatgtcagaggctgggcatggtggctcacacctgtgaaaattaatattaatattttaaaaattaatgtgaaacactaaattatgttagttgccattattatgacacatcatttttaaaaagtgacagcaactattttatttatttatttattttgaggcagagtctcgctgtgtgcagtggcatgatcttggctcactgcaacctccacctcccaggttcaagcgattctgctgcctcagcctcctgagtagctgggattacaggctcccaccaccatgcctggctaatttttgtatttttagtagagacaggtttcaccatgttggccaggctggtcttgaactcctgacctcaagtgatccacccacctccgcctcccaaaatgctgggattacaggcatgagccactgtgcctggctgacagcaactattttagctgtgacattttcatttagtggcatttattggcccttattaagccacggtgctgagcatttaagctggatcagctcatgaattctatcatcttgtttaatgggcaaaactctcctttgaggatgcccttggttaagaggctttaatgatctaatgcttgttatcttcatgtgcccaataagtgctcaattcatgtcagctattgtcatttttaaacaaattaaggttttacttaaaaaaaagaaataagcctgtgtcaggcaagtagtccatgaatgtagcaaaaattcctgacatcatctttttttttttttttttgagacagagtctcagtctatcgcccaggctggagtgcagaggcacgatctcagctcactgcaacctccacctcccgggttcaagtgattctcctgcctcagcctcctgagtagctgggattacaggtgcccaccaccacgctccgctactttttgtattttttgtagagatggggtttcgccatgttgcccaggctggtcttgaactcccgacctcaggtgatccgctcacctaagcctcccaaagtgctgggattacaggtgtgagccaccatgcctggactaatattaaattaatatcactcttatttaggagcctacaggggcttttcctaagtgctttaaaatactcatttcatcctcacaacagccctatgatggaggcaccgttagcagccccattttcagaaagggaaactgaggtataaagagattaagtgacttgccattggtcatataatttatagcaagaagtggagctggagccgagcacagtggctcacacctataatcccagcactttgggaggccaaggcagcaggatcctttgagcccaagagtttaagaccagcctgggcaacatggtgaaaccctgtctctactaacgatacaaaaataagcagggcctggtggcacgcacctgtagtcccagctaatcaggaggctgaggcacgagaatcacttgaacctgggagccagaggttgcagtgagctgagattgtgccactgcactccagtctgggtgacagagggagactctgtctcaaaaaaaaaaaaaaaaaraaagaaagaaaatgttttagaaagaatggaagcagaaaatactgggtagacagctcttttgagaagttttaccacaaagagaaacaaagacgctgcatgcggtgactcatgcctctaatcccagcagtttgggaggctgaggtgggaggatcacttgagcctgggaggttgaggctgcagtgagccatgatcacaccactgcactcccacccgagtgaagaagcaagaccctgtctcaaaaataaaaataaaaggccagttgcagtggctcacgcctgtgatcccagcactttgggaggccaaggcgggcggatcatgaggtcaggagatcgagaccatcctggctaacatggtgaaaccccgtctctactaaaaatacaaaaaaattagctgggcatggtggtgggcgcctgtagtctcagttacccgggaggctgaggcaggagaatggcgtgaacccaggaggcggagcttgcagtgagccgacatcgcaccactgcaytccaggctgggcaacagagcaagactccgtctcaaaaataataataataataataataataataataaaataacacattstcaggscaggcgcagtggctcacgcctgttaatcccaacaccttgggaggctgaggtgggcggatcacctgaggtcaggagtttgagaacagcctggccaacatggtgaaaccctgtctctactaaaaatataaaaattagccaggtgtggtggcgggcgcctataatcccagctactcaggaggctgaggcaggagaattgcttaaacctgggaggtgaaggctgcagtgagctgagatcgcgccactgcactccagcctgggcaacaagagtgaaactctgtctcaaaaaaaaaaaaaaaaaacacattctcggcccggcgcagtggctcacacctgtaatcctagcactttgggaggctgaggcaggtggattacctgagttcgggagttcgagaccagcctggccaacatggtgaaaccctgtctctactaaaaatataaaaattagccaggcgtggtggcagaggcctgtaatcccagctacttgggaggctgaggtaggagaatcgcttgaacccaggaggtggaggttgcagtgagctgaaatcgcgccactgcactccagcctaggccacagatcgagactccatctcaaaaaagtaaataaataaaaaataacacattctctgcacacacccttgcccactttggcttcctcctgcatgagaccctggttaaatccagccttcctctctgccgtgcctgcacccacacagcttgagtgagctaaaaaacaacacagccccctggccaggctaatttcaagtctgtgaacttgaccctcaggcggaccccaatgctgcctggcagccatatgacatttctctgatcccctccttcctcctgtcttctagacaactaattcacaccttttcccttctcctctaatcctttccaacacctcctccccccctttcactctcccttggcttcttattttgcagagaaaatgcaagagatgagaagtgaacttccacagccacccccgcctctaccacctacctgcacccttgcccacacccgttctcctgctgtgactgtcccatcacctgctcccaccttcccgcccacttccagccaccgtccctggttctcacctctctttgctgctcattcagtttcccccatgcactggatctcctgttagcccacacagcatcctgtctcccatctcaaaacaaaccctctctctttttttgtttttgtttttgttttgttttgagacagggtctcactttgccgcccaggctggagtgcagtggtgcgatctcagctcattgcaacctctgcctcctgggttcaagcaattctcctgccttggcctcccgagtagctgggattacaggtgcgccaccacacccagctaatttttgtatttttagtagagatggggtttcactatgttagccaggctggtctcaaactactgacctcaagtgatctgcccacctcagcctcccaaagtgctgggattacaggtgtgagctaccgtgcccagcccaaaccctctcttgacttcacctccccttctagctacagccccactttttttgctattctttttattttatttagagacagggtctcgctttgttgcccaggctggagtacagtggcataatcatagctcactgcagcctccaactcccgggctccagcgatcatcccaccttaacctctggagtaggtgggactacaggtgtgcaccaccacacccggctaattttttcattttattttttgtacaggtggagtatcgctgtgttgcccaggctgatctcaaactcctggcctcaagcagtcctcccaccttgccctcccaaagtgctggaattacaggcatgagccagcgtgccaggtcaagaatgtttttaatgattaaccatggaatttaagctggctaaggaagaaatgagggcatgggagggtgagggggagtaaaawatgaaagggacaacggatgggagatcacagtgggttggaaggatcatgcgagtggggcactggagggaatgaggtggaaagaaaaagtgatgggtggagagtgagtgtgagattgaggttctgaagaggctgctgttattcaaacaaggtctgggtttgaccacgagagggagatgttggggaaggaaaaagtcactagagagaggtcagggaacagagaggttggggctgcggaagaactatctggttatagaaatcactgagaatgatgctaagagcagcgggagcggccgtgagcccagagctaaaattagggagaagagaggagtcatgatctgggtcagcagatgacgcatgaagcaaggtagtgatgagattcatcgctgggggttttggggagggtggagggagaatggtcaggaagtagctcccaggagcacggagacctccccacttggaaggcccacaggagagctgggttccagttagagcaagaaggtggtaggaatgttcagagaagtaactgaggcaagaagagattttgttgaagatgggtcatgggttccaaaggtcacagtagctggaacacattggggtatggggtagaaatggtttcttccgcagtgggtttccttgtgggtctgtaacccgactgaggtttggccgctcaacactcaaaagccaaactcaggccaggcgtggtggctcacgcctgaaatcccagcattttgggaagctgagacaggtggatcacttgaggtcaggagtttgagaccagccggctaacatggtgaaaccccatctctactacagaaattactggctcggtgtggtggcacacatctgtaattccagctacttgggaggctgaggcaggagaatcgcttgaacccgggaggcggaggtcgcagtgagccaagattgtgccactgcactccagcctgggcaacagagtaagactcggtttcagaaaagaaagccaaactcgggccgagcgtggtggctcaagcctataatcccagcacttcgggaggccgaggtgggtggatcacctgaggtccggagttcgagactagcatggccaacatggtgaaactgtctctcctaaagatacaaaaattagccaggtgtggtggtgcattcctgtagtcccagctactcgggaggctgaggcaggagaatcacttgaacctgggagacagaggttgcagtgagccgagacgggccactgcattccagcctgggtgacagagtgaggctgcctcaaaaaaaaaaaaaaaaatagaaagccaaactcaagagagatgacagttggtgggaggaaaagcaagtttatttggagagccagcaaaccgagaacacagtggactatcatcctaaagtaccatcttaaatcagtacaatttttttttttttaggggcagagggaagagaagggcattgtgatcaagaggtgaccaacaggccaggcgcagtgactcataccaattccagcactttgggaggctgaggcaggaggatcacttgaacccaggaattcaagaccagccagggcaatgtagtgagaccccatctctacaaaacaataaataaaataaaaaactagctgggcatagtggcatgcacctatagtcccagctacttgggaggctgaggcaggaggatcactcgagcccaggaggtagaggctatagtcctggtttctagctccataaaaaagtaataataataaaaataaggaggtgaccactgcagacatctgagtgccagctagggtccgaggaggttgatgacttctttgtccttggttgggtcacaatgcccctataaatctttgaaaaaacaggctgggcgtggtggctcacacctgtaatcccagcactttgagaggccgaagtgggtggatcacgaagtcaggagttcgagaccagcctggccaagatggtgaaaccccgtctctactaaaaatacaaaaattagccgggygtggtggcrggcgcctgtagttccagctactcgggaggctgaggcaggagaatcgcttgaacccaggaagyggaggttgcaatgtgccaagatcgtgccactgcacactctagcctgggcaacagagcaagactgtgtctcaaaaaaaaaaaatctttgacaaaacatagttgtttacatacttctttaatcccagagttagttttaaaaactacatgattgctgtttttgcatattatctcagcggtctaaaattaacctagccatgtgcaggaatgggtaaagtccccttaaacaaaaatggggttagttatgttagttcttttgccatttcactggtcatatacctgaagcgcttagcctgacacaattgaacgccagacggaagccgtgatcagcggtcctgacgggggtcagagtcagaccaggggtcttttaccsaagtggggaagattgggaaaggcctaggatcagagagggaaatgggtccctggttgcccatggacctaatggggtctctcgagcagcaggggccttgcgccytgggggacaaggtagggagggggtggcctggctgcgctgacccgcctaccgacccctctcgacctgcaggactctggctrctggagatgggcgcccggctatcgcggcgacggctgccggcggacccrtccctggccctggacgcgctgcccccggagctgctggtgcaggtgctgagccacgtgccgccacgctccttggtcacgcgatgccgcccagtgtgccgcgcctggcgcgacatagtggacgggcccactgtgtggctgctgcagctggcccgcgaccgcagcgccgagggccgcgcactctacgcagtggctcaacgctgcctgcccagcaacgaagacaaggaggagttcccgctgtgcgccctggcgcgctactgtctgcgcgcgcccttcggccgcaatctcatcttcaactcctgcggagagcgtgggtgacgggggcggggcccaggaggctgaggggggccgcgcgagcgaggcgggggcggggccgggacagagtctgagagatgtagccaatgggcgagaccgctggaggagccagggggcggggctgagggacgcagtgcctgggcggtagscccggtgggcggggctggagaaggtgaagccgggaatccgaacgagtgggcggggcaaggcaggaagaccctggctgggccgggggagaaagcaagtagtttggtatgcagaggggatgcagaacaggacaggggccaggcgcggtgggaatggcaacgctttgggaggccaaggcaggaggatcgcttaagcccaaggagttcaaggctgcagtgagctatgatcgtgccattgcactacagcctgcgtgacagagaccttgtctcaaaaaaaaaaaaaaatggtggggtgcagtagctcacgcctgtaatcccagcattttgggagtctatggtgggaggatcgcttgaggccaggagtttgagaccagcctgaacaacaaagtgagactctgtctctaaaaaatttaaaaattagtccaggcgcagtggctcacgcctgtaatcccagcactttgggaggcccgagggggcagatcacttgaggtcaggagttcaagaccagcctgaccaacatggtgaaaccccatctctactaaaatacaaaatcagccaggtgtggtggtgcacgcctgtaatcccagctacttgggaggctgaggcaggaaaattgcttgaacctgggaggcggaggttacagtgggctgagatcatgccattgcactccagcctgggcagcaagattgaaactccatctcaaaaaaaaattaaaaaattaaattagccaggcgtggtggcatgcacctgtggtcctagctactctggaggctgatgtgggaggatcgcttgagcccaggagtttgaggctgcagtgagctatgatggagccactgcactccagcctgggcgacagagtgagaccctgtctctcacacacacaatgaagagcaggactgaaggagaaagagcaagtaagggtggctgaagagaagctgagtggatgggcaccgctgagagtcacagttgtggggtaggaccaggaatacagaataatgggaggaggagtcggtaggagaaaccagggaggattggagcacaagagggagaggctggtggacagcacaagctggctggttgcggggtctcttctgggcaggctggcaggtgaaccatatgttcaactcttgttttcccacagagggcttcagaggctgggaggtggagcatggcgggaacggctgggccatagaaaagaacctaacaccggtgcctggggctccttcgcagacctgcttcgtgacctctttcgagtgagtggcccaagtgagaggccccgatccctggggcaaaggccccaaagaaagggaccctaccccccacactgtcctcatcgtcaccttcaccctctccttcccccatttatttattcattgattcattccatcaatcaacaaatacttgttgagggtactgtttcatatsccagggatacaaggaaagatcaggaaggttagcaaccacaggcagcaatgctctgtgcatcatcgcctgcagtttgtgagacaacagcaagacagctttgatctaaagacagggttttgggccgggcacggtggctctcgcctgtaatcccagcactttgagagcccgaggtgggcagatcactttaggtcaggagtgcgagaccagcctggccaacagggggaaaccccgtctctactaaaaagacaaaaattagctggacgtggaggctgaggcaggagaatcgcttgaacccaggaggcaaatgttgcagtgagccgagattgcaccactgcactccagcctgggcgacagagtgagactctgtctcaaaaaaaaaaaaaaagggaacatggcagattagcacccaagatggagtcgcttttgcctccacaaggagttactctatactagacactttacatataattctggcaacaaccctgtgacatagatactattactgcccccactttataacaggaaactgaaggccgggcacggtggctcatagctgtaatcccagcactttgggaggccgaagtgggaggatctcttgagcccaggagttcgaggttgcagtgagcctaggatcatgccactgcactccagcctggcaacagaataagaccttgactcaaaagaaaagaaaaaatgagaatctgttctccatggaatgatggtgccacctctacagtttatgaagtttctgtgtatacctacgtctgtccctggcactctgttttttttgtttttgtttttgttttttgagatagagtctcattttgttgcccagtctagagtgcagtggcgcaatcttggctcactgcagcctctgcctccctgggttccaatgattctcctgcctcagcctcccgaatagctgtgactacagaggtgcgccaccatgcctggctaatttttgtattttttgtagagaagaggtttcaccatattgaccaggctcgtctctaactcccgacctccggtgatccgcctgcctcgggctctcaaagtgctgggattacaggtctaagccaccgcgctcagccggttcctggcactttgttctattccattgctcaacttacccatccttccaccaatactgcacaatttatgttattatggcacattctagtttgaggagaaggactgtttacaaagttgtaggcaggagcccctgagctagtaacagttaggaaaggaacgttaccacccctagactgctagaggtgaggggaggaaacagttactggaaaatgaggagagagtgccatggagatttgctttttccttgggggacaaggcagtcccttgagaaggacctaagaggataaataccctgattttagtcacctctttcacttccatcccctgccggagcatcccattggctgatccaacaggaagcaatgggtgacagagacaaggcyrtccagctttagacccggggccctcrcactttaggaggccacagagctccccgctcacatgtctagtatgtggccttcatttgtagtcatgtcctgtcccacaaagatgagggtcaggctttcatagaggtcagctgcctggagcccgvagcagggtggagaatggcaaagggactccaagaggccaaggagagatgtatagcccatcatgcatcttcaggtctgctagagcaaaccctgagggctgctttagagagggttatcaagggagacttcttggaggaggtggyttctgactgtgacttgaatgccaggactgtttgccctgccccctgccatctctccttcccagatggtgctccaagaggcagcttgtggacctggtgatggaaggggtgtggcaggagctgctggacagcgcccagattgagatctgtgtggctgactggtgagtgaggagcggcaccctgccccagagcagcagcaggcttggcagcggctctgcaacaggggctcatttcccgccccatcaaccccacgggtagcggctgtcactgtgcaccctttgtgatgaggctgagaggggaagtgatgcagagccggggaaggtagagctttggagaagccagagcccccactctgcactcctgcccaccctcatcscagcaggctggggtggtccacagggggccactgactggcttgatacccctctgaaacgagacacctcccctgaccaccttgtggatgcccagggtctctgaaggggtgggagcatggtgccctgtgagctgaggctcagggagcatagttgggacaggactggcttcagagcctacaggcttaggatgaatgccttcttcccaaaacacccaggttctgccccaaagcattccagctcctccttcaggctgtggctcttccatagaaaatctggtctcttccctggggctctggctcttccctgaagtcatcaggcacctgccctgcattgtggttcttccccagagcatcctttcccgtcccccaactacctacccaaaagcctccagaatcaaccgcaggaccacccaggctcctcccccaggaccacccaggctcctcccctgctctggctccaccccaggaccacccagactcctcccccaggctctggctccaccccagggtcacccaggcttctcctccaggttctggttccaccccaggaccacccaggctcctcccccaggaccacccaggcccctcccccaggctctggttccaccccaggaccacccaggctcctcccccaggaccacccaggctcctcccctgctctggctccaccccaggaccacccagactcctcccccaggaccacccaggcccctccccsaggctctggctccaccccaggaccacccagattcctcccccaggaccacccaggcccctcccccaggctctggctccactccaggaccacccagactcctcccccaggaccacccaggaccctcccccaggctctggctccaccccagggtcacccaggctcctcccccaggctctggctccaccccaggaccacccaggctcctcccccaggctctggctcctccccaggaccacccaggctcctcccccaggctctggttccaccccagaaccaccaaggctcctcccctagaggttcccaggccaggacgtctccaaatgtggtccagatgtgcaggaccttcatcaagatggagccagccctcagcctcccgccccgaaacccagagagctggctgggtgacgggggcatagaggctgactgctgcctggcaggtggggcgctcgagagaactgcggctgcgtctaccagctccggrtccgccttctggatgtgtatgaaaaggaagtggtcaagttctcagcctcacctgacccggtccttcagtggactgagaggggctgccgacaggtgggtccagactagcttccagctccccccgacccgctaaaggcacacacgcccagcctctcgtctgctcggtttcccttctgtcactcctggatatctataatcataacagctaagaagtattgagcccttcttacatcccaagccctgtgtcaagacgcttacatatcgattcatttcattagcaaaaccccttaatgttcaacaaacactgattgagcacctactgtgtgctgggcaccactctatgtgctggaaatgcagcagtgaagcaaaatcctatctccattctagagttgaggaaacagaggcacagggaggttatgtgactggtccagtgcagagctggactcaagcccaatctggcaccaagactatgctgtcttgatcctcacacctcagttaccaaagtaaatgtttcggctgggcacagtggctcatacctgtaatcccaccactttaggaggccaagatgggaggacagcttgagggcaggagtttgaggccagcctgggcaatatagcgagacctccatctctacaaagaaattaaaaattagacgggcatggtgacttgcacctgcagtctcagctactcaggaggctgargtgggaggatggttggagcccagttggtcccactgcactccagccagggcaacagactgagacgctaactaaaaataataataataataataataataatgagtcagatcagaagtctcactgcttgtaatgctcctgtggctacatctcacagtaaaagccaaagttatgcagccacggaaaagaaatgaagcatgaattcacactgcaacgtggataaactgaaaacatgatgctgaaagaggccagacatgaaatgacaaatactgtatgattccacatatatgaaatgtacactaagaagattggcgactgccaggggctgggggagggaggtcttggaaatgacagctcatggatgcagagttttttcctggggtgatgggaattaggtagtggtgatggctgcataatatcgtgaatcaactaaaaaccactgaattgtacactttaaaaaatgaattttgggccgggtgtggtggctcatgcctgtaatctcagcactttgggaggtcaaggcggacagatcacttgagggcaggagttcaacaccagcctgccaacacagtgaaaccctgtctctactaaaaatacacaaattagccaggcacggtgatgggcgtctgtaatcccagcttctggggagactgaggcgggagaatttattgaaccgggggaggtggaggttgcagtgagctgagatcatgccactgcactccagcctgggcgatggagcgagtcttggcctcaaaataaataaataaaataaaatggtaaattttggctgggcgcagtggctcacacctgtaatcccagcactttggaagaccatggcgggtggatcacctgaggtcaggagttcaagaccagcctgaccaacatggcaaaacccccgtctctactaaaaatacaaaaattagccaggcatggtggtgcgcgcctgtaatcccagctactcgggaggctgagacaggagaatcgcttgaacctgcgaggtggaggttgcattgagccaaaatcatgccactgtactccagcctgggcgacagagtgagactccatctcaaaaataaataaataaataaaaagtttgttttacgaaaattttatctcaacttttttaaattggaaaaaaaaaaaagccaaagtcctcctgtggcccacaaggccatgatctgcccatgacctccctgacccctctcttacctctcccctcactcagctccaggcattctcccacctcagggcctttgcgcgggccgttcctgctgcctgggacaccctccagagcccctcccggctccctctcctccttcaggtgtcacctctgtggggcctttgctaactcactctactcacattcctgccaccttcctggcagaatgcccctggcccctcacccccacctatctccagtgtctgggccccctgctagaatggcactgacaccagggcggggtccttttccggttttattcactgctccgtccccagcamctagcgcaggactggcacctcctcagtcctttgggcctatctgttgaagtggaggaagagaaggggcccgcaggccctcaccctctcactccccttccccctgcaggtctcccacgtcttcaccaactttggcaagggcatccgctacgtatcttttgagcagtacgggagagacgtgagttcctgggtggggcactayggcgcccttgtgacccactccagtgtgagggtcaggatccgtctgtcctagcgactggactactgcctgacgttgtcagtcaagaccagccttgcagccaggtgcagtggctcacacctgtggaatcccagcacttcaggaggccgaggtgggaggatcactggagctcgggagttcaagaccagcctgggcaacatagtgaaaccgtctccacaaataatttttaaaaaattagccaggcatggtggtgccgcctgtagtcccagctactcaggaggcttgggtgggaggattgcctgagaccaggaggttgaggctgcagtgagccgtgatttcaccaccactccagcctgggtgagaaagcaagaccctatatcaatgaaaaaaaaaaaaaaaagaccagctttgcagccagaagccagaggatacccagggacagtagggctcccaggtggctggttctcagcacaccttccatgaatctgcttgctgctgcttcagtgtggtggccatcrtgctgtgtgacaaaccaggctgttcacagcttcctcagccccccagaaggggagtgtcaggaagagacatttagttcatttgcctgcaaattttcttctcctgcaaggatctcggtggactcagtcacaaaacaaaggctaaaccaggatttataagagagggcttataaatccctctgccgacgcagggagcagagacttgccggcatgttttgggggtaatgatcgtgggcagggagcagaggtccgctgaggcagtctgtccttgagactaacaaagtcatctgctgtttggggaaatctctggtgttgggaacaggcccccaaatctggccataaactggccccaaaactggccataaacaaaatmtctgcagcactgtgacatgtttgtgatggccatgacccccaccctgaaggttgtgggtttactggaacgagggcgaggaacacctggcccacccagggcggaaaaccgcttaaaggggttcctgaaccacaaaccatagcataagtgatctgtgccttaacgacatgttcctgctgcagataactagccagacccatccctttatttcagcccatccctttatttcctgtaagaaatgtttttagttaatctataatctatagaaataatgcttatyactggcttgctgtcaataaatatgtgggtaaatctctgttcaaggctctcagctctgaaggccgtgagacccctgatttcccactccacaccctatatttctgtgtatgtgtctttaattcctctagcaccgctgggttagggtctccacaaccgagctggtctcggcaagtggcacccatacgtgggggctcgaacccaggtcgaagagtcactggagcgacggttggagaacgtggaactaagctggaggacacccgagtactcttaagcaatccccatggtgagtaagaaggggagctcggaagcatcagggtagcaatgggacaggtgtgggttctggttcattccaccttggaaccttttcacactgatgaggagcagggagagtgtaatgaagtaatggaagaggtaacagagcaggtttgtttgccagctaaagctaaagtggcaaaggaggaagaggttcatccctacccttctgcatcccctccttagtgtgaagaaaaagagtgacctgaccctccagatctttcttttccagaggacactgggtgaaaagtagttgccccagtgactgtttgggcagtgcctcaagcgactgctctcagttccattcaggcaggaattcagcaagctagaagagagggtgatttagaggcttggcagttccctgttagaatacatcccccagatcaacagggaaatattacagctacatttgagccttttccttttaaattactcaaagaatttaaacaagctattaatcaatatggaccaggttctccttttgtaacgggactgttaaagaatgttgctgtttccagtcggatgattcctcctgactgggacgctcttacttgagcttgtctaactcctgctcagttcttacaatttaaaacttggtgggcagatgaagcttccattcaggctcctcgcaacacccaggcccaacctcaaattgatataactgcacaccaacttttgggggtcggcggctgggctggtttagatgcacaggtggtcatgcaggatgatgccatagagcagcttagaggagtgtgcatcagagcttgggaaaaaatcacttcaggtggagaacagtacccttcctttggtgctgtaaaacagggaccaaaagaaccgtacacagattttatagctcggttacaggagtatcttaaaaaggtgattgcagattcggctgctcaggatatagtgttgcggttattagcttttgacaatgctaatctcaattgccaggctgctctgtgacctattagagggaaagcacatttagttgattatatcaaggcctgagatggtatcagaggtaatctgcataaagctactttgttggcacaggcaatggcaggactgaaagtggataaaggaaatactccatttcctggagcttgtttcaactgtgggaagcatgggcacactaaaaaagaatgcagaaaaaaatcagcaagtcaggccggcagayaggggaaaaaagaaaactgctgagcctgatatatgtccaaaatgtaaaaaaaggaaaacattgggctaatcagtgtcactctaagtttgataaagatgggaaccygatttcgggaaatgccatgaggggcccatcccgggcccygttcgaaaccaggggcatttccgcctcaggccactccttcacccctgtacaatgtctgtcccctgccacagccagtaatgccacagtagatttatgctgcacaaaagctgtgagccttctgcctgaggaacccccgcaaaaagttccaacaggggtctgtggacccttgccagyggggacaataggattacttctagggaggtgtagtttaaatttaaagggggtacaagtacaaacaggagtcactgattcagattacaatggagaaattcaaattgttttttctacttctgttccctggaaagcagagccaggagagcgcatagcacagctcctgaatgtgccatatgtgggaatgggaaaaagtgaaattaaacgaacaggaggatttggaagcacaaataaacaaggcaaaacagcttattgggtgaatcaaattactgataaacgtcctacctgtgaaatractattcagggaaagaaatataaaggtttggtagatacaggagcggacatttcatttctctatagcaatggccgtccacatggccaattcaacctgctcartttaacatagttggagttggtaaagcccctgaagtatatcaaagtagttatattttgcattgtgaagggcctgatggacaacctgggactattcaaccaaaacttctgtacctataaatttatggggaagatatttattacaacaatgcggagcacaagttctaattccagaacaattatatagccctcaaagtcaacatatgatgcatgaaatggggtatgtccctagtatgggactaggaaaaaatttacaaggtttgaaggaaccgcttcaagcagaaatacaagtttccgccaaggtttaggatattatttttgatggcggccattgttaagcctccagaacctatacctttaaaatggttaacagataagccaatttggatagaacaatggccgctaagtaaagagaaactgaaggctttagaggaattagttactgaataattagaaaacggacacatagctccaacattttccccttggaattctccagttttcgtaattaagaaaagaatcagataaacggagaatgttaactgacttaagagccattaattcagttatacaacccatgggtacattacagccaggattgccttctcctgctatgattccaaaaaattggcctttaatagtcatagatttaaaagactgtttctttactatccccttagctgagcaagactgtgaacagtttgcatttacaattcctgcagtaaacaacctgcagcctgctaagcgttttcactggaaagtattgccacaaggcatgttaaacagcccaacaatttgccagacttatgtagggcaagcaattgaacctactcgttaaaagttttcacagtgttacattattcattatatggatgatatactttgtgctgcccccactcgagaagtattaytccaatgttatgatcacttacaaaattcgatttcttgcgctggtttaattatagctcctgacaaaattcagactactactccttactcctacttggggaccttagtaaatgacactaccattgtgccacagaaagcaaccatacataggaatcaattgaaaacattaaaggactttcaaaaattactaggggacattaattggatacgacctgctctaggcattcctacctatgccatgagtaatctattttctatccttagaggagatcctggtctcacaagccctcggtaattaacaagagaagctgaggcagagctgcggctaatcraaaagcaagtccataaagctcaaataaatagattagatccagagaagactctagatttgctaatttttccaactcagcattcacctactggtgttattgttcaagagtgagatcttgtagagtggctttttcttccacatactaattcacggactctaactccttatttggatcaaattgctactatgataggaaatgggagaactcggattgttaaattacatggatatgatcctggaaaaattattatccctctcacaaaggcacaaatacagcaagcttttataaatagtcttacttggcaaaccaattaagctgactttgtgggtattctcgataaccattttcctaaacaaaactgttttaatttttgaaattaactaattggattctccctaaaataactaaatttaaaccaattgaaggtgctgaaaatgtttttacagatgggtctagtaatggtaaagcttcttattctggctcaaaaagtaaagtttttcagatgccctatacttcagctcaaaaagtggagcctgtagctgtaattgaggtagtgactgcttttcatatgcctattaatgtgatttctgaytcttcatacgtgattcattccacacaattaactgaaaatgctcagttacaatttcctgcagatgaacaactgatgattttatttacccaactgcaaacagcagttaggagtagaatgcaccctttttacatcactcacattagggctcatacacctcttccaggcgtcaccttttgcagtgttttgcagtgatgggcattccagcttctattaaaacrgataaagccccaggctacactagccragctctagctacatttttctctatacggaatattaaacacattactggtatcccatataattctcaaggacaagccatagtggaaagaatgaatctctccctgaaacagcagttgcaaaagcaaaaaaaaggggggaaaacaaggactaygggacaccccatatgcaactgaatctagcattgttaactttaaattttttgagcctgcctaaaggccagatcctatcagtagctgaacagcatctacagaaaccagctgcaaagacagaagcagaacaactagtttggtggagagatccaataacaaaaagttaggaaataggtaaaataataacttggggtagaggttatgcttgtgtttctccaggactgactcaacagccgatttggataccatcaagacacctgaaaccttatcatgagccagatgctgaggaagagattccgggaggaaactgaggacccccccccacccccggttgcagccatgtcgagactgacgctgaggaagaccccaactgtcacgagcaacacctgtcaaacacagccacccacctggagacagatcaagaagctgtcacagatggtggaagaaaacctgaggaaagtgggacaaccagtcgcaatgagtaatttaatggtagctatgatagcgatgatcaccactgccatgagtattccttcaataagggctgacacagaggacaattatacttattgggcatatttatcaatcttggctggcaataatgcctggatgtaatcactctatgacacagttatacaagctttctgatctcataataaatctgctcctataattgaggcatactgccctcaaaaacatatttgtaaacaggattggacccagttagcaaaaatgaacgtacttgtttaggaagattgctttgcagaacaggcagaggtgctgcacaacaattcctatggaatcattattaattggtcacctatggggatgtttagcttgaactgcacctctcagtctgcatgccatggccacactgtgatcagctcatctgaacaaaatggtcagatgatagaaatggtaagaaatacagcaagagttcctattatctggaaccatggcagtatagtggcacctcagcctcaaatgatatggcctgctctaggagctaaacataagcatttgtggaaactgttaatagctcttaataaaatcaaaatttgggaaagaataaaaaagcatctagaaggccactctacaaacttgtatttggataytgcaaaattgaaagaacaaatatttaaagtatcccaggcacacgtgaacttaatgccaggaactggagtgcktgaaggagctgcagacagattagcagctagtaacccattcaaatggataaaaacacttggaggctctgtgatttcaatgatgattgtgcttttactctgtgttgtttgtctttgtatagtgtgcagatgcggatcctgactcctgtgagaagtagctcaccgtgacaaagctgcctttgcttttatcactttgcaaaacaaaaaaggggacatgttgggaacaggcccctgaatctggccataaactggccccaaaactggccataaacaaaatctctgcagcactgtgacatgttcatgatggccatgacccccaccctgaaggtcgtgggtttactggaatgagggcaaggaacacctggctcacccaggatggaaaayggcttaaaggggttcctgtaccacaaacaatagcatgagcgatctgtgccttaaggacatgttcctgctgcagataactagccagagcccatccgtttattttggcacatccctttatttcccataagaaatgcttttagttaatctataatctatagaaataatgcttatcactggcttgctgtcaataaatatgtgtgtaaatctctgttcgaggctctcagctctgaaggctgtgagacccctgatttcccactccacaccctgtatttctgggtgtgtgtctttaattcctctagcrccactgggttagggtctccacgacccagctggtctcggcactctgggatcctgccacggggctgtgtaaccagccatctctgtgcaacatgcccagcactgcctgtcagcatctcctgttcaggtcaggctagcacctctctcatcagaattccagaattccatcagaggccaagtcccccacccccacctcctgcccttgctttgggggcaacttcctgcaaggtaacacttccttttctccacactcctgtatacagactcctggagcagagtgtgccatgaggaaaagctctcccatccccccatctccctccacttctctatttctcagctaggcatggccaacaaactagctcaataaaactggtgccaaatatgaggggatgggcaatttttatctgtaatcagtgcacttatctgccaccagctctgatcctaaaagaccttgtggcctcatgtttacaatcaggagaccctcaggaggctgtgtgttgagcgtcaagaggaactcggagacagctatgatgctccaaacagctctcaagcatgcacccttatcagcgccatttggtccaggctcagagtgtaaacaacctgcccaaggtcacccagccagtaagtaggggaggcagggcttggagcagtgctgggctccagagcccaatgatataaacacagttccaacattgttttttcttttttctttttttgagacagagtctcactctgtcacccaggctgcagtgcagtggtgctgatctcagctcactgcaacctccacctcccaggttcaagcgagtctcctgcctcagcctcctgagtagctgagattataggcacatgccaccatgcccgggtaatttttgtatttttagtagagacagggtttcaccatgttggccaggctggtctcaaactcctgacctcaagtggtcggcccacctcggcctcccaaagtgttgagattacaggcatgagccactgcacctggccccacttcttaaatcttacatggccaaaaacatgatcaggtgcagtcagcattatcatcagtgccattttccaagggaggaaaccgaggcccatagagggaaccaacatagccaggtctcatagcaattatgacggggagcagaatttgagctcaggtgaacccagtaataattttatattattatataatataatggtggctcacacctataatccagcattttaggaggccaaggtggaaggatctcttgaggccaagagttcgagaccagcctggacaacaaagccagattcccactctaaaaaaatggaaaagttagccaggtgtggtggcacacacctgtggtcctgactactcaggaggctgaggcgggaggatctattgagctcaggaggtcaaggctgaagtaagctttgatcatagaaccgcactccagcctggacaacacagtgagactctgtctctctctctacacaaacacacacaaacacacacacacacacacacacacacacacgtataaaataaaagaacagctcccgggtgtggagcagcacaccccattgaatcctttccacaccccttccacatcaacattacaattactgccattttccagctgtccatgcttgagggcagagtttatgtgcccagaacccatggcctgcaggaagaagacctgggcctctgtgccacctacctgactcctaagcttaaaatacagtagccctctgccgggcgtggtggctcacgcctgtaatcccagcactttgggaggccaaggtgggcagatcacccgagctcaggagtttgagaccagcctggccaacatggtgaaacgctgtctctactaaaaatacaaaaattagccaggcctggtggtgtgtgcctataatcccagctactcgggaggctgaggcaggagaatcatatgaacccggggggcagaggttgcagtgagctgagatcaggccactgcactccagcctgggcaacagagtgagactttgtctaaaaaaaaaaaaaagagccctccgtgcgtgttatgcacatagagcatcgaatttaatcttcaccaaaccaaacaaaggagataccaccaatggagctattttctggaggaaactgaagctcagagatgtccactgccacagccacacagagggcaaatactccacaaggggatttacatcacaagcgccagggtctgtttattaaaaccccttcccagcagagggcagtacagtgtcttgtcccagcagaaaaggtccttcaggccacccctctaaacacaggagccaagggtgttgacagaggggcaccctttgcacccccaggactcctatggcttaatagtggtcctgatggaagaggcggagccaggacttgaatccatgagtggctgcctctagaggcgcaaaggccagcatcggaggaccctgtggcagccaggagcggaaggttcatgttctgcaggggcgcccagcccactgtgcccccagccgtcacttcttctgcacgtggccacagtcgtacttgccacgcacaacggtgagcttgacgcctggcaggtcctgggtgcggccgccctccacaaggacaatctggtgctcctgcagggtgtggccctccccagggatgaagcagacggcctcgcggccagtgctgagccgcactcgacagcacttgcgattggctgagttgggcttcttcggcttgcgggtaaacgtgcacaggaccacacccttcagctgcggccggccttccgtggggcccagcttccgaggcggccgcttggggggccccaggcggtgcatctggttcagggtagccatggagcaggtagcccagagccggggaaccagagctgggcctggagagggccgaaaggggttattatcccagagaacagatcttagagtagtagcaactcaattttggtgttttaggcattgtttaaagcactttacaaagatgcatttgttcacatctaatgttatctacagacaaaagtaactctttattcttcaaggaagcattaccttttttttttttttcttttttttttttgagacaaagtctcactctgtcgcccaggctggagtgcagtacctcaatcttggcccactgcaacctctgcctcctgggttcaagcaattctcctgtctcagcctcctgagcagctgggactacaggcacccaccaccacgctcggctaatcttcgtatttttaagtagagacggggtttcaccatgttggtcaggctggtctcgaactcctgacctcggcctctcaaagtgctgggattacaggcgtgagccaccacggctggccaggaagcattatttttaatgctgtttaaaataatagtaggctcagtggctcatgcatgtaatcctagcacttttggaggctgtggagggtcacttgagctcaggagttaaggccagactgggcgacacagggagacctccctctctacaaagaatcaaaaagttagctggttgtggttctgcaggcctgtggtcccagctacttgggaggctgaggcgggaggatcacttgagcccaggaggtcgagactgcagtgagctgtgatcacaccgctgcacttcagcctgggcgacagagggagatcttaaataaataaataataaaactgacccaaacgccgcttgacacgcagtagccctccatgcagctgcttcccacctcttgctctagcagccctagctctgccaaaaccccaccgtgtttttccacccccgtttccctcggggctccgacggaggcacacaagtccaagagcgaataaccctccccctctagcctcgtccctgaagcccaagtcccccacttaccacaagttagggacgtgttgaggccatggagaaggccagaccaggacatcctgccacctgggccgtccctgtggtaggggataagagactcagaaaggaggaaaaagtgaccgatccgcaaatgctccccgatccgctctcaggactttctggcttaaatcaaaggaaatacctctataggtctaaccacaggccctcatgctgctaacagaaagtccctccgtaaatttagcctcgctctgagtgggttcccgagggcccaaccactctcgcccgcacgcaggaagaactgggaaactggggagatggcctggtagatttggaggaccccaggattccaccgacctcacaggacctaaaggtgaggtcgcggacacgctgaatccagcttctagcctcttccgggcgctatccgtgcagggattggctggttctgcctcgcgtcactgaagaggcgggacacagacgacgattgggcgacgaaggactctatcgcggtcaactttcctcaggatctgattggctcgtcacggtcaggttcgctgccttgcaattggtctaaacgcggagtgggcgggacgaagtgccgccttgtccccggtccaagatggctgcgtccatggcgcggcgcttgtggcctttgctgactcgtcgggggttccggccccggggaggctgcatctccaacgatagtccaaggagaagtttcactacagagaaacgaaaccggaacctcctgtacgagtatgcgcgcgagggctacagcgcactccctcagctggacatagagcggttctgcgcatgcccagaagaggccgcacacgccctggagctccgcaagggggagctgcgctcggcggacctgcccgcgatcgtgagtgcgcctgcgccggccggggggcgcagacgtttgctttacggaagaattgggtttgcaagatgccctccggcagggggcgaacctgtagtaggaattttagttatttcccaagttagccaacgtcttgtgcatggcacccacttatgtgccagttgtccagtgagtgctgaggccctactatgtgccaagaatgcctactgtgtcctggacacccattatgcgcttgtttcatactgctcgctgggtacctcctgtcctttaggaacttgctatgtgacattgccctccgtgctgcaacctcatgccagcctttccctaagaccacaaaggaaaatggggagccaagtgtgaatcggacggggtcagggctggggtgtggtggagctcttgcgtttagagagagaggtagggagagttgtgcacctccgccacacatagcaggcagttaaatagagttaatgaatgaatgaatgaatccattaatgaatggttctattaaactgatacttaaggtgcaactgctatattccggtgttctagatgttgcaaatatgcggtgaataataataaaattgctagcacttataaaagggaattaggaccgggttcacaatatctctgtgttgaggtgctaacgatagtggggtccccacgtcttcccattcctctcttggactcccctcccagcctgtttgaagtgctttattcactttaacctcgtttaattttcacagcaactctatgaagtaggtgccattatttctcccattttatcagaggggaaactaaggcttcgagaagctaattcacttgcgctaggtcatgcaactgggaagtggcagagtgggaattttaacctgtgctttctggcctagaatccactttttttttttttttttttgagatagggtgttgttctgtcgcccaggatggcaggatggagtacagtggtacaattatagctcactggaaccttgaattcctgagctcaaataatcctcccactcagcctcccgtgtagctgggactacaggcagacaccaccacgcccggctaaacttttgtattttttgttgagacagggacatactatgttgcccaggctggtcttgaactcctgcgcccaagtgatcctcccaccctggcctcccaaaatgctgagattacaggcatgagccaccacacccagactccacaatcttaagtaccctgctgtgccctctcatgatctgagttcacagtctagtaaaagacattttttttttgagatggagttttgctcttgtctcccaggctggagtgcgctgcgacttctgcctcccaggttgaagtgattctcccacctcagcctcccgagtagctgggattacaggcacatgccaccacatctgcataatttttgtatttttagtagagacggggtttcaccatgttggccaggctggtctcgaactcttgacctcaagtgatccacccaccttggcctcccaaagtgctaggagtacagatgtgagccaccatgccccactaaa

SEQ ID NO: 96347 - DNA, 13074 bp, Homo sapiens
ataaagcgcatcttctccacatgggcttcacgtggtttggagatgggtgggggaaaacaatcaggtttcttcaggctgaggaggacttgctcaggccgattccaaacattgtgctcgttcaatgcgtagaaatgatttgcatgatggcatgccgtgatcagaagtcatgcatgagatccatacaccacaggacactactaatctagtcccttgcactgggtcagcctttggacaggacccagccctgcaccgttcactgtatttggagaaaatggtaagagttccataccggctacaattctttgagttcttaaaagtccttcatacaccttctgggtagggaaacaaccaactaattgactaacaccaccaacaacaaaaaacaaacccaatccaacaagcagatggatccgttgcgtgtatatgtttaacagacatctctaacatacagccattgttgcacattttgcaagatgaactatttaatgctgctctgtgtccagtacatgggggagactttgatcccaaatggcttgtactatttatgtcactgtaaaaccaaatcctagggctaaaaaaaaaattcatttgtatcttgcaatatttatgacgatcgtttagccttcatactggagaattgacacttatttggggtagagataaaagtgcttttcaaagtagcaccagttatctctaggggtaatttggggaacttaaaatgacctttcattgggagttatggggtgctcatttcatttcgtatcatgtcctctgcattgtggctttctccaggcatgggtcgataccgcgaggggttcagatattctgaactgacctctctcttctgcagaggggtcatcgcatactcacacactgcatggctccccctgcctccatcacatttctccactgagcagggcttcccttgcccacagaggtgggtgagggtagcagcattggggttacggctgtggtttctttcacttattattagaataatagtcactggtgagacctgaggtagagatggagccgcctctgaaccaagcccacttggtttctttactgcactggttttcatgagaaagcaatttaatattaattctttaggatgttccagcttccctcagtgcattcccttgcagccagttttgctatctgcttagcgacctgcccattgtcattgaagtgtggcttctgggggagcgtcatatcttccattccatctcctgctttaggaaagacagtttttagtccaggggtttctcacctaatgactggatttcaaagccaagatgctgcagttgaatgtgtcaggaagtctctatacaaagagtgaaaagagactttagcatgtgaaccaaatccaaataaattcttcctgaaccatacactagagggggaagaagaaccaacccataatcagacacaccgatctgccttgcagtagaagcactttgaaggtaatttcacagtccaccagactagttttgcatagaacaaaccacagtaagtcggcaagcagagctttctatcttgttggaccactagaaactgtccagctctcttaagcctgcttctgcagcagcatccgtagaatttttgtactacacccaataccagactgggaaggcctatctttcagtgaccctgctaactgctaggatgaatgtatagtaacatgtacaggctacattgtaaacagcacaaaacagaagctgacatgtgtggttattctttttaagagaattataaatactgtaatatataattttattttattggcatgcctttttgtaaatacaaattattaacttattaaataggaaatggcttctggcttatgccattgtcatgtttatttttattttttatacttttctttcttcttagaacttagatgctgtcagccaatgtacatccccaaaccagacagacagacaaaaaattttttattgctaatggtcttttccaaaacaacaaaaaatatatatttttgttccaatgtgcaataaattctaaccacgtctatgcaagatttggctaaacttaataattgttcttaggtcttgagatgggcaacagagctgtaagatcccgccaagtacaccatgtgctcatgctagtgatgtcattaagctactagggcatagtgatgagatttttctgagatctaaccgtttccctccgctagctcctgaccccagcccagcaggctgtctcctcagtaacacatgggccttggtatctggcacccatcagccagcctcataggaaagaagccacctccgctgtatttgaagtttcactttttaaaaaaaaaatgtttcccacctttttatccttcacccactgtccttccacctgctcactcactcactctctcacccatcctgctccacacttctttggtagtaaatgacaccatcaccagcagtttacacccgcagttaacaggcatcgaactgaaagaatcagtgatgacgtttttgtgcatcttcgctgagtgggtaagtggcaacgctttgccaaatattaacgaagccaatcaaagagcagcgcagccacagtatcactgcacatatatatatagatatataaatataatataaatatttattttttgtagccaggtccttggtgcagtatttatactccacaatccaccttttaaaaaaaggacaaaaagcaaaaagatgtgtgatgctgttaataatttaaaatgcagagccaaagccactgagcagcagctgacatggttgctggtttgtgtgtgaaaaacattttccccctcttctttccttaacctccttgttgcttaggatgaggagactctgtaatttaaagcagaggacgagaggaggaagaaacttccatgttaacatggcctactctcactcctttctaaacgagccacttttggcgtcagaagttgactggagagagataaacaaactcccagtcaaagcccctaaagcgacagtgcccagagttcttttattttttgctgcaaccaacgtaaacctgtaaaagaccaacagtgaagattagtgtattagtgaatgcatggaggccaatgctgccctaatgagacgtgataaaaagtccatcactcctctaagccaaaaggaaacaaaataaaaatgaccctttttactgtacaagggaagcctgtcttggtgtgtttgttgcttgactatcccaattcttgagtcctgggaggggtctgggaattgggaccttagcacatttggggaaaggaggggaatagagggaagagaaatcaaaggggctctcgcaaagttctggctaagaaggagagattggaagaaaagcaaggtcctgaccccccccagatccccactcacccattgcatgtggcattccccactactggccggtgcttagaggcccataaaacctctcttcacctaatccacctggcagagccctcagagatgacgtcagccaacccagctggactggccttacttctgcctttttcacctgtatgttaaaaaacaaaaacaaaaaaaccctatccctgtgccccaaagctagggcatgtgcgatgcccaacagcctccactctgcaagctcatactgggccctgccctccatcgccccagacaggcccacagacgagggctggtctccttcacatttgtgtgggggtgggggcacgcttcctcttccttctctccctgtccccctttggggacatccctctctaggcctaggccatgtctcctggttcaggaacactctctcaggaggatctcgaagtgcccactctagtccgctccagtagctccactctggagcgagatggctggtaggtcagtccccatcctcctcccctcggcccccagcctccaggcctgctgtggaggtgagatcgccatgggtcatgactttgtgacttgagtcctgggcatcttctgtaatgatgcctctttcttttctcagatgttgcccacagtttagcaaaaagcttcgttcattttcaggtactccccaccccctaaagaattggctgcaacttgccagccagggggacatcaggagagaagaggaagtctgggttgggaggggcccaagttttgcaacagagtttccattgttcagctctgtgctttcttggattccctttccaagattaccaagatttcctccattaaaactcctgaggcaccccctgcccctgccccccactgctgtttgctgtacatagaggctaagtggggtggggtgggtgggtgtgcacatgtggtgtgtgtgtgtgtgtgtgaagaatgtatataggtaaaggggagtgtggtccagtggttccagaaaagggacagaactgtgttctgtccctagcttgaccgctggctcgctgtgtggccttgggcaagtcacttaacctctctgtgcctcagtttccccatctgtaaaatggggataataatactgacctacctcacaggggtgttgtgaggctttaactaaatgttttgtaaagcgttttgagatacagaggcaaaggcgctagggaagggcaaagtattattggacttaaggaagctgaaatggtaccataaatgctgctattctgagagccattttaaactgcactgctccaaccacccccgcttctcatcaccaggacagcaggtcgagaaaatgtctttcctttcacttgcttctggggtttgtgattattcaagacaattttttccccttgctgtatctccttccctcacctcctcgacttgttccctgttctgtttatgcggaaatggcagaaatgcttgagaaatgagaatgtgtaagtggattggaagtttatagtatgaaatttcaattttactttgtactgtacatctttttactttagaatttgcaataaagggttacgtcaatcttgttttcaactctcctcttggactggcctgtcattctgtcattgccctcacactgaagcccaaggtggacaggcaccaccacctcgcaggaccccactctgtcccgtggcggggacagaagtctgcgtaagggctcaccgcggctcagccccttagctgggcaggcagtgccctagccactcccaggtgtgtgggaaaggtttgggactccactcagcatgtcaggaggccttgcctggcggggggcagcaccttggaggcggcgccctgcacgtgggcacacccctctctagtggtgctgcctctgcacactccagcagagccccagagtagccccgagggggagctgcacatcttgttctggtccccatcacgtttttcaagccccttattgcgcacacacctttccttctggagctcaaactttcaggtcagacggccgtaggttcgagaacgtgactatgccactaactagctgtggccgagtttccgcatgtgtgatggagacaataccttcctccttgagttttgaagagtacatcaaataatgtatgtaactggttagcatgaggcctggcacacagtgcgcaataagtggtaactcttcgtggaagaataattgcaagataagaaggaatctgcctggcgcagtggctcacgcctgtaatcccagcactctgggaggcccaggcaggcggatcacttgagcccaggagttggagaccaacttggccaacaaggcgaaaccccgtctctactaaaaacacaaaaattagcggggcgtggctgcgcacacctgtagtcccagctactcgggaggctgaggcaggagaatcgcttgaatccttgaaccccggaggcagaggttgcagtgagcagagatcgcaccactgccctccagcctgggcaacagagcgaggctccttcttaaaaaaaaaaaaaaaagctaagctgacaagaattgggcggtgcacctgccaccctgggagcctggtacctgagcccctcttccaccggcagtcccacgggctttgctgctcctttccaacggattaacaaactctctgctctttcggtatttcttaacgtttataaaccgtccaaagcaccactgccccaagactgtgctcccattttacagctgagggcaagggcactgtgaggtgagggagaatctggcccatctgcagcccakgcccccgggggcgcgcgccgctctttaggaaggagcagctttgtttcccaccagccctgcactgtggcgagcgggccggggctgccgggcgacgcccggtcgccgtcgccgycgccgccagtgatccatagcgtgagcaggacgaccagcgccccggtgcccagcgcccccacgaagccggtgaggaggccgagcgccagcggccccgcccaacccatggggctccgctcgtacaggggctgcggcaggcgctccacgatcagctgcagggcgtcccagtccggcgcggggaccgcggcgcgccgggggcgcggggccggggcaaagggcacgcgggcggcggcgccgggccgcggcaggaagcgctgcccgaacttgcgcagctgcagcgtcgcctgctggtggaggttcttgcccagctccctggccacgtccgggcggccgctgcgccgcagggcccgagccaggcggtcccaggacagggacgcggcctggggggccagccaggccgccagcgcctcccggcagccgtcggacacctctccaggcccggctaccctgcccgccgggtcctcggccgcctctcgccgccgccgccggctcggagaccccgacgtggtgttgagcggctcaggccgcgccagccggtcttcagaaagccgggacaactcggcctccacgtcgggctcgggcgcctccaggagcgaccggaaatggccgcactcctccggggtcagcagctcggccagacggacggctgcgtgagggcccatagcgtccacggcccccgccggagccagcgcccaaacccagagcgysaggaccaaggcgctcgccagagtccgcgccgccatccctggcgggaaccagggaccgaggactgtgcggggacggggacgtggacgggctccgcgccggtgatgggggaggggttccgaacgcccgcggattgtgggagggaggaggctccgaacagtcgggaagcctagtggaggaggggactggggacaagggggctgccaacacccagcgacggagacggggactccgacatggcacttgttggagggtctcacgaaactcaggaacaggggtaagagggcttgcaacacccaggaagggggttctcagccccccaggaggctaggattctgggcttttacattgtagctcctgccctaggcctcctaatagccactaatacctcaaactgaacaagttaccaacatctcttctaattcatgtactccccaaccgttcccctttacgaaaagccctagaccccttgctctccattaacttcgatattcaatcaattcctacattctctttttttattttcttttgtgcagataggggtcttgctgtgttgcgcaggctggtctccagctccagcctccgcctctgccaccacctcccaaagtgctgtgatgacaggaatgagccaccatgcctggcctcaattcctaaattctcctcttgtctaccaaatactaaagtttagtatttattaaatgaatccatcatcccattctcccactccagtgcaagtccagaccctcctcctctcttgctggtcctccagcccccatccttgccccccaacactggggccctgcctacctgcacttattccatttcccccaaggaagcttggctctggctctccttctgatcgcggcctgcactcctcctgctgtcaggcgcctttgggaagccctccctgactccgagtcacaccccttagtggtgtccccattagggactcctcctatctgccccacagcacactgcagctcggcctttttactgtctccgccaactagactgcaaggtccatacattgtccccatggcaactagagcataataagtgttcagtaaagatttgttgagtcaatgtgtgaattttttgtttttttaagagacagggtctcctgctgctgcccaggctggtctcggaactcctgggctcaagggatcctcctgcctcagcctcccaaagcgcaaggattacaggcatgagccacaaggcagggccattgtgtgaattcttaacttgcaaatcagtcctgtcctcggccccctaaactcccacaaaggcttcatcatagagccccagctcctagcagggcatggaaggccctccatagtgaggtccccgctgactcctccagcctcactcctccaattcctgccctcactatcttgtaacacaacaagactcgtggcacagcacgtaagatgcagtttccagcctccatacttggcccagctatccccctcccctcctgggtaggaagttttcctgacaccccaccaagaccaccacaagtcaggatcttttctgggcattgtttgtttgttttgttttgttttgtatcagaatctccctctgtcacccaagttggagtgcagcggcatgatctcggctcactgcaacctctgtctcccaggtccaagtgattctcgtgcctcaacctcccaagtagcttggactacaggtgtgcaccaccatgcccagctaatttttgtatttttagtagagactaggtttcaccatgttgaccaggctggtctcaaactcctgacctcaagtgatccgtccaccttggcctcccaaagtgctgggattacagacgtgagccaccgcgcccccagccatttcttggcattcttaagataacctgtgcatcctccaccagggcactcatctggaaattagaggatttattcaagaaacatgtattcaatgtcttgtatgtaccagataattgcactaggtgtatgaatataaagactactttgatgtggtcccccatccccagcagctttatccagttgtatttttaaatgatcaatttctgagcttttcccacctagacatgggctccaggaatagcagctgtgcttgaccccttctgtatcctcagtgccaggcccaatgtctgcacacagtaaggtgcaaaatagaggagtgggggcaggtgggtctggacctccaagggctgagaggcttgtggtaatggactctggggcagtgccttagagcccccacctccaggcacactcacatttgtgtcctctttgctttgcagggtctccctgatgctcacgctgcctcctgtatgtgtgcagtgagccatagcagggagcctgggtgcactactcccctgtgctcttgcgcatgctcagcaatcttgcctagagtattcaaggacctaggagctgtgggtccaaatctctcactgacatctctacagagcttgttcagcaagtgttcctaggttgttcagtctcccagtttacgatgagctgtcacagatagagttaggggactgatggatggggggatggtagacaaaggacaccacgtcacctgagacattggaacttggccgtctccacaccccgccctctatccactttatctccactgagaatggaatacaagtataaccctagctctattcaatgaaggctgctgcaggttctggatggctcctccctctcttcagcaacccccttcctccatgcattcatttcttcactcattcaacaaacatgtgagcccttccttgcccccctattttgtggctctggggatacaatgagcctgccccagtgctgaatgtcagagctcagaacggcaggaaggccccttacccatggcttcttccccatagcctcagtgcccattcctgtaggtactcactgtatcacagtgagtcacaggagtccttgctccttgttactaggggattaggaacaccccgcccagggcaccagcatacacaggtgtccagacatctcccagaggactcccacatcccactgcccccgagaaatcttctgcaaaccacatgtcatcgctttaatactgtgtaatactttcttttaaaatacagtctcttctgaggtagacagaccacaactgcagagcatcgtcagacaggagataaatacgtccatgtacaacacgcagcaaaatgaggtagaaatggttacagcgggaggagaggatcccagccccagtctgggtagaggaaggggagaggccagctcggaagtcaccctccccactccctgcccctggattctttggtatgcctccccccaacattaccagagctggactggcccttcccctacctgccccagagcccatgaggtaggtgccactaggctgggggcagtctccttgtgcaaagctccccaagcctggggaacaggaggagcctagtagagaaagcggtggggactccacctcccagagctccctgcctcttgaagggaaggctgggatcccaccccaacttccctgacaccctccacccacccccaccccccaatacatacacacctgagagagaacccctcactccatgctccctccgagggtcttttgcagcctgcggctgtgacccggcagcccactgcttctgaggcaccaaagccctgtgggcggctggctccaaagagggggccagaaagcaacgggggtgggggggaacagagcagccttctggtcagcactcctaggccagcacaggccctgggtgccagggcccctgaaagatcccccccagacaccctcccagccagcggggaggcagtagactctaggaaatgcacgggcaggcaaggaactgcacaggaggctgaggtgggagagagaaaaagtggtggtgggggggcgtgtcccctgctttggactaagatcagagttgtgaaatgggctgggggtggtgggagcaaactgctaaagcctcatcaagggaaaattggtgggaaggagagaaatatggttcttggaagggttccaagcctagtggaaagttcaggcaggactgagactaagcccccaaggtcagagaaaacacccctgcccatctccctcaccctctcccagccctggagctccagacctaggactccgggggaatggggaaggcacatttcctcacagagcccccacaagtgagggatgctcactcctcctcagagcctccagcagagatggctgaggtccagtagctgattttgtggccagactgtctacccagatggaatcctcctagcataagtcactggggacctctgccaaggcagggccaggggacatgacctttctggagactttctgcttaggtcaccttcccatttgggccctcccaccctaccttctgggtctcaggaaggaattgggcaagggcatcctaactctggatagcccttcacagaaaacactcagcggaggggttgggtggggcagggggtggggagcagcaggagaggaataaggcctcccttctctcaaaccccacagcccactccccacattcatgcctaggcctcggccctggggaggaagcccttaggaatacattctgcttctgaccaggaatagctggggtttcactgaggcctctgggtcttcctctccccttccccgtaagtctcattttttgagtgtctgggagaatttggtcccctggatggagtgggggggagggggcaggtgtgaggggcacacaggagagcagccaaagtctaacattctttctgaggtcagtttcttcctgagttgtcaaaagaaaaagaaaaacagcaaattctacacattttacaaaaataagaagactaaaatatgaaacaagctacatttctgggatctcccctcaaaaacaaacaaaaaattccccttctttggggactttttttccttgatccccctagaccctaggtttcagatgggtagaggggtaaccctcctcctcagcccctgggcctccagagctcctgcaaagggccactgcagtccaaataagaacagaaggcagggaaaggcattaaagctcagggaccaaaaggccagggacgctggagagccagggatggagacagaagcacagagggtgagggatggagagctggggagggaggggcaggagagaaacagggccagcatggggtgggcaggggtgtcagcgacaaagcaaaagggagagaaaaccaagagaatgcagagaatgggatggagagagtgagggagaaggagggtgccattcagatagcgaggagacaaaagcgttgtggcaagagagcaggagttcttaaggccccgggtgccagcccatgccggatctgcccggtctgccgggcggagatggcgagcttccagtccacaataaataggaaaaacctgagtacacggcgcatatggcatctgcctggcagaagcattttccttcccacgaaaaaaaaaatatccaccggcagacccctcctgtccccgatcccacattcaccactccagcccctgccagccgggtttagtcagtgacatccctcccacgcggaggcggcggggacggagggactgcggctcccgcggcctcccccgcgcgccgtcagtgtccggagccgtacattttgtcccactccacgaacgagtccagttccttggcagaggccctagggcccaccttggccagcgccgcctccaggtccttgtaggagagggggcgctgcagccccgggaggcccgccccggccgccgcctgctggcacagctgccccagctcgcccccagagaagccctgcgtgccctgcaccagcgccgccagttcccgctcactgagcgcgcagccctgctgggccagcgcccgctgcaggatctgcccgcgggccgggctgtcgggcagcgccacgtagaagcggagagagaagcgccggcgggtcgcctcgtccagagccgcgggccgcgaggtggtgcccacaaccagcacgccgtcagcccccgcgccgcagcccccgtccaggcaggccaggagcggcacctgcagcgcgccccctgccgccgcgccgtcgtcccgggcggggagcagcgcctctagctcgctgatgaggagtacggagggtgggcggcagcgcgcggccgcgaaggcggcctggaggaggcgcgcgc

SEQ ID NO: 96348 - DNA, 12661 bp, Homo sapiens
ggcctgtcctgttttaactttggcaatttctcctcttcttgacacatacatgtgcaagttacttagcctttgcctagttctcttttcttctctttctctatcctatttctaggtaagttcatctgctccaagggcttcaaatataatatcattatgccagtgactctcagtgtctctcttctgagtgccagtccgagtggcctgctggatgcctctctgccacctgaaatttaacatacaccccaaatgaaaacgatcctcattctttagcccccaagctttcccctccccatgtttcctggaacggatgccaccattcgcccagcgaagcacttcagcaatgtgcaggtcacgctgacacctcactccctcatcctcacccaacgattccttcagctcattcgccctcctgatttttttctagaacatctacttctctccctcacccctggcgccaccatccttcaacgcaccctgttttcttttctggactagtctcctcatatctacccttgctgacctccaatccagactcatctttttaaagtgaaaatgttatcttgtctaaaaccatctaatggcctcccattggctggttccagatcctcccattttttaggataaatttctgaatccttaataagagtctacagaaccctggatgatgtcatctggcgctatctctccagacatttcttgtgccactgtcttcaccatcatctcttaatagactcctaaaaaattcaataatgaagaataactcaggaggaccttcacatacgaatattgtgaaaagcctcaaaaacaaacacacaaaaaatccttacagatgttctaaatcaaatgacttgtttccaatttaaagctgcttctcattattcatatttattgaaagtacttttgaaatatcttttgttaccatgaggctatagtttatcatataatgactccagttgaaaaactgcttattcttctcagagaatgaagtcactaaacttctgtaaggttctaaaggtccttcagtgcatggatcccaggattttccaggccagtaaaaaaaaattaatgaggccttggcacaggagggtccaaatttttattctgccaaatggagatgttaaaacaaaacaaattccatgcacataacatctacctctgccgttatttttaagaacacgtttgcaacaatgaaaacttgaagtccatacaatcagagtaaagattaacattctaaattaataattttagttttgcattcttatttttccagtttcattgaaaacctgtgaaaacagcttcccaaagtgacaccagtggccagactagactttgataatcgctgttctagataagaactattatatccattgagaggttgttaattcttcttctgaaaatagctatcaaaatacttttgctagaataaataaagctattgagaaagaagaaaaaacagcctccaacacctgaaactgctctgagtcccacagctatctctcaatattattacaagccgatctgacactcacagccaggtaagctctgttttcctcctggacatcaacaatcccacagatacctacgtcggataagattattctgagacatgacacaccaagacaaagcaatgccacttgaagattttctctaagaacagacaaaaacaagggcacctgcaacgcacaaaacaccaaacatccccttctcgtgctaaacagaatggctgttccttctttactcagtcagaattgccccaccttctaacagcattctatctacagcaaagcccggttcctcagtcttaccccaaatcatgcaaccgaagttcaaattctgtaatgggtttttttctataacctaccgtccgtcgctcatggtgtgtggtctcctttgcctcaaagaacactaaacccaatttgttcagcttatggtgtgttcctggtggtctttcaatgaagggccctgacagtatcaaagtatcaaagtctctcccaattcccataaaaccaactaccgtcaagcaaattaattccctacccacaatggagcaattttattttaaggcctttaatcgtgtccacatacatgttctgtgtattttcctattacaggaaaaactgtatatactattctggattctacttttatctgctgaacattatatcaattttaatggctaaatcatatcccaccatgattttaaagaatttctccttacaggtataaaagaagacaatgcacatcttgcttccactttcaataacctacctaaactattcaagaccatcaccatctagcctcaggccagatgcgccaggttcctacttatccgattctgttggcaaagacaaacgcagtctgattgctttataaagaaatgaattatgaaagagtactgggcgtcaagaggctcggacgttacgcatgttcagtaaacaacagtgtaacctctggctaaatattttctcactctaggtctacttcctcttctgtaaaatgaaagagtcacgctcgtccctcactgtctcttgcagttaggaagtccgtagccctgtgacttgctcgtgggaaagagccacgggacaggcgatcccatgacttgggtgcaaaaggccacagggggccctttggggcctgctctgggctgctcgcaccgcccaagcttgggaccactcagcgtttcccacggccctgcagtatcctgggctgaactcctgaacttcttcgggagaaagcacctgaccatcaggcagtctgtccttgattgagtaatgcacacaggtccaccggaacattttatttaaacacttcaaaatgcaagggcctggaactggttattcaagtacactcactcaaatctaagaatgtgcgaatcacacccaggtatcctgcagagactaggatttcctttaaaggagttctagttgcaggtagcaccgaatctaccgaggacggggttcgccagcccgctctgcacccacacccctgtgcacgaaaccacagacccccgtaaagaagctgcccagcacgaggtgttccttgtacccgctcgcgccgccacacctgcgcctccatccgcgcccgcacctgcacgcccctctctgcgcctcggctcaagctcactcaccggcggcgcgtgctgcgcgacggcacagctgacggcggcagccaggaggactaaggcgacgcaactccggcccggcatcgctctagcagccaacgccactccccggactccagcagaggcaaagaagagccggctgggccgggggcaggccacgccccctccgccgcgtgacccgcgacctgggaccgcaccattccaggcagtagggggaacgctcggaggaggcgggactgggaggagaggacggggcttttcagtgccacgaaaagggtggcgtagagaaagagagagagccttccaggctacctgcagaaggagagtcgcgatcgcctttggcgcgtggcgtgatccatccccctcccccaccgcgggcaatagtcggaccgagccggagccccgccccgtaggtggggccgggagcttcacccgtggcgcctcgatggggcgcctctagcaggcgggtgcagcctgtcccgcgtacccaggcgtcctcggtacccacgaaacggatccaaagagtctcaacactaatgtaacatcccaccctgacccatctttgccctctgagaaaagcggcccgaaatgagttgagttattcatccccaccgcggagtcagggacaaggagcagttgagtggccgaggagtgagagagaatcgaatccactcgggtcctccaagctgttggttacccacttgggctttcacagcaaagctgccaaatcccagaattgaggcctcggtgaaaagcgcgctgagacttgggtaggaggcccggtgggacccgcgagctttctctcccagcccgatgcagcagttcattaagcggctgtgtttcctcctaactggcgaaggactcaggtgggcggagcagagctcagcttgggaggaggcggacgcgagtagctcggcagggggactcgcttggctttcgtgccatccgtggacacagtcgcgcgggtaggtgaccgggttggatttcaaagtccagcaggaaatcctgccctctgggttgcacttcctggatgagcctctgacgtctcaagcagcattgttttaatgctttgatgaagctcagcacgctgccgaaatctcggcagtattttttcttttctttttgcatgtgagagaaaggacaacaaattgcagttttatccatttgtattatttctttagaaaactcaacactctttttgttggaggtggggaaatgagaaggtgatgttttgttttgctttttttcctattttttttttttaaaggaggagaagatgacagtgttctccctaaggatgaagtttgacttttgaaacatatcacatgcttaaagcacatttgagctcctgcatgaacagtaagctagcagatggtagaaatattctttattaattcaaaaaatatttactgcggacctacaatgtgccaagcatgtctcctgacactggggataagcagtgaacaacaacaaaaagacaaacttcttccaccctgaggcgtatgttctcggtgagaaatgggcaataaacataatacctaagaaaattatatgggatgttagtgataaatgcagtggaggaaaagggaggccaggggcatcaagtgtggagatcagaagtggtagagttacaattttaaataagagggacagatagacatgattaaggaggtgaagtttgagcagacagttgagggagaccaggaagctagttttgtgtgtgcccaagtaagagtattctaggcagagacagcagctgttaaaaggctttaaatggagaatgtgcctggcatgttcaattacagcagacgtgtgtgggtctggcacagaaagaacaaggggaaaagaagaaagaagtattaatacacaaagtatttagttaaggagagcagggcaaattctgtaaggcattcagagccatttcactccggaaaaaaaatgtgtaatattgaatatacgtgttaaatgttgaatctatggaattaccttggagcttaaaatgagtgtgcgaagaagaggattcccatcttttagttgttattactaaatcaaatagctacttgattggaagatcattcatcttcagtactcttgagagcgatttaaacatgtcaccaagcatatttttttccctactggaggatgttaattggtgattaggtagtctagcaaaatcagattctttatggaaaaaatttgtcaattgacatactattcttaggcaccactttcgcagaactatgcgtctaactttcaaaggtctattatatattattaatactcttttcagataaaatataaatctagttccctaaaattaaaccatttcatgcatgtcttttttttcttacacatatatctttattttgcctacaccattctttaatactagaaatgtacagaaagtcaaggcaaggtgtgtgtaggagactttgcagtggtttttggcatactgatctgttcatagaaaatggtatttaaatgtgcaaatgcatgattatgtccacggaaagggtggttcatactgcacaaaagcatcaagtttaagacttggataacctgtttcgtgtgcaagagtcgggatatgtaatcagattgtttatggaatagctgaagttcttggcaagctgtggacttcctcatctcctacctaacattcctaggttcctgaggtggagccttgatttaaaagggttgcaacttagccaccccaccctaaatgaaacctatcatgtataacatcacattacctggaacaggtttgacttgatttagtaaaaccgaatatacaaaaacgtgtactaaaaggtcaagagatagagaaataatgtttcagtttgagaaataaacatttttttaactttaaatattgacttttttatgaataaggaagctttttattttacaggtctttgtgggaagaaacaaatcacaaaagcaattaagagagctcaaacaatgggtaagaaagagcacctcaacaackgtattgagctagctgaaattttgctcattatgctttgtcaagaactttaattatctctttacagggtttatgccagttacatacaaggatcctgcatatttcagggaccctaaagtttataacatcagatatccggaataaattccatcacattaccaccagtaaacttattttatagtaagtggttgtatgaygccaatactgactcaaaccaacctttggatagaaaagtgtttcaggagtgaggtaaagaatgacacttccccttcataccaatcagtgttcattaagcagatcgcttatttaaaatgttaacactcatcacattttacatatgttgaatgaaagtggttctgggtgatagtcatttatatctggtccacaaatagctcatacaatgtagtacaccattcaactgaatggagttaaaactgctcagaatggttttctaactagcaaatgtaagtatgcctggttaagagatcttccctttgtaggaatgttacactgggatgcatagtgatgctgtcacagcaggacaaaacattcctagacaactctatcctcaaaccagtagtgtcttttacataaaaagatgatttacacctaatagacagtgaatgtgatagacatgtatgtatatatgtatcagttctgagttccaccagcctatcccaaacacactggattaccaggcttgtactgtactcaaaattaaggatttgctaaatttcgtgcaaaggactctaaactaggggagagattattgtttgtgttgcgttatagttgtgtaataattaaggctgccagatttagcaagtacaaatgtaggacaaatttaaattttagatcatgttttgcaaaggtactgcgtgagatccagcattttatctggcaacactagctgtaatgtacttctaaaaaattatcacctaaggataattttaatgactcagataaatttcatataaatttctttccacattgtgaaaataaggctattctagcttttctaatactttttttttttttttaatagagatgggtctcactgtgttgcccaggctggtctctaactcctggcctcaatcattcctgccttgtcttccctaagtgctgggattacagctgtgagccactgtgcctggcctcacttttccaattctaaagaatgtgtgtaagcctttccctcaacaacttattgaaaggcgaaaaaaggtttggaaataaaaggatctgatgtttgaaaaagtactttgtaaaataaatgcactaagacttatctgtggattactgcaaagaggtgaatatagtaaaaacaaatgaacttacctgtattactgcaagtagctcaacctagtaaaaacaatggaaatgtttgactttacccatcagccaaattaaaaaaatctccttttaaggttaaaaggatcaaaatgtaggtgaccgtgaatattcaccaaaaccttcatcttttcaatctcttcatctgtttctgggctgctcattttggatgcttttttattggttactactatcagtatctgttttagatggtttgtcttgtgtgtctaacagccgtgaacactcttttttttttttttttttctcctgagtcgaagtattcctctgtagcccaggctggagtgcagtggcaggatctcagctcactgcaagctccgccttctgggttcacaccattctcctgcctcagcctcccaagcagctgggactacaggcacctgccaccacgccgggctaattttttgtattttaatagagacagggtttcaccatgttagccaggatggtctctgtctcctgacctcctgatccgcccaccttggcctcccaaagtgctgggattatagtcgtgagccaccgcgcccagccaatttttttgtattagagatggggtttcactgtgttagccaggatggtctcgatctcctgacctcgtgatccgtccgccgtcatctcttgaactgccatctgtcagctaagtctaaggttttatgcttaaccatttgtggtgtactagctggactagcttcaggaatgtcagtgttttctaccattaaggtcagattgtctactacatcgagatggtggtggttgttagagctacctttagaaacatgtctgtttttttaaagacataacacatgcatgaagaattcagaatctggaaaaaaggtccataatgtttgacaaagaaaaatgttctcctgagggtcttttttggatgctcttctctcgttctgctggaatctgggctcatctccttttttcaatttctcgttttaatctgtttacatcctttactagtttatctactgcttgttcactgtcttccacttttttgcatatactctttaatttctcttacaatgaagcatacatttcatttatcttatgtacctcctttaaggatccatcttcttcaaaaaatttagagctgtgtgtttgtactgctcggctaaaaccagtggacatacaggaacctgatacagttttataacctagttgttcagacatgcccagattggcaaccactgaaggtaccctgtgaaaaagtccttttcgaggtttatataaggcatgttccagtcgatgagtagagcggctttctgttattatacttggtgttcatagcagaaaaaccaggtcttggtttgaaaaatgctcctgcaagtttttgtgaagcagcctctctctaaatgtcatgatctgatctgaatgacgatggaatttgtaacaacctaccacattttttgtgaatttgataatattttcctcagtgcctgcttatttacttcacctgaagaattataaaaactaaaaaactgatagcatggaatatatttctgaatgtcaattgtataaacaacttcagcatcatctatttgggaatcagtaatactattctttttttttttttttttgagatggagtctagctctgtcacccaggttggagtgaggtggcccgatcttggctcactgcaacctctgcctcccggattcaagcaattttcctgcctcagcctcccaagtagctgggattacaggcgcccaccaccatgcccagctaattttttgtatttttagtagagacgaggtttcaccatgtcagccaggctggtctcgaactcctgacctcaggtgatccacccgcctcagcctcccaaagtgctggggttacaggcgtgagccaccatgcttggccttgtcttctcccttctaatatgaaagaggaagctaggaatccccattgctgctggcatgcatgctataaacctgaagggagccacctaagatgaaattgatactgtggactacacagtagaaagatggaaagaaactgggtcattgatgacattgtcaagatgctagatcaaccaaccacagatcctgtccaacaactggactcttgatttacatcagccactactctgttattgaatcttggacaagttggtttgcttacaagttaaattattgtatctgagagcatcctaactgatacacacatgaaaatagacatttctcctttgttgagaaggatgtacaacaaatctatgaagtttaagttttagtaccttcacttgctcatgccccttcccaaccttttactaaattttatgcttgtaattttgtattcttttccttaaggaggaccacttaaattgcataagattcaggtgtcaccaaacctggatctagcatcagatgttgttggaagaaaatgtccacctttctctgccgtctcctccattcatgtctccctagggaaggagagatgtatgatgtatctaatcagtaaatagttgaaaaggtcacagaacgtgcgtggcctggcctctcttctggcgctttcattcagatctgcctccccacagtagtagatatgcctgcccacactggtaattctactgcagcaagccttgaatgacaacagtggacgtgaaagtagttgctgcctttgaccacatcttcccaaagtggcacgtcaccaacagactttaaaatcatgacgttataacgtaatggctgtgaagatttggaagaaagcactctaaaatgagagctctgagagatgtagagagaaggcagtcaaggaatagcgcttataagcacctcctgcacatccggtccctgcgcctccatcctcaccctgccctcagctcactcccctcctgttagaaattggctgtgcccctgaaaagtcatttgcatttgcctaaagactgagtacacaagctcattccaaagtagaaggtgttgaagttccattttggcctcaggtcaaaattgttttctctatttcagcttaatgagcaagaaagcagaatctaatatgtgtatatttctaacgcctgtgtatatttctcaactgtttcccagctcagaaaggtgaggagtatgacagtcaccctgaaatgacaacagaagccaacaataacaattatagtaataatgtgtgtatagaaagtactaaatgaccattaaatgaagagcagattactaggtgctatggaagatacacatgcagtgaaatacaaattccagatctcagggagtttgcaaccgaaaaagaatataacactaatatatatacaaggggacttcaaaacgttcacctgcaccctccacctcccaggttcaaagatggagttaaaggataaaaagtataaactttatttcttttttttttttttttttgtgagatggagtctccctctgtcgcccaggctggagtgcagtggtgcaatctcggctcactgcaagctccccctcccaggttcacgccattctcctgcctcagcctcctgtcataagcaccatcaaggtcaagacacttttgtcagggatgataccagccatttagtccatccttaaaaaaaagagggtcctgggaatttaaccatgtcaatgcagtctttattaactgaagaaaaatgggtgccctttacagattttttaagattaggaaacaaaaagaagtcagaaagatttcctgtggaagctcttgcaaaattgcccttgtttgatgagaggaatgggcaggagcattgtcatggtgaagaaggactctctggtgaatctcctgggcatttttctgataaggctttggctttctcaaaatactctaataataaggagatgttgtcattttttggccctccagaaaatcaacaagcgaaatgccttgagcatcaaaaagaaatgttgccatgatctttgctcttgactgctttgtttgtttgtttttggagacagagtcttgttctgtcacccagactggagcgcagtggtgcaatctcggctcactgcacctgcaccctccacctcccaggttcaaacaattctcctgcctcagcctcccgagtagctgagattacagacatgcaccaccactcctgactaattttgtatatttatatttatatttttattttattgttattttttggagacagagtctcgctctgtcacccaggttggagtgcagtggtgccatctcggctcactgcaacctctgcctcccaggctcaagtgattctcatgcctcagcctccggagcagctgggattacaggtgcatgccgctacgcccggctaatttttgtatttttagtagagacaggctctcaccgtgttgaccaggagggtctcaaactcctgacctcaaacgatccacctgcctcggcctcccaaagtgctgagattacaggtatgagccacggcgcctggctttatttttgtatttttagtagagatgaggcttcaccatgttggccagactggtctcaaactcctggcctgaagtgacccacctgcactggcctcccaaagtgctgggattacaggtgtaagccaccgcgcctggcctggtctgcttttgctttgactggaccatttgcaattcttggaagccattgctttaatcgtgccttgtgttcaggatcctactggtaaagccatcctgttacagttcttcaaataaatgcttcagcatcctgatctcacttgtttaaaatgttcatttaaaaggtctactcttgactgcagctgatctggatgtaatggttttggcattcattgaggggaaggtttgctcaactataatttttcacttgtaattgtgtaagctgaacaagttgagatgtctatgctgttggctgttatttgtgctgttgttagtcctcttcaattagggcatgaagatgatgaatttttttctcacaacttgatgtaatgatctggcactgtgggtttcatcttcaacgttgtctcatcctttttaaattgacttgtttgtttgtaaactgctgatttctttggggcattgtccccataaactttttgtaaagcattagtgatttcactgttcttctacccaagctttaccataaacttgatattcttgcttcaattttacagaatttgtgttgcttatataggggcttttttctgactgacgatttatccttcctattacctccagctagatcctttgagacatactacagtaagatagtatgagtttatt

SEQ ID NO: 96349 - DNA, 16462 bp, Homo sapiens
  misc_feature (1)...(16462): n = A,T,C or G
ttttttttatctttgttggtttaaagtctgttttattagaaactaggattgcaacccctgcttttttgtttgtttgtttttgttttgctttccattttcttggtaaatcttcctccatccctttattttgagcctatgtgtgtctgtgcacgtgagatgggtctcctgaatacagcacaccaatgggtcttgactgtttatccaatttgccagtgtgtgtctttaaattggggcatttaacccatttacatttaaggttaatattgttatatgtgaatttgatcctgtcattatgatgctagctggttattttgcctgttagttgatgcagtttctttatagtgtcgatggtctttacaatttggtatgtttttgcagtggctagtaccagtttttgctttgcatgtttagtgcctccttcaggagctgttgtaagacaggcctggtggtgacaaaatgtctcccagcatttgtttgtctgtaaaggattttatttttccttcgcttatgaagcttagtttggctggatatgaaattctgggttggaaatttcttttctttaagaatgttgaatattggcccccactctcttctggtttgtagggtttctgcagagaaatctactgttagtctgatgggcttccttttgtgggtaacctgacctctctggctgcccctcacattttttctttcatttcaaccttggtgaatctgacgattatgtgtcttggggttgctcttcttgaggagtatctttgtggtgttctccttatttcctgaatttgaatgttggcctctctttctaggttggggaagttctcctggataatatcctgaggagtgttttccaacttggttccattctccccatcattttcaggtacaccagtcaaacctaggtttggtcttttcacatcatcccatattttttggaggctttgttcattccttttcattcttttttctctaatcttgtcttcatgctttatttcattaagttgatcttcagtctctgatatcctttctttcacttgattgattcagctattgatacttgtgtatacttcacgaagttctcgtgctgtgttttgcagctctatcaggtcatttatggtcttctctaaactggttattctagttagcaattcctctaaccttttgtcaaggttcttaggttccttgcattgggttagaacatgcttctttagctcagaggagtttgttattactcaccttctgaagcctacttctgtcaattcgtcaaactcattctccatccagttttgttcccttgctggcgaggggttgtgatcctttggagagaagaggcattctggtttttggaattttcagcctttttgcactggtttttcctcatcttcgtggatttttctacctttggtctttgatgttggtgaccttcagatggagtttttgtgtaggtgtcctttctgttgttcatgctattcctgtttgttagttttccttctgagtccggcccctctgctgcaggtctgctggagtttgctggaggtccactcccaaccctgtttgcccggatatcacaagtggaggctgcagaacagcaaagattgctgcctgttccttcctctggaagtttcatccctgaggtgcacccaccacacaccatccagagctgtcctgtttgaggtgtatgttgacccctgttgggaggtgtctccctgtcagaaggcacgggggtcagggacccacttgaggaggcagtctgtcccttagcagagctcaagcactgtgctgggagatccgctgctcccttcagtgccggcaggcaggaatgttgaagtctgctgaagccgcgcccacagccaccccttcccgcaggtcctctgtcccagggagatgggagtttcgtctataagcccctgactggggctactgcctttcttttagagatgccctgcccagagaggaggaatctagagagctggtctgatattttttaatgggaaatcatttttcttgttggtgtagtttatccaagtttttttttccaacctgtaaatgataactttgtgagcttttcggaagaaactgataatttttggaaattttgaattcaatatttaccttatttgtactataacaagtaacagtgaatttaaaacaggcaaagaaaacaaacaatgagcttcatgaattataactcaggacttattttctccctcagtcaaaaagaatgttaagctgtgttaatctacaaggaattttgttaatgttgatgtaatgttggctctgttaggagtgcctgaacagagtgcagacatcttgagaagtttaacttacacaactcaattttcataagcatttcagtaactaaccttaaagtcattgtaaatgttgatatgaaaattgttttctcaaaatcttctgaataatcaacactcaagggaaaggttttagacagtattttaagaaatttgacaggaatggaaaatcagaggaagccatctagaaaattttactccatggcagtcatgaagaattctttgttagccaagggcaatactgcagtgcatcatgtactataaacaataccctccaagggtcagagagggtctttgaagttatctactgccattttctttccagggcagggattctgtctttagcatccttgagaattatcaagtattttctaggtagtatggggtacataaaagtaagagcaatgttagaggtaaatagaaataattgttatgtaagttcagaggaaggaggtgtcactgactgggtaatcagagattctttgcagaggaggtggctcatacgcaggaatttacttgtgaaggacagggagaatttcacttgagaaaaagcctggcccaagcatatatgtggaaattagaaagcacagggtgtgtttgaggaacagcagataaaattaagggctggagtctcagtaggacatgcaatgttaattgttctccgggagcattgcaatcacttctagcagggcatatttgcaatacagcaggcaaggtttaggccagtaaattttttccttcagttctaattgagttagatgtcattagtgccattcttcattgggatgaactgaagaagagtctgtgattcagaacaagttgaataaatatgcaccaaatgccctgtacttgtaaatatttatgacatgctgtcagtataaattatatttactatatatttcaaaatatttttgttagcaaacatttgctttaaaaagatgcatttctatactctctacataaagttgtggatttcatactgataaattttcaaatgcaaaacaaatactccttctttatgtgtagacacagggaatatggaggttctgcacctgtatggaagtgaggaacagaagaaacagtggcttgagcctcttcttcaagggaacattacctcttgcttctgtatgacaggtaaatgccaatcaccattctctccttgtgtagtcagtcgtcccggagttattatggatgagctgaagaaatacaggatgtggttctgtgtttcagtcaaatttgccattggccaaaaatgtgagtatgtttattttgagcctgttattaaattttggcattttcaaatgttcagaaaaatatgatcctctcctttgttagaatatcagatgatgttctctagtagcctgctatagcattagtagcagagtaaacttagtttcacaattttttgatgtcattactaaaattgctatatatgaatatttaagatcttctttgcccttatgtatgaaatatctatctttgtgataattttatattgatacttataaaatattcaactcttccataaacccagaaaaatagaaatttcaccagtactggacatatggctcaaattataatcatgtgggaaaataaaggaacatgtcaataaaaacagatttaatatcatttgtacatagaaagcattaagaactcttcaatagaaaaaaatcattgttttgtgatttagtttagaattataccaaattttgcttgtccataatttttaagtgctttcaataatggccagattttattgttttgtataacatagcatacatttatacagtactcctcttttatctgaaggggatacgttctaagactcccagtgggtgtctgaaaactgggatagtcctgaatgctatttagactatgttttttcttatacatatgtacctatgatacagtttaatctctaaattaggcatagtaagacattaataataactaataataaaatagaacaattataacaatactcagaatggtacactatttaaaaattacaaattgtttacttctggaatttttcacttaatatttttggaatgcagttggcctcataactgaaacctcagacagcaaaactacagataacaggggactactataatagcagaactgatctccgtttaaatcagtaataggcatttattgaatacctacagtaggatgtattgtctacaaagcactaggtggggtttacaaaataagtagaatacacagccctctttctaaaaaagaaaaaaaataagtcttaagttttagaaacagaacacatgggatatctgaaggactcatttaaaggggtgtcatattagcaagtgcagattgctatgattgagagctagacagttctgaagtgccatgcaataaagcagttgtctaagggtgtcccatggagaactttctgaagaccttaagtgttgaacaggctttaaagaatgcaaagtatataaatcagtgaaggcattcctgatggaatttgcaaggcacattagaaattgcttaagacagtaaactatatggggggaatctgtcttgccaatcaatatttagtacatatctccattgtgagaagtagaaaacaatacttttatctacatttgctgattggagaaaggactgggttgtatcccaaatcatatatcagtgaggaagccaaaaatacagttcaaaatactgatccccaatgttcagtatacttcattcattcactcattctttcagtgcacgtttattgaatactgtgtgtaggttatgggaaaagcagggtggaatggggagtgaaaggacattgaaaaagataaagatgtctttgtttttaaagttttcatatccttatctaagtctactgatgatatctgcctgcctgtaaattcagcttttgtttatttatagaacctgatgtagcttcaagtgatgccacgaatattgaatgcagcatccaacgagatgaagatagctatgtaattaacggcaaaaaatggtggagcagtggtgagtgttcagcctaattttttcacctaacacactgatcctttgttccagatgctatgctagaatattgctatgatacatagtgatcagtttcatgatcataattctttaaattctgcatgtgtaggccaggtgcggtggctaacacctgtaatcccagcactttgggaggctgaggcaggtggatcacctgaggccaggagttcaagaccaacctggccaacatggtgaagccctgtctctactaaaaatacaaaaattagccaggtgtggtgacaggcacctgtaatcccaactactcaggaggctgaggcaggagatttgcttgaccccgggtggcggaagttgacatgcgctgagatggcaccactgtacttcaccctgggcaacaagagcgaaactctgtctcaaaaaaatgaaaaaataattaattaattctgcatgtgaaagcattttcaaacttagaaatagtggttgaaagaaaaagtaattttaaaataacatatgttggttaggtgatgtttaagagcagaaaacatgtcattttttgtagttttagagataaaattcattagtgcatactatttttgaccaatgtaattgctagcaaaatttaattttagtaggagcatattacatggattataataatttacagcaaatttttttaaaaaagataagctgtacatgttaattaacaataatttattgtggtacatatttttattactcaaaaataaagtgtttaaatgaaaataggacattttatgcatgggataatgtattttttagtcaatcggcagtggtagacttgtataaacagatgaattctttaggaagttaagaaattggaacccagatgaaaatgatagtctgaggattacacctagactatatatgataaacctaacatttgtcatgataaccagttattagtaagaaagttgacatcatagaagcaaattatgtctttaggaacttaccaggaatgttttgaaaagaatcagaaaagcttattatagtttgttttttttttattgcttttttggaggaggtggattttataaaattacttacaaatttaaaaaaaacaggaaaaaagatagttggagttctgctgcatacttattcaagtactaaaattatgcagggaaatcgttcttgtattaaaacttagataattaaaaataattataaatgccttttaacatgaacctctttaataatctgttttagatggcctaacttatagcatagtgggtttttttttaacttgttttattttgaaattattataaattcacaggaagttacaaagatggtacagagtggtcctgggtacccttcacccagttttccccaatggttccatcttacataattatactataatgtcaaaaccaggaaattgaaattggtacaatgtgtgtatatagttctgtgtcattttatcacttgtgtagatttgtataagcaccannnnnnnnnnnnnnnnnnnnctagcattgtcatttactgtataaaaaaccagctggggtatgctcagcaagatggcagccatccagacacagaaacagatgatccagcatggttttcccactcctgattggctggggactttagttactgccacatatctgtctatgctgatacaagccagaaactgcattccagagacaaagtttagtgtgtacaaggctgaagttattttgcacattattttccctaaaacccacccatgaactgcattaacagcccaaaaaggcagagtgaatagaaggagtaaatctgctacagccaaattcaggatgtacacatctgttttggttctctgtttcttgtaataggcataaattgccactaccatggaattgcctgcaagtccaatgacgaaaactattgtgaggaatacagggaggaaaactttkgcaaattctctgacatcttctttgatacagatcagttcatattgactgtagtcataagtgccattcatttcattttcctcataataataatctgttgactggttctgttccaaagccatggctccaatctagatggcaaagagaatacaggatagatatttgtctaaatatgcttaaaaggaaacagtttttatcaagctgttttgttctttccctagagtatagcctgttgctgtaacatatgtgagcctgaatctagcactctttgaaatgctttaatgggagccacattggaatatgaccccaagattagttactcaaactttgcttgtacaattctgtgtgaaagagcttggatttgaacaggacaataaacataatgccctggagaattttcttaatcattaaatcctaaataaaagtgaagacttttatgtaaaaatgatttttaaaatatgaaaatytaattagattttaactaaaaagaataaatagtgttataatctttacatacataattttgtgaatcgtaaaagtatatctacaacaaattgaataaaaacgaaaatagcaaattacttggtttatttaaattaaatttattttttattttgatgttatttataaatttaatttaaataagttaaataaattctctcagcatttgcactaaatttcactagttgccttttataaaacaagatctcctttagccaacttccctccaaaactggtcactacttgcttattgtatactgttttttagtagcaccactatcttctaatcatctaagctgtaagcctgcttcattcttgtcttctctcttaccttcatccctgcttcccaatcagttcccaagttctgattctgccttccaagtaggtcttgaatctgtcttctcctcttaatctgcactcttccacacatttgcacaattcagctattatgtttctcacctagcctactgcaatatctttcttttttaatatttaatatttaattttttttttgagatggagtctcattctgttgcccaggctggaatgcagtggacaatctcggctcactgcaacctccgcctcccgggttcatgcgattctcctgcctcagcctcccaagtagctgggattacaggtacacaccaccatgcctggctaattttttctatttttagtagagatggggtttcactatgttggccagactgttctcgcactcctgacctcgtgatccacctgcctcggcctcccaaagtgctgggattacaggcgtgagccaccgagcccagcctatttttaaattttaatccatttatttatttatttattgaccaggttatgagtctgtataactttttgtatttttgatagagacggggttttgccaggttgccaaggctggtctcaaactcctgggctcaagcaatctacctgccttggcctcgcaaagagttggagtaacaggcatgagccactgcacctggccaagcagtatctttctaactgatagcctgttgttactcctcctcaatacctccttttcaaaaacgtttttcttacttccaccagagtatttgatctctaaattgccaatctacctctcctctgttttgttcctcatctggaagacacatctcttcacctgaaagccacaatccaagctccttagcataacacccaaggctcccttcataatgtggtgccatccatggctcctgccacctctccctactctgtgtccacactagagacagtgataggactaatttctcagcagtgggctggcacccaccatgcagcagcatctgtctacatcattgctcattctgttcctttatctaccatacaatttcctgcccttccctggaagggccaattcctactcaataaacgcggatgcgacctccccagaagactttcctgatgtattagcaatctctacatacccctcagagaactgatccattctgtggaaaggatgcgtttcccatactaccttgttcctctaggttttaagttcctcaaagcatgacctatttgatttgtgtttgtaaataaaatcttgttaatgtgcctggcacaaagtagcttctcagtaaatatttgtcaaattaaagcttttgccaacaggtataaagctgttactctagaatggatagatagtatgccagaaatcttctatgtcaacattgttattgcactatgttggctactagcaccccgtagtattaagataagcttgcacagaattcgtaagttttggaatgtataaaataatgactttcagtgtttttattatagtgctgaattttgttttcctttttcttatcctttctattttccttgggttstttttgtcctctgaagtatctcaaatattcttatagaatcaataatgaaaatattatttttaaaacagtgtgccaacttatagtacattttcaaaagaaatgttcttatgtttgctaactttttttgaatgaatatagcaaagaaaagaaggctctgaagaaagacaccacatagaagaattgctttcattatgtaaaaaccgggtgccaacttttttaaatgactctttttatcattaaagttacttaaaaagttccaatctggaagactactctggtcttcatgttcttatgcattaattattaacacagtatgaaccttgttcttcctttctctttcatcagaaaatcttgaacctgatgataagaaataatatggccaaatattataatatattaaggaagggaatttttaagtaagaattaatcttactaaaaatgtgagtaaaaaagagtagaaatggaattatttgcagaaatgatccttccggcagatatatagacacgcttttaagtgtctttataattaccatgagaataaaaaaaaaatcagtacttgtaaaagaaagtgaaaaaaagtggtataataaaacctattttctccttaacaaagttttaccgacaagtaatggcatttaaaatcgtattttcttcttgctatattaagattttcatttaaggttaaactgtacagctattttcaagtaacccttttttttttttttacaagtaagcatttaaacttttatgcatcaagactccatctatataagtaaatatacaagatctttgggcttaaaaaaatattcaagtcagaataagaaaagaaataaagtaccaacctgttgtagtcggcagagaggagcagtcttgagtacagagtataaaatcaaatgacctaactccagctacttttgttttcactttacaccccgcctttatcttgtatccaagaaggctttcctgaaatttaaccttgtgagcacttgatattttatttcctgtaaaaccatctgtgaagttaaattcaacttcttaagtggtttaggttacaaatttgagaaaatccatcttttttcaaaaactatagacctttcatagtttccacttagtcaaaggggacaagaaagtgcctgcagctgagctactgactgctgaaccagaaggagaatccacctgagggcatctaggcagcacttgtaggtagcatctagagaaatactctctaaagttattttgcctaaggaagaaagcaaatatgattttaaccaaggaaaatatctttttgaagactaaattatcaaagattaaattataagtaatcattaggtatttgcaatagaatttaacatttttatgccacatcatttaatatttatttaaactactagagtcttcctggcttcactgtactttctctatccttgtcccagagtattttcccatggctttaaactctcttgctttcttgttaccttttttcccaaagctagaatatgaaccttcaaaatccttcagtctgggaggctgtttattttttccacatttccacacaagtaagttagagaaagaagagaaatttatgctgatttggccctcatggtctatttgaacttggctttcctcaaatttgcatggcagttatctattttttcatgcaaggccaggctcagtctccacctgcagaaattatttcagacccatgccattttttctatttttctcttttttaaaaaaaaacttttaagttcaggggtacacatgcaagtttgttacacaggtaaacatgtatcatgggggtttgttgtgcagattattttatcacccaggtattgagcctagtacccattagttatttttcctgatcctctttctctaccaccctctaccctttgataggccccagtgtgtttccctccatgtgtccatgtgttctcatcttagctcccacttataagtgagaacatgcagtatttagctttctgtccctttgttagtttgctaaggataatggtctccagctccatccacgtgcctgcaaagaacatgatctcattcttttttatggctacatagtattccatgctgtatatgtaccacattttctttgtccagtctatcattgatgggcaaatatttaggttgattccatgtctttgctattgtgcatagtgctgcaatggacatatgcatgcatgtgtctttataatagaataatttatattcctttgggtatatacccagtaatggaattgttggctcgaatgatatttctgtctttaggtctttgaggaattgccacactgttttctacactcccaccaacagtttgtaagtgctcctttttcttcacaacctcaccagcagctgtaattttttgagtttttaataatagccattttgactggtgtgagatggtatctcattgtgattttgatttgcatttctctaatgatcagtgatgtttagctttttttcatatgattgttggcggtatgtatgtcttcttttgagaactgtctgttcacatcctttgcccactttttaatagggttgtttttaattgtaaatttaaatttcttatagatgctggatattagacctttgtcagatgcatagtttgcaaagattttctcccattctgtaagttgtctctttactctgttgatagtttcttttgctgtgcagaagctcttcagtttaattaggtcccatttgtcaatttttgcttctattgcaattgcttcatcatgaactctcatagtagtctacaagatcccacaaggtctgcctccatccctcattgtctctctgacctcatttcacactactcacccctttgcctacttgttctgccatacccagcttcttgctgtttgagagcataccagtcacaatcctatcagggcttttgtgctggctcttctgtctgctggaatgtgctctgtcttagtaattgcaaagctcacttcctcttctctttcaagtctttgcccaatcaccaccagctcactgaggcaattcttcactactctacttaaaataaccctcatccatctggactcccagtccaccagacccatagcacttaacatgttctaatgcaccatatcatttatgctgtgattgctgtaatttgtctttcaccctgtattagaacataagcttcatcagaacagggacttttgtttgctttgttcattgatatatcccgagtaccaagaataatacctgacacataatgactactcaaaaatattttgaattaataaaaacattctactgtccattttgattattatctaacaactggtctgcaactgcagcctccataattatcagataataatctctttgatctttctatatgatacacaatactgacttttaggcatttgcaagtactattattcctgtctagagcactcttcccaccctattttagttccctaactcctatttacaattcagatttaggtctgaccttaacattaatccaggaagccttccataactctttcagattagatcagatataccagtcttttcactgtattgttggtacttatttaaattttctatcttccatagctatcttataccctgctgtatcctcagcatttggcttggtaccttactcatggtaccagcttaatgaataatgattaaattcatgaatcaatcaactgatatttaagtaacttatcctccacagacataaagtttagcaatggagctggagttctaaattcagatctttagtctattttatcatcttatctcttatatctctttattttatgatgccatctattatagaatcttgatactcttttatagattcaaaagtatctatccctttcctttatttaccccacccccaacaaccataagcttttttgtaaatgggattcctttattgcaaatcggttgtaatgctataatctttacatcttttgaatttacacattgtttttgctaattcagacacatacaaagcccttgaggcataggggatctcaggattgagcagcttcctctggtagcgtgtgtatgaatgctgtgtataaatcatagtgtatgaatcatggtgaaactagctgactggctggccttttcctgtattttcccttttctcctgatagaactaggagagacagtggtaatagggaaatttgacaaaatacgtgaaataatcatgtagcttagagggtaggcagaagcatcactcaccttaggcaacttttcaaagtacttacttgatgcttctttagctctcttctacttctcatattccttagaactgactatgattccattttgctgcttaccataaattggctcctactcttaacctccctaacatagcaatgtcccttgttcttgaagaatctctctccccacaccctcttctcatccctcctcttgtactgtcattttgctatgttgcccagcctggcctccaactcctagactcaaacaatccacccatcctggccaacaaaagtgctgggatgaatctgtaattttgatgaatattgccaaattgtattccatagggatggtattactttgttctctaccaataatgtatagaaatgtctgtttttctaaaatattgtcaatagaatgtgttgttttactaccactttgctttctaaatgacttgtaacaaattcagcaccccttacctacccttgccaggcatgtgtggaatactggataataaactgcttttgaatgttttcattattgctgtactccacgtttatttgattagtggtaaagttaagcaattttaaaaatctcttttattattcttatttcctctttttgcaattgtgttctttgcccatctgtatactgatttttaggtgttctttataatttagggagctaagtattgcatacattttgtcataaatgttgaaacattcccccccaatttttttttgcttttaaattttattttctaatgtacagcagttttatatagacaaaccaattgatctttgtctgattttgatttcatttatcatttttaagttttaaaatcctttctcacccagagatttaataaatattatattatttttcttctagtttttttatgtcttggttttttttaattttcaactctgctctatttgggatttattttgatctaaccattttctatagtaacaacagtaatagcagcagcttgtaacattattacttaattcttattatttagatgtaaacctagagatggattcagtgaattttgaagatttccctgttaaaaataacacacactctaagagaacacatgggattttttttctttaactgtgggattgtacaatgaacatcttttttcatataagggaaattttattgtaaaatagtacttactccaatttgaattgttagtattaaagctaaaaccaaatgaagttcaggtgttctacctcagaaattctatgttggtagaagaaacggccttgagaatttgtggatggctatctatgcttcatagtatgtaattgtttacatcactttcttaattgttacaaaccacactatactcaaaggtcatgtttttttatccacctatcatctctccttttgttagaaaatgattttgtgggtaaaagcctaagaaattaaaaatcatcaactaacatcagggagatgtaatttttagcctgacttaatcctggcacttgaacagccttgaaataccacagtgtctggattaaaaacaaaattactttatctaagccatctgttttcattcatgaaggcctgtgacacagcatatatgtttaaatgttctctgttctattcagatttcctctaatatattttatttatgacattgggtatcttgttcattaactaaaatgacacaaacaagcaaaactctctataaaagaaggttgtttcaactgctgcacttgccaaattctgcttgtagctaaggggagatgatatctttgggaagggtttttctcatttttctgaaacatcattgttaaatacaaatatttcaaattctacaaactatgtattcacccttacttcctctacttcatgatgacaacagacatccaacttaaaaattgtattttttagaatattaattgttctccatataagattgaggaagacagaatcaaagaattatttgccttacttcttgagtttcttcaaaatttacctggtatcggaaatctattgggcatttatataaggctgtggcaacatttttgtttctttgctttgtttggagacaaaatctcactctattgcctaggctagaatgcagtggcatgatcacggctcactgcaaccttgacttcccggggctcaaacagtcctgccatctcaacatcctgagtagctgggactacagatgtgctgcaccgtgcttggtgaatttttaaatttttttgtatagacgaggtgtcgctaggttgcccgggctggtttcaaactcttgagctcaagcgatcctgccacttcagcctcccaaaattctgggattacagatatgagtcatcatgcccggccaacatttttaaatgatagaaagaatgaggtaagaagtaatattgggaaatattagatacaaaattatatattctgaatattcgaaaaagagggctttagaccagggttcaaaggaattagaagattttacttcagctcactgatgctggatagctagcatcagtgaaaccttgaaagatttacccagatgttcttgattgccagaatggaaagtagagaaagaaaaatatctctgaaaatgggcacatagaccaatggaacagaatagagcccagaaataaggctgctcacctatgaccatctgatctttgacaag

SEQ ID NO: 96350 - DNA, 48193 bp, Homo sapiens
ccatggcgtgcctgtaccggcactttggtttttgtttttgacttgacttgaaatgcttgatactttggtttttgtttttgacttgacttgaattacttgataaacaggcgtgcctttattggcactttggctttggttctgattttgacttggcttaaattccttgacaaacaggtgtgcctttaatgacactttggttttagttttgattttcctttagtgtgaattagacgagtgagtaaccttttaccctttccttcttgtagtgtgaatgttgttttgtctcaagagaaaaataggtcaaacacaaagtaagcccactccgctagaaactgtgttaaaaaaaaatttcaagaagaaaaataaaaggaaagtcatctaatcatcaaaacttactctattaaaatgcatgttacagaaccttaagaaaggttttgcaggggattacagaggttaagcccccagaggttaagaactctatgtgaattagaattgccctcttttgctgggcgcggtggctcacgcctataatcccagcactttgggaggccgaggcgggcagatcacgaggtcaggagattgagaccatcctgactaatatggtgaaaccccatctctactaaaaatacaaaaacaaaaaattagccaggcgtgctggcgggcacctgtagtcccagctactcaagaggctgaggcaggagaattgcatgaacctggcaggcggagcttgcagtgagtggagattgtgccactgcactccagcctgggcaacagagcgagactccgtctcaaaaaaaagaaaaaaaaaaaagaattgccctcttttggtgttggatggcccaccgaaggaactacagacagggaacaattggccatgtatttaaggtggtgacaggggttggaggacagccagtggacctagatcaattcctttatattgattcatggttaaatataatatagacaaaaaccagcataaatttagccctgtttaacagcttattgcaaaaaagccaaaagtgaaagtaagaacagctgcaccagcagacacagagttgaaaaggggagtcccagaaagagcaagagaagccagttttgcaggagccgccagagataacagaaattctttctccatatggcccagcctacccccctttaccgaggccaacagccccctgagaaacgagattaaggagctaacacgccccaggtctcaccttgaaggggaagatcggagcctcaagaggccaaggaaggaagtcaagatagtcaagtgggccctctcagatctggtcttgctggagctatgcaaatgcctctcagggagacacgaggacctgtctattataatgaccaagcccacatccagggggtggggcaacagactttcatctatcagccctttttaaccattgatctactaaactggaaacaccctgaacccgccaccttgttcccagcagctagagccctgtcgagcattaactgtgtagaggtgttggactcaagtttactctagcagacctgacctccgagaccagccttgggcatcagtagactgggagctatacatggacgggagcagcttcatcaacccacaaggagagagatgtgcaggatatgcagtgataaccctggacactgtcgttaagctgagctcattgctttaattcaggccttagaactcagtgaaggtaagactaaacatttacactgactctcagtatgcctgtttaaccctccaactgcatggagaattatatttaaaaaagggcctgttaagatctaggaaaaaggggaaaaaagacccagagaatgcaactcagcttcagcatttgcagcagtactaagaggcacttctgcagaggctaagaggtagtagaaaaaaagcaattaatataaaaaagatttcagaagtgcttcaaggagctgacaagagcctaagtcagttttataagagactctgtaaagcattctggctttacatcctatttaaccctgaggctggtggctcacgcctataatcccagccctttggaaggccgaggtgggcagatcaagaggtcaggagatcgagaccatcctggctaacatggtgaaaccctgtctctactaaaaaaaaaaaaacacaaaaaaattagctgggcgtggtggcgggtagctgtagtcccagctactcgggaggctgaggcaggagaattgtgtgaacctgggaggtggagtttgcagtgagccgagatcacaccactgcactccagccttggcaacagagcgagactccatctcaaaaaaaaaaaaaaaatcagcatatatatatattcgaaaaaatatatataaatatatatatacaaatatatgtaaatatatagaaatatatacacgtaaatatatatatttacatatatatgtaaaaaaaatatatgtaaatatatatataaatatatatatagtgaatacttcgtttgtaaagcaagcccagggtaacatcaagcagaagctacaggcatgaatatcacccagtctataaaagtggccaccaaggcgtatgttagctgtgaccaaggaacaaaacaggaaagagcaaaagcaacaagtgcggcagctaggcacgccaagggttaaattcctctccccggctcagctctatctagaaaaaaagaggaggctagagaccggtgccaagagaagagcaaaacaaaaagaaagactcacagtaagtgtaaaaaagagaatcagaagaaaatgggagagacagcagtgcgcgggggcagggcctgtgccactgcctggccccgccaggtggccatagaagcaggagaactcaggaaggaaaaagaaaaacaaagacttaaggaaaaaggccaatctgttagcaacagctcttataaaaagagagattagcaatgcgagaggacgtggacacggatgtagacgtggaagaagtcaagttaggcaaggattcgagagccggccaaggctagagagacattaatgtgtgagatgaaaaaagaaaggacactagaagggtgaatgttcagaaggcaataaaagaaatggccaaggctgcaagacaaagaggccattggccaagggctgccgcaccttggaggaaccaaatactgatctgatcaggctggcaggagctaaagaatgtaaagactagggcagactaggcaccttcttattaggctcccaggagcccattgtcacattagaagttaaaagcagcaggattctgccatatctggattccaatttctcactgatggctaagccactagatagagttacaaaggggggaaagaaaaagaacccctcctctaagaaacttaaacaggagaaagagccataccttgtgaaaacttgcttatagactttacagaactgcctcatgctggaggctatcggtacatgctagtgcttgtttgcacctttccagggtaagttaaagttttccccaccaggacagaaaaagtacaagaagtgactaaagtattgttaaaagacattatccccaggtttagactgcctctaactttaaagtcagacaataggccagcatttgtagctgaaatagggcaggatttaacaagactgttaaaaataaaatggaagttacacacagcctattggctgcaaagttcaagaaaaagtggagtgcatgaactggacactcgagcagctactgaaaaaaatattgccaggaaattcatttaagataaaatcaggcttttgcctatggtcctccttcaagtcagctgcaccctcaccaaacaaactaggtatttaccctataagattttgttcggtcggccacccccaaatcacaggtcaaattaaaggtgacctccaagaactaaaggaattaaccttaagaaagcaaatgcagattttagaaatagccatacaaagtgtttataattaaatacataaaaatgcctataagcctgacacccctttaaatctagtgactctgtttaagttaaaaagtaaaatctaatttttctaggacccatataggatgggccttatactgtaatcttttccactcccactgctgttaaaagttgcaggtgttgtgtcttagatccatcacagtcagctaacactggcagctcaggacaagtagaccagccagcaggacacagatcttcctacccggctgattcggagacgagaccaagctgttgctgaggacgacagccctgctctggtcactccggaggctgaccagtctacacacggctgaagcttgaagaaacaacaagcccggctctagtcacgcactggcagctgaatagtctacgcatggccgaagcttgaggacttgtcaagcaagtaaacgtagttaaaaatcttaagactaatagttttcctgtaatactgttttcctattgttctgtcactgtattcaatctttttcccaggtaaggacctcttttgtccttgctggatacaaatatgctgtatattgttttgttattgttaccccccataaccatgctagaagaaacacctatataaggtgtccccattgtacacatactacttagtcaggaaacccagacccgtccagcccagcaacaattccgagtctttaagtcattctttaaacacataaaccagaagttacaagagcctcctcctttagcaaaacaaacaaacaacctatttgctcagctggctgaaaacattgccagcagcctagacgtttcttcatgttatgtttataaaaaggctaacatgagagaccaatggccttgagaagcaaaagatttaatgcctcaagattactttaactctttccccaagcagatgccaagttcaagcatttggctcttaaaaactcctattattaagaaatactgtgttgcttgctaggaaaaaagcttttaagacccagtaaaaaaactaacctgcttaggacatgacaaagttggcacatgtgcctgtactggtttaacacaggtttgatcctaggtctttatttaaaagatagtttccagctataagagaatttaaaaccctcactgcaagtgtattacataaaacactatcactctgtctcccaaagagactcaaagtaaaaataaaagcgagaactcccactaatttgtgaaaattctcaaaggaagggataaggagaccactactactcctgctgccctcctccctgccaccttgcctagttcataagacaggaggaaaagagagaaagcaaaaagttagaaagaaacaaaagtcagataaatagccagacaaccttggcaccaccacgtggccctaggagttaaaaaaaataataataataacatcaacccccgacctaaactacttgtgttatctgtaaattccagacattgtatgaaaaaagcattgcaaaactttctgttctgttagctgattcatgtagcccccagtcacgtttcccatgcttgctcaatttatcacgaccctttcacgtggaccccttaaagtcgtaagcctttaaacaggccaagaatttcttttttggggagctcagctcttaagacgcaagtctgccgatgctcccggccgaataaacctcttccttctttaatccggtgtctgaggagttttgtctgtggcttgtcctgctacagtaggtgacagatgactttcatccctcatgggacaacgttacatcattcttatgaaacagccatggctgcactcagacttaggaaggcactggctgtaatgccagcactaaaagcaaaccagaacccaagtggagaaaagttagctttcataagaggactcatcttttacgttcacaaacttaggctccctgacttttatcggtaatcagtactgaggacaatgcgttccacacccgctggctggctgatgtttgattctgtaactataccacgcccagaattctctcaaaagggaataaaacacaggtcaaattcctcacccacacactccacagttcaacccctgccagggaaaccaaaagcaggaaaggatctccagcggcgccattctcatttccggtcccagcaccccgcctccatgacgtcaacgcgccgcgccaccgggctgcgtcatctcggcgcgccgctgccagggctgtacacctgctggctgccatggctgaggtgggccgtaccgggatcagctacccaggcgcgcttctcccacagggcttctgggctgcggtcgaagtgtggctggagaggccgcaggtggcaaacaaacggctttgcggcgcccgcctggaggcccgctggagcgccgccctgccctgcgcggaggcccgcggccccgggactagcgcaggctcggagcagaaggagcggggtccgggacccggccagggttcccccggagggggcccgggtcccaggtcgctatcaggacccgagcagggcacggcatgttgcgaacttgaggaggcccagggccagtgccagcaagaggaggcacagagggaagccgcctcagtgcccctgagggactccgggcaccccggccatgctgaaggaagggagggcgacttccccgccgcagatctggattcgctttgggaggatttctcccaaagtctcgcccgtggcaattcggagttgctggmcttcctyaccagctccggggcgggatcgcagccagargcgcagcgtgagctcgacgtggttctcagaaccgtcatcccgaaaactagcccacattgcccccttacaactcccaggagggaaatagtcgtgcaaggtaagagtgttttgatagtggacggatatgattagataaaaaagcattcatagaacctcgggtcaatgaaaaagtcctaagggtactagttcctctgcgatgtcctagggaggttgttaggtgtttcatagttttttgagtgggcgcatagaaatgtgtgtccttagtacagaagatgggataattgattggggtggtgtctggaaggcttcaaagagacagtgaaggactagctggatattgcgtaatacctaggagtttagcaggtaaagctgtaggtgtaaaagtgttggggaccagcctcaacaccacccgtagggtactcaaagtccggtggcgacgaaggaatgagacgagacaggttaagagtgcataaagattgggggccagggggccaattgcaaaatggaggctgccaaagcctgggagctctggtctccacactattgagtacaatcacttagatctaagaagcggacgttcggggcgaaagggtgaaagggagacagtgcatcatacatgtcatctatagcagtggcggtttaaatgaatctcctttgtgctcaaacagcgttatctttaacttgtcggagaataaccagtgggarcgtgcttaactaggagcctgcatgtctgaccacattgtagtgattcaaaggagtgtctttctccttgaacacagtgtttataggtaagacagtaggtctcgcccagagcatgggaacatcatgacaataagaaggctttcctcctcagaggcctcttgtggctttccacaacttattgtctcatatttttatggccagtttatacaggcatgccataagccttttccccaacataaagagagctatttatgctgagacaaataactgtgaaagagcatagagactggatggatgggaacctactagtcctcagcgttcgttaaatctctggcatttatttttactgcccgtgaccttgacacttcagcctcagccactcttacctgaaactttattcagcagcatgtgtttcgtattgccactgtaacaaattactgcaaattcattggtcagtacaaaaaattgattgtctcagttctgtaggttaggaatccccattggctctgctggtttctccgctgtgggtctctctcasgaggccaaaatcaaacagcctgccggctgggctcttatttggaggttctgggaaggaatctgttctcaggctcattcagttcgttggtagaatccaattttttatgtaggactggggtccttgttcccttgctggctgtcagttgctggaggcttctttctggttctttcatgcagcttcctacatctcagagccagcaatggggttgaattcttctcatacttggaatctctctgccttcctctcctgctgcttctctcytccgcctccagccagagaaaattctctgctcttcgtggcccatggagttaggccgggcycacctggataatccagagtactcttcctcttgaggtctgtaaccataatcatgtttgcaagtgccccttttgccatataatacagtatattcacgagtcctgggtattacggcatggacacttttgggaggctcttctgcctacctcaggcagcaattgctgggaggtacatagtcccctctgatggctcccaatactgtctgcctctgtgcctttgtaagactctaggtgtcctctcctccagggggcctctctgccagtccagtctagtttaggagttcttccagctcttatcaactgtgttctaatcttaaccattttacgttgtccatccactggactgaggattggagaggcagtgcccgtgaggccttcatgtgtagacttcgctgaacagaggggtaggacagaattttttcctttcttcctctcagggaggcagttttccctctcaacaaggagtacgttttcaggattgctttctatattcagttcccgccaggaaggctcaccagaggacttgtatcctccatggaatatagacagcctggctttgaattttggtcttgccaattacaagctgtatggctgtgggcaggttatagagcctctctgtgcctcagtgtcttcatttgtaaaataggataataataaaatatcttggagttgctggaagagttaaatggaattaatacattgtaaagtgcttagaatagttcctggcacatggtaagtgcctaataaatgctagctgctgtttgtgtgaagtggagatgctcttgcaacttttgtatatttcttggccctattctgggtaagatcacgaaggtcttaagagtaatgtgactgttcgagaccagcctggccaacatggtgaaaccccgtctctactaaaaatacaaaaaattagccaggcgtagtggcaggtgcctgtaatcccagctactcaggagactgaggcagaagaatgacgtgaacccggtgagtggaggttgcagtgaaccaagattgtgccactgcattccagcctgggcagcagacggggactcagtctaaaaaaaaaaaaaaggaatgtgactaagaaatcttaactgttagtagcaggtgacaggatgacatagtggttaagaacttgacttctttagttaaagaacagaattcagtttgaggctatgtggatttgagacagattacttaatctgttgaacgcctggttttctcatctagaacagaggtttcagtcggggcagttttgatcctcagaagtttgtcattcaaacatcacatgttctcacttatttatggggtttaaaaatcaaaacaatggaactcgtggacatagagagtggaaggatggttaccagagggtggraaggggagtggagggttgggggagaggtgggatggttaaagtgtacaaaaaaaatagaatatgaataacacctagtatatgatagtctaacagggggattataatgaataataacttaattgtactttttttttttttttgagagtagtctcgctctgtggcccaggctagagtgcagtggtgtgatttcagctcactgcaacctccgcctcctgggttcgagcgattctcctaacttagcctcccaagcagctgggattacaggcatgtgccacgacgcccagctaatttttgtatttttcgtagagatggggtttcaccatgttggccagactggtctcctactcctgacctcacgtgatccgcctgccttggcctcccaaagtgccggggttacgggcgtgagccacctctcccggccactattgtacatttttaaataacgaaaagagtgtaattggattgtttgtaacacaaaggataaatgtttgaggggatggatgccccattctccatgatgtgattagttcacattgcatgcctggatcaaaacatttcatgtaccctgtaaatatatatacctgctatgtacccacaaaaatgaaaaatttaaaaattttaaaaatcgaaatttatcattgtgtagcgacaacagtgacagcagatttggggttgccacactgggcagggagggagaggatgctgctggcatctagtgggtaggggccagggcttcttataaacatgctacagtgcacgggacaactcccaacaataaggagttatccagccacacatgccagtgacactgaggctaagaaaccctgatccagaggatggtgaaaataatactggatgataaagttgtgagctttattttactttatttattttttgtataaatagggtcttactatgtttcttagtctggtctctaactcctggtttcaagtgagcctcgcaccttggccttccaaagtgctgggacaacaggcatgggccatcacgcctggtcctgttgcagtttttaaatgagataattcatggaaagaatgatgcattgtgtcagtcctcttctctctggtctcactcacagtaaaagctgtacttctatgaactgcaaggccctatgtgacctgggtgggccctgttaccctttgatttcaccttctaccacttgtcaccttgtccacgccactcamctccattccccatgcacctgagcacacgcctgccctagggcctttgcaattgctgctcctgtgtctgaaacactcttcttccaggtgccccatggcacactccctgacctccttcggctctctgctcaaatgtcacctaactagggaggacttccctggccaccctgtattccatagcagtagactctgattgttagagttttctcggccccacactgcttgctttccatctgaatccacttagccccttcagcctctgcttccttttggcaggtcttgttctttcatctgctgtggaaggtgaaccacagttgtgcatatttggcctgtgaagtgtatattcctctttaacagagtttgcaatttttttttaatatcaaaggtaaacacgattgattttagagatagaactttatacaaccaaaccttaagtatccacacaaactgacagaatgctgtaaatttagcttaggaatatgccactctgcttatattttaatgggaaggtgactgtgaagtccgtacatgcagcaagggctccacacaacataaagcggttgttaggaaggcctggactgatatccgctttcctgaactggcctctgatggctgagcagtgttctgtgccttgctcacactcgaagatcatggtcaggctgtggcagacactcagttagggcagaggtcccctgttttctctgattgtagctctcaagttccaatagagtccacattggctggctcttccctcaggtcctggctcatgcatctctcaacagatacttgcagagaatggctgctgtatgcctggcacattctaggctgtgggctgtagcagtgaatgaaaggcaaaagttcctctcctggagtgccattgtgaatagagtgctgggggattgaaagcatcrtgcttgactcatccctatttttaatactgcttctgatgagacggtagctaggcagttgtaatttgtccttcttctctttttctttccagatgtcctcaatggaaccataacgtttttgcctttggaagaagatgatgaggggaayctaaaggttaagatgagcaatgtgtatcaaattcagctcagtcatascaaagaagaatggtaagagctggacagtggactcctagttttatggtttccattgaggatttctttaggtagccaaaggattctgggttgccagggcttaaggtcctgtctctgaggtggttatggtttgtaggaatgcagttgctagcttatgtgcccaggccatgttgctcttcctgttggtgcctggcctcgagtctgggtggtcacagcctggctggggtttctgatctctaccttccctgtggctgtgatgatcagcagcccttagcattagctctgaagtcaaactcaaatttctttattgttattgttattattattattgagacagtcttacactgttgcccaggctggagtgcattggtgccatcgcatttcactgcaacctctacctcctgcatttaagtgattctcgtgcctcagtctgcacagtacaggcacccaccaccacacccggctaatttttgtattttcagtagagacggggtttcgccatgttggccaggctggtatcaaactcctgacctcaggtgatccacctgccttggcctcccaaagtgctgagatttcaggcatgagccaccaagcccagcctattttgttattttttatgacttagtaatggggaataggtgatggttccttctgtagtaagtattcagtgatacttattataaagtagcrgtttaataagcacccttaattccatatggtatttgggcctgtatagaaagtataaaatttaattcataccgtttggtatttttaaaacgaaaaagtcagaggaggggtgaattcattcatgacttgtcagctgatattttcctgagtgccacatccaagctgtactttccgaaacagtcttggggataatgtctgagtaactggaatgagtttgcccggggcttcctagaaagcagagggrtgtggcgagaagagcatgggcttcccactagcagtgtggtcttggggatgtgctctacctcctggccctctgtctactcaccttgaaatgggtttaatcattcctgagcctytgaggaggtggcagggctgggcctcacatggatctgttgcagccttcgtgcttgaaaggggtgctcaggccctgtagcatgaagccctttgagaaccatccagaggttgccccgagttgtcaggggatcctgccctgaggtcccttcctgctagcatgcccttgttggagagtgaggagtgagagcagacactaggagaagccatgcttacctgtgccaggcacctctgtgctcggcgatgctgaactgtgtgcccattagccagaaagtggtgcctgtcttgggggcagtgggcacctggtgcagggcggggttgcaggaggtgcttggcatgtgcctgctgcgttggagtgactttcattgctctttgacaagctactgaggacgtggctgctgctcccatcttcccagggtggcatttctagtcggcatcggagtgacgttcactgctctttaacgagctactgaggacgtggctgctgcccccaccttcccagggtggcatttctagtcatagcctcaccgggccgctattccttgcagtctctgggcacaggtcacacttcaggggccagatgtactgccttctgagttgaacacaaatgaggggctccactgtcgatgtgcgtgcttcttcgcagctggattcattttcggcaacatttgttgtgtgcccagcatgtgttagggctggcacgcagcgggaagtgagtctcctggggcagtggagaatatctgctcccatactaggtggtgtagggaggaaaactcagccaagcaggactgtgtcccctcaatagaaacggcagagtgtggccgaggtatgtgggaaggcctctgagaagggacatggaagagaggcggatgaaggaggaggccgtatggacctctgggggaccctggggaagagcatgaggcccagggaagagcgaggaacgccccttgggcagaatctctgcagcgcgcaggggccaccaaagttagtgtcaggcccagcaggaacgcttctggactgagcaggacagacctcacagtcccgagcagggagctgggccaggggaaaggttcagacccactttggggttgactctctggagaatcttctggaagtgacttgtgtccctctaatgcaccgtggtggcagaaaacctggaaaccacagctctcaccagacggaccacttgccattgtcccctccagyggggccatgctgctgccgcgccctcagcacacttgtgaggccctccggctctgccccgctcacccagtggctgggatctgcttgttcttaggaatgtccgttgaatgtcacttttatcgtagctttctctcatctgcccagcaaacttaatgccctccccttccctgtgctgccccaaacgcagcccttggacagtgtattgttatctgggtttgtatctgtcccgccagtcctcccaaggattgtgagcttttcctcatttattgaatgcatccatgaacagtgcctgctatgtgtcagcactgctgggacctgggggcggagcagtgagcaagacagacagaagccccccactgtcatgaaccttctgatggcagaagacatgtgaaagacaaaataagccggcaaaatgcacagcagcctttatctctgtggctgagcacttcgccttctggcaagtagctattcggtgagccagtatactcatttgagttgcacctgtgaaaatggtaaagaatagaaatgttaggaaaatccttggacgcttagactctggctccttgtgcatgaagcagcaggagagaggcctttatttgttcagccgcctcaggggcttcgcagtgtgtaaatatatccttaacaaagtttgcaagaaaagagggattctctgtgctttttacatgtttttctctattagatgaaagttctgtaactagttctagttcgttttatgtttttggtaatatagatgtcttagcttctgttttcttcattaggtaaataaatagataattttaaaataagaattgaacatatctgtgcttattcatatttctcttatttttaaaggttcatatctgttttaattttctgtccagaaagatggcattcagatggaatcgtgtatcccaaamccacgtggcttggagaagagttgctggycaagttggccaagtggtctgtagagaacaagaagagtgactttaaaagcaccctttccctcatctccattatgaagtatagcaaggcttaccaggaacttaaagagaagtataaggaaatggttaaggtaattctggtggagaatatctgatttttcccccttcatgattttcttttcttttcttttctttttttttyttttttttttttttttgcgacagtcttgttctgtcacccccccaaaaaaaagggccagagtgaagtggtgtgatcttggctcactgcaacctctgcctcccgggttcaagagattctcctgcctcagcctctggactagctgggactacaggaacatgccaccacgcctggctaattttttgtatttttattagagatgaggtttcaccatgttgcccagactggtcttggcctcccaaagtgctaagattacaggtgtgagccaccgtgtccagctcacccttaatttacatgaggtaaaataatcaaactcttccaggtaaaattgtttttcctgttgcaggctgtactttgacatacttaggggtgcacacaacaaaaacatagacagatatataatggaaaaggattgatctttacttgtatattatttgttttcaagagacctaaagggaaatatttaattgaaaagtaatggaaccttgaaaaaaaaaatggctaaattaccataattctttgtataaacttaaatatattttaagaaaatatgtgaaaagttaaaatacaaaagagcagttcccaaaaggagatacatttcataataacatgtgcttaaactttctatctaagatgtaaaaacagtataacaagaaacatctgtgttgcgggaagtcagggaccccgaattgggggcgggttcccccaatacatctgtgtgtttatgcccagcttaaggcagaaggcattgctggtagagtcaaagctacttactattcttcctagttcccatcttcctccccgtcctaggagtaaccacaatttgtcatttccatgttttttttttttttttttttttttgagacaggctctcactctgtcgcctaggctggggtgcagtggtgcaatcttggctcactggagactcaacctcccgggctcaagcgattctccctagtagctgggaccacaggcagatgctaccatgcctggctaattttttgtattttttgtagagacaaagttttgccatgtttcccagggctcaagtgttctgcctgctttggcctcctaaagtgcttggattacaggcttgagccactgcccggcttccatgtatttttttaatcagtcacgtcttgctctgtaacaaaagcaccccaaaggtcacaggcttaaagctgtgacctttcattattgctgaagcacctgtgggtccccggggttggctgactgaggctgggctccctcccacatcctggcctcgtggtcctttgccatcttgttagctatttggtaccgtccagaaggtactttttatgtttttccagcttttgaaattgtttctagtgggatggttcatctgtattgtctaaggcgctgtgactggaaatagaaatttcaacttttaacattggccattggtttttcctgttttgcctaatgccagttctgaacatgactaattttaataatgagagctcatgtttgcacagctagtgctttacagttttcagagcaccttgattatcctgtgtgttagttgaggcatggctttatccctgtttgacaggtagggcgacagcagccactgatggaccaggggctggagcactggtctcctagtttgtggctcgcggctctccctgccctagtttcactcccacgcctagtttccttgtttgttgcccttatctgcatagacaatgagcacagtgtagctaagtgtttcctctgtgtccactgcctcagctaaatgccttaggtacattctgttgattgtgaaatcttgctttggattggattgttcttggcatgccttgtttctttatgtaaatcttttattgtaagaaaccagttgtgaattcctgcctttgagcttatgtttcctattttagtgtacgattagtccaktttgatttatgctttatagggatacttaaagtattgggaaatggtggtggggaaaccgaacaatttaygtttgctcttgaaactgttttaggtgtggcctgaagtcactgatcctgagaagttcgtgtatgaagatgtggctatcgcagcrtacctgctggtaagggtgtaagcgacctcagcttctctggagtgggtggagtttgctacaggcagatgttccctgtagtgaaggacattttccaaatccataactgccggtgctcacaattctgctggccaaggttggtttctcgtgtaatggtttgacttcatgtggtccttttgatgcgtatacaacaagtttgggttgaaacttgacctcgggttccaacttgacctgcaggcggaactgtacgtccacactcagcagtcatcgtggaggcaccggctggcacagggaagcactgaggaacacgtgtcttccggccctggcctagaaccttctagccctttcctcagctggctcgctagctggctacatttggacatgccctctgatttaatcatcttggtttacttatctataagaatgtttagagtaggctgggtttggtggctcaagcctgtaattcccagcacttcgggaggccgaggcgggcagatcacttgaggtcaggagtttgagaccagcctggccaacatggtgaaaccctgtctctactaaaaatacaaaattagccaggcgtggtggcaggagcccatagttccagctactggggaggctgaggcaggagaattgcttgaacccaggaggcggaggttgcagtgaccagagattgcatcattgcactctagcctgggcggcaagagcaacactccatctcaaaaaaagaaaaaaaaaaaagaatgtttagtgtagatgatttcaagtttcctttcactcagagttttctttgaccagtttgtgtctaaattattcttgcgtagagtgaattaccacctgactttgttttgtttttctcttcacttagattctatgggaagaagaaagggctgagaggrgactaactgccaggcagtcctttgtggacctgggatgtggaaatggcctcctggtccacatcctgagcagtgagggggtaaggcccggctccatcaccttttctggtaacttgtccagagtttcctcaagtcaggcacagggttcactgacatctttttctgctgatacagcctggatttggagtcagccagctatcagagtaggtagagacttataaatttctgttaatytgataaacaaacagctcctaaaacaagggaaacgtggtgatctcattggacctaagaggaagtccccrggccccggcatggacctataaaatgacaggctttgggtagcatggatgtttttttgctgtcagatttttcttytgaaacccaccatctcaaggagctggagggagataaaaagcaaggcaggttctgcacttgagaagcttcaggccaggcacggggctcacgcctgcaatcctaacacttgggtggccgaggcgkgtggatcacttgagccygggagtttgagaccagcctgggcaacatagtgaaaccccatctctgcaaaaaaaagaaaaacaaataagagaagcttcagttctggctcggacrgccagtcatgtatacacagacaacagtatggaacagtgtggtgtgtggtactgggttttgcccttattttctggatgttcagctgatgcagtgaaagcactcttgggctgagagcggcacctgcccaggtagcacggtcagtaggggtgggtgtcttgtgcctggaacttcctgccagcaacttatacccctcctggtgcgtccagcgcrtcaggtgccattaccccatgatatgatggccagcttagccacttcctgctagggggcaacagctggaacctgcagcccaatattgatggtwccaaactgattatcttcctgctatgctgtactgtacagtactgtactgataggctgcrcatatttgtctacacctgtaagagcttgaaatggttgttacaatgccctttttcaagtgtgttattaaagaatgagtttctaatcataatacctataagctggttgtgggggtggtagtgtatcaggtggcagcttggtagctggtacctggagacagctgggaggtgtctcgtgcacccctcctcttctgcaggcttggcagaaataagtttgccctatgagagccaatgagtgtggccaaggtgcaagaagagccagcagctgaccttgactgagagcagagaattggctcacgttctcaggtgtgctccctggggcactggccctggaaatgttcccacactaaaggccactgtggtcactcaactccatgtcccatcttgaactccatgtcccatcataatgaccattagcgcagtacaccttcttacctgccttgcaggggtgtgggtatctgttttagacagctgagaaattctggtgtcatccatgaatgctaatgacacacttgaaaaagggcactgtaacaaccattccaagctcttagaggcgtaggcaaatatgtgcaggccatcagtacagtactgtgcagtacagcagcaagaaaatcagcttggtaccaccagactgggctgcaggttccagctgttgctgctagcaggaagtggctaagctggccatcgtatcacagggtaatggcacctggtgcgctggacacatcaggatgggtatgagtygctggcaggaagctcttctcttgcccttcgtcctgctggcagtgcctgcagaactttaatgtgttcttgctaacttattatgaagtactaaggttaacctttgatttctaaaattaattttttcagcatccaggcagagggattgatgtccgaagaagaaaaatctgggacatgtatggaccacaaactcagttagaggtaccgtctttattacgcatgcccttgatctcagcatggcttagctcccartgggaattgctgtaatgaatgtgtctctttgtataggtcaagcagacatgctgatagtaaaccttcacattaatctaagtgctctgaaattagagaagagaaaaagagasatgaaactagacttcacagaaccttctggttaaactgactgaagggcgctgacctccaggcagaagtgctgtctctccctgagtttgttggtgccgtttgtatcttgtgtggggtgctcccgtgcagccttgaggtgggggctgtgccccgtgcattttgcgaagtcttctccaaggcctcccaaaggctgctcgttcagtcagcaagcagttagtaccctgcctgccaggactgcgccagggatggggacacctgcagatgagccacaaagggcggtggctgtgccagggctgggatagaaggtttagagggctgtggggactcaaaggaggggcttgaccctacttggggcctctgagaaggcttcttggagcacccccatgagcaagtggaggcagccaggtgcccagcacggaagcgagatgccccctggcgggatcacctccgggcacacagatgatgtgtagggcagactgtgcagtcccacgtaatttctctcatatctttgggccagtcctctttacccttgacatttcccttttttaggacttgaaacagtctcacttttcttaatgcccctacccagagataatcactctcttttatttagggaaatcaatatgtacacatttacagttttaaaaaataatatttgtgaccatggtgtatacggaactttgaccctggctgcttctgctcatttaacatcccattctaggcattttctgaagtctttgacaattatttgcaagcatgttgttaatggctgtacaatgttccattgaattgtaggtaacaacaacacaagtacagctggcccttgaacaacacgggattgaactttgtgggccagttttatacagatttttttcaataaatacattggaaaattttattggaaatttgcaacaatttgaaaaaactgacagatgaaatgcataacctagaaatattgaaaaaaattcagaaaaagttagatatgtcctgaatgcattaaatatacgtacatactagtctattttaccatttacaaccatgaaatacatacaaatctattataagaagttaaaatctatcaaaacttacacaaacccagactgtatgtggtgtcattctctgtcaagagaaacgcaaatgtaaagatgcagtattgaatcataattgcatgaaactaactgtagtccattcagtgctactgtaaaatttcctggtcactgctcgttcctactgcagtgagcccaagtgtttcaagtgcccaattaaaatgctgtgtgacaccgatcacctctgtggcaccagctcattcctccagtcagttgcatagcctagtgaaacgtgatctctggtatttttcaacgtgtttggtgcaatactgtaaacctcgagtagcactgcaggacccatacacaatgccactggtgatgctggaagtctcccaagaagcagagaaaagttacggcattagaagaaaaggctgagttccttgatatgtcttatagatttcagtctgcagctgcagttgcccaccatttcaagataaatgaatccagtgtaagaactgttgttaaaaaaaaaaaaaaaagcaagagagggaaagaaatttgtgaaactgtcactgcaggtacaccagcaggcgggtgtattcatctcatatttagaatgcagctttgatatggttgcaggattgctacragaaaagcatacatacagactytaatatgatttgagaaaaggtgaagtcattatatgacaaagcagaaagaaggtgaaggttctaaagctggagaatttaatgccaacaaaagatgatttgatagttttagaaagtgacttgggttgtaaaaatatctagataacaggaggagtagctttagctgaccaagaggcagcagatgagttcccagatgccattaagaaaatcaccagagaggccaggtgtggtggctcatgcctgtaatcttagcactttgggagcccaaggctggaggatcgcttgaggccaggagttcaagaccagtctgggcaatatagcaagacacccgccccccccccaactatctctacaaaaaataaaacattgtaaaaagaaaatcatcaaggagaaaggatgtctgcctgaacaggtttttaatgcagatgaaagtaccctattctggaaaaaatgccaaaaaggagagaagtaagccccagaatttaaggcaggaagggacaggctaggtctgctgttctgtgcaaatggaatcagatttatgatcaggactgcccttatctgtaaagctgctaagcccaggtcttgaagggaaaagagaaacaccagctgccagtcacttgattgtacaagaaggcctgggcagcaagaactctagtgttgtttcatcaaggctttgtctctgaagtcaggaagtacctggttagtaagggactaccttttaaagttctgttgatattggacaatgctcctggccacccagaacctcttgagttaacaccaatggtgttgatgtggtctgcttgaccccaaacacagcttctcttttcagcctctagatcagagagttacaaggacctttaagcctcattatgcacagtattcaatggaaaggattggatgctgtggaagagaactacaagagagaatatcatgaaaatcctgcaaggattttaccattgaagacaccgtcattgctacagaaaaggccatgaaagctaccgagcctgaaacaaattcccgccagagaaaatagtgtccagatgttggcctgacttcacaggatttatagcagagccagtcaaggaaatcatgaaagagttgtggatatggcaaaggtgggcgatgaagggtggaagtgtcatgcctgacttcacaggatttacaacagagccagtcaaggaaatcatgaaagagactgtggatatagcaaacaaaggcaggagatgaagggtgcaagatacggatcttgagaaattcaagagctaatagactccactccagaggaattaactacagacgacctgatggagatgagtgctgccaacccagcgccagatgatgaggaagaatatgtaaaagagacagtgccagaaagcaaattaachgacagtgtggcagaagggccctgattattccagactgcatttgacttcttttatgccatagactcttctgcgatatgcactgaaactaaaggaaatgatggaagaaggattggcactgatagaaacgtttttagagaaactaaaaagtaaagcagacagaaattatgatgtatttcatgaagttacactgaatgtgcctgcctctcctgcctcccttccacctcctccatgtcttccacacctgagacagcaagacccgtcccttctcttccttctcctcctcagcctgctcagtgtgaagaggatggggatgaagatctttgtgatggtyggtccacttccactcaatgaatagtaaattttctctttcttatgattttcttttcttttctttttttttttttttttgagacggagtcttgctctgtcgcccaggctggagtgcagtggtgtgatctaggttcactgcaacctctgccttccaggttcaagcagttcagcctctcgagtagctgggattacaggtgcccaccatcatgcccagctattttttgtatttttggtagagatggggtttcaccatgttggccaggctggtctcgaactcctgacctcaagtgatccacccacctcggcctcccaaagtactgtgattacaggtgtgaaccactgcagccagccacgattttcttaataacattttctctagctttattttaaggatatagtatataatacacaaaatgtgttttaatcgacttttatgtttatattattgataagtcttctggtcaacaataggctatgagtagtcagttttgggggagtcagaagttatacatgggccaggtacagtggctcacaccagcaatcctagctctttgggaggccaaggcatgaggatcacttgagtccaggagtgcgagaccagccagggcaacgtggcaaaatcccatctctactaaaaaaaaaaaaaaaattagctggacatggtggcatgcacctgtagtcccagctacgcgggaggctgaggttgggggatcacctgagtttgggaggttgagactgcggtgagccaagattgtgccactgcacaccagcctgggcgacgcaagtgagactctgtctccaaaagttatacatagattcttaactgcatctgtaggggttcagaacccccaacccccactttgttcaagggccagctgtatagtaataaaaactgacagtcatccagtgctgtgtgtggatgcctttctaaaggtaaatgtattttatgtacagtaacttaccataatccgcacaacagcactgggaggttgattctcttattatccccattttacaggcgaggaaaccgaggtacccttggggaggttaggtcagccatgtgtacggcaagcggtgaaggcagaattatttactcagctcttctgttcttgaccatctgttttcagattacaaattacactacataaatctttgtgtgtaaatcatagtccacttaaaaaatatttttcctacctggactttaaagattttcaatacatattgccataatgcttttcgaaaaggtcctacttcagatatgcttcatttcagcaagaattctgagcactacaagagatgcatccaatgggagaaaaaacagctgtacacatttatcacatatttgagtgtcccctacctgccgggcactcttaggtgctgacgattyaacagtgacaagagcccctgcctttatggtcatgggaaggggtgggaggcagacacacagccagtgtgtgcagcaggttcgagggtggtggcaggtgctgaggaggaggctgggggtgttgtgtagtggccgccgctggagaagagaacagaacagaggctgggccagggtgggctacagacatcaagacacccgggggtctgggcctgacagcacatctattccacgctgtcagccagccctgggcamtagagccatgtgaccgtggggttaaagtgcactcagatcagtcagatcttggtcaagagtagcttgcttctcctggtactgaggacagagaaaatgactccctaatgggaaaaaagtcatgagtagccctcaggagccgtcctaggacaggttatagtatagtggctctgtgggcgtggcctcactttcccagggtggtgtgggagtggcctctccctctgggtgtgactrggtcacagagcctcatctgccagagggcagaatgttgttttatgagatgaaaaaatgttgacttttcatcatggagaatgtcaggaatatacaaaagtagagagaggaatgtaggtactccatgcagtcacccagccagctgcaaggattattcttttctctatcacttaccctcaagcagctcccactgttattttgaaacaaatctcaggcatatcatttcatagaaatagaaaatcaaaaataagtagaaaaatattccaaaactatttttatgttttctgttggcctcactctttttttttttttgagaactatcacccaggctggagtggtacagtggcgtgatctcggctcactgcagcctccacctcccaggttcaagggattcttgtgcctcaacctcccgggtagctaggaccacaggcgcgcaccaccactacgcctgactaattgtatttttagtagagacggggttttgccatgttggccaggctgatctggctctggcctcaagtgatccacctgcctcggcctcccaaagtgctgggattataggcatgagccaccacacgcagccccccttttatttttttggagacagggtctcaatctgttgcccaggctggagtacactgatgtgatcacggctcactgtggcctcaaccttctggactgagtgatcttcccacctcagcctccgagtagctggggccgcaggtgcacaccaccatgcctgactaattttgtgtttgttttttgttgaaacagggtcttcctatgttgcccaggctggtctcaaactctggggctcaagtgatcctcccacctcggcctcccacagggctgggatgacaatgagccgctgcgccgggccagggtgcttactctttgcttgtacatttactctttgctttgttttacagtgattggcagttgcttgtccactcatacattacattaggaaatgttttcaaaacctcaggtttgaggaatgttggtaatctagccagtgcactcgggaggctctgcaaatatgtgtgtagactatagactctcacacatgtcccagaatcgggctctaaacttggctatgaagttaatgatcaaagctaaagcagtagtggtgtggttgatttcaaaattccatgtgtccccaggtgaaaaagcacctttgggtaggaaattcaagcagcagtgagtaggccatctgtgtaagcccagaccctagggaagagctggctgctgagggtgccccttggagaacgggcggaggctctagttctttagctgaggtttcccagcagcctgcatcagacttttctgtagggtcatctgacctggggaagaccctaccccgagcacttagtcaggaaaggcctgctgttgagagttctgtattctaatcaagtgtgtaggttttttccttgttacctcccaaccttcagtctcggtgctaaaatagccatgtttattctagtgttaaataaatgccaggagttctgtcatgctttctgccttggaggagcatggccagaatgagggtggttccgttgacgtgcacatggtgtttgtggattttctagtgaatgatttccttccagctgcagttgagtggtttccacgaacaggtacaatctagaaagtcaaaggccaggcgtagaatataactttttttctttctttcaaaaacctcatttgattgcaagcaagagagtgttaaaaaactaaaaacaaaacacctgtttataacaacagcctggtggtgatcacaaattgtcttaattgtgtgaacctgtatatgaaacaggaatattggaatttgctgtgttcaaaatgccagtgaaaagttcataaaagccgggtgtggtggctcacgcctgtaatcccagcactttgggaggccgaggtgggcacatcacctgaggtcgggagttcaagaccagcctgaccaacatggagaaacccccgtctctactaaaaatacaaaattagccaggtgagatggcgcatgcctgtaatcctagctactcgggaggctgaggcaggagaatctcttgaaccagggaggctgaggttgcagtgagccgagatcgcaccactgcacgccagcctaggcaacaagagcgatactccgtctcaaagaaaaacaacggctgggcgtggtggctcatgcctgtaatcccagcactttgggaggccaaagcaggtagatcacgaggtcacgagatcgagaccagcctgactaacatggtgaaaccccatctctactaaaaatacaaaaattagctgggtgtggtggcgggtgcctgtaatcccagctactcaggaggctgaggcagtagaattgcttgaacctgggaagcggaggttgcagtgagccgagatcgcrccactgcactccagcctggtgacggagcaagactccgtctcaaaaacaacaacaacaaaacaaaacaaaacaaaaaaacttcataaaacaggtggggctttgatatctagtgctgttggcaagataatataaaatatgattatggtctttactaaatgtcagttatgctttaatttattcacgccatttaaagagacagatgggcaaacttaaatctagaatgagtgggaatcaagaataaatagtcccaaaggtttgatatttctgtagatcatacgtatacccttgaacaatactattttcagtattttaacatctatgtaagtagaagcacatatgcttattgaagaaccagagagagacagaatttcagttttagttttttacttaccatgtctgtaaaacattcttgtgttatagttttgctgttagaaagaatagccttgaagagtgagtgttctcagaatgtcttccccattatgatcagggaataacttctgttcacttatcttggggactcatcctaccactggaaaattaagaagattttcaatggttgtgtggtctctcttccccctctctctttccagtttttactgacagaattgctattgaaactgttgatttcagtaattagtgatggcctgctgattatcagaaagggtagggtgcctatttaaagttcttaaatcataaaagcaagctgtcctcagcttaactgcagaatttgtcagaatggttagagtgcctattcagggggatcttaatcactttctgacagtttacaaaaggtaatagtctaatggtaaagaatttcgtgtatttacatatgtaaattctctgtctattcatagacttggtttcctagattgaaaggcctgtgaggttagacccctgtgttgtattacgcccttaaatcaccttcagacctctctgccttccattcacttcctccgaagccattgcttgctcccatgctctgccagaggtgaaaccgttccgtggccgtctctcctggagctccttcttatgcctgtggaaaaatcagcttttaaatgatccaaaggcgattagcactcagaaaagtgctgttagtttctccggtgatttccctaaaagttgccagcatttcttgccctctaggcagacctagggaggatacattgacttccccgctcttccccgctcttggtcatgcagcaggtgaactgcggctctgcgctgtgtgactccagagcctgtaccctcccgccatgtcctgcccacgcagtagctctacaatgattcacaaaacatttcgtcttgttttgttattcctttaggaagatgcaatcacacccaatgataagacccttttccctgatgttgattggttaatcggtaaccattctgatgaactcacaccatggatacctgtcattgcagccaggtgagaagtagaggagttatcaggtgaatggctggggaatgcttcatcttctaaacagtggtgtccaaaagggtagccactagctgcgtgcagttgtcaagcacttgaaatgtgggtagttccaattgttgaaatgtttgcttattgcctgtattgggttaaatttaaaataaattccacctgttttattttaccttttaaaatatgactactggaaaatataaaattactgagattgttcacattatatctctgttggccagcactgattggcactgtgattacttctacggtatttatatccggtgtcaaaagaggtgtcctttttggaagtttttttctgaaaacatgaggctttgcctttaaaggggaaatctacccatcgatagaccctctgcagccacagttgcctccgcacggggagctgtgtgtgtccgagagacttggtcacgaagcaggttgtgctgctcctcgttgacgtttcgttgctgagtctccttatctcagattcttctgagctgttttcattctcaaggagtaactaggtgaaagatcaggtcttcgctcaggcttcgttgtgcttccctttaaccgttcctattaaaagctgacgtcttaaagtacttcaagaagtttcagatgacccttgataacaggaactgtggaaaaaatcatttttataaaagtaattagattctattgaaaagatatactatgttgctttatttctagaaattaacttggggaaggctgtaattcatcttttaatatgaaaaacaatattacacagccacaaagaaaaggaaatcatgtcctttgcagcaacatggggtgcagctggaggccattatcctcagtaaactattgcagaaaccaaaaacgaaatgccgcatgttctcactgataagtgggagctaaacattgagtacacagggacatcaagatggcagcagtagacactggggactgctggagtggggagtgagggagagggcagagtttgaaaaaccccctggtagttactatgctcactgcttgggtcatgggrtctgtcttaccccaaacctcagcatcttgcagtacacccatgccacaaacctgcacacataccccctgaagctgaaataaaagtggacattatatgcaacaaaaagaaacaatattggccaggaacatcacttccctattttgccctgatatgcgattgccgtgtggctttgttccgaatttccttgactscgtctgctcaggatgcttgaccctgtggttgttggttctttttgaaggtcttcctacaattgccgcttctttgtcctcccctgctgcttctttgacttcrttggaagatactcccggaggcagagtaagaagactcagtaccgggaataccttgacttcattaaagaagtgggcttcacctgtgggtttcacgtggacgaagactgcctcaggattccttcaaccaaaagagtatgtctgattctcatgttgttctaggcggtgtgtcggtgttcagatggagagctcagggctctgccacagagccatgaaccatgytgtaacgttcaaaatgttcyagaacgtgccggtgctgatttctgtgcctctgtcactgatgaggcccagaggcttgttctgtcccatggtgccctccttaaaggcacccggtgctccctcctccaggcctgcaggagtcctcgccaagccctccttgcctctccagaagctctgagtggccccaggggacctgcccagaggaggcctcagtgtggcctgtggctgacctccctgtggaaagttcctgctccttcaagtcgcagataattggctgcgattgaagtgtgtttcagaagttcacagtgatttcccattttctcattaaaggcctagttcattcagattcacctgaaatgtcatttgggcagaagttggcccgggggctttctgtaagcagtgggactgtgcctctgacctttgtgtggacagggcagacttatgccctcttgccgctccaaaggcttgaccttttgaaagtaccgtggaagtgtttacagcagctcacctatgtctctggtaactttatttgacaagactgtggctggcagacagtgtgcttttaaaaaataaccccgtcgtgtccaggccacagaatttgatggctgccttagcaagaaagggcccagctgatctgagtgaagcctcggctctgctgctgcccgtggtgcactcgggctgatcgcggagctccgctaagcctgtcctcacctgtgagaccaggaggaggctgcccgggtctctgtgggggctggacaggatgatgtcttcagagcccacagcggggagggcatgttgtgggcactcgctggccggctgccgtcatagccgtgcaccaggagcagcgttggcttgtggcacaggcctcagggccgctggcgctgtcactgccctgctaccgtgggaagttaccttaggactcgctgctgaaccgtcccgtcatcctctgtgtcctctgtttttggcaagtcttggtcttctgagttcagaattgatttggggaaactgctaaagtttgggtcctctaggcgggtccgaggagcccgtggctttgatttttgcacttgcttctccattactaattggtagagaccgtggactgtcgcttcatctctctgagcttcagttttcttatcactggcaggtttggggatcgaatgtaagagtggatgtgaacgtgctttgtcatttttaaagcagttcacacacagcacatgtctggtggggactgggtgtgtgacaggcactgagaatttaaaatcccgctggaagagctggggagcagaggtgtggctgtcacgtagtgaggaggtcggcttccttatcacccgcgcctggccttgtagttgatgcctggagaggaagcccagaaatgaggtgcccttgctggggctgggcagggcctggttgtccggaggggactgtctgaagggcaccctccatcggggtgtgcggcaaagggaggcaagcacgcatggagcacctctatggctccaggccctctgcgcagcccccgtatgcactcgctggctctggcaaggtggggacaaagctgcctcccttcccagcccctggggcactctgcaactctgcagcgttaccatcagcatgtgcccccgccgggcggccgaggggtggaatgaggggcggcagcgggaaactaggacggtgcggctgccgggcccaggagtgtggactcttgagtttaggcgcctttgttagatcttgtgaaggtccaagatctaacaatgatgagagggaaccatgggctcttactgtttttttaatttttaagttacttatattggtgtcagtttttattttgtatttatttttattgatttatttattttgagatggagtttttgctcttgtcacccaggctggagtgcattggcacaatcttggctcactggcctctgcctcctgggttcaaatgatcctcctgcctcagcctcctgagtagctgggactacaggtgagggccaccacgcccggctaatttttgtatttgtagtagagacgggattttgccatgttggccaggctggtctgaaactcaagtgatccgcctgccttgggctcccaaaatgctaggatgataggagtgagccaccgtacctggctggtgtcagttttttaaatcaggattttttcatgatagacattgaaaacttgtgatttgtactccaggatgagagaattccatggagaacgttgaaatagactagccagctaaaatacttgctttgctttcttcaaacgcaggtctgtctcgttggaaaatccagaacatacccttcctccagagaagcttccgtggatgaaaagaggactcagtacattaagagcaggcggggctgccctgtaagcccacctggctgsgagctttccccttctccacgctgggttgctgctggcagtgctggtcactgtgacggtcagcaagctctggacgccagggtcgggtgtgtaaccagggcctgggccgctgagcatggagcagggccccaggctgaaggaccctggctacctggatttcatcccagagaaaaggctgagcgtgtgaggaactgtgccgccctgccacgagattttattgaccaagtggttttgcaagtagcgaatttactgttaggtggaaagcaattaaacacaagaagttctcgaaatgggagtttgaagacctggaatgggggaggtaagctgtccaccatyttagggaggggctagcasgctcccaggcttgagggcaggaattcacgtcttcagaaccgacatgaaatggtgtggccctgtgactacacactttgaaaaagccattgatggtgggtgcataggctctcttcaagcaaattctttaaaattttccaaatagctcttataaacataaaggactttgttatttccagggagtgacagagtttggacccttaattaacttttaccaaacatgcaggtttaggggctagaactactcattttcaatctagaaattatccaaagagaaaacaggttactgagtgcaagcaaaatgcactgtccccttgagtatgtggtaagatttggagctgttgtgattcgataatttawttctctttgaaatccccaaaacacaacaatcatccatggcaaaaggagaaaattacatcgattgttctcatggggtgagtggtgtgctgaaattatgttctcaggtgagtggtgtgttgaaattaacggcattcagagagccagccagggctgtaaggacctcgcctccttccgggcagggatgctgcttggccgccagagggtggtgtagagctgcagccaacgcctggcttctcttgcagttttgggaactggagaagagcacggagccccatcccctcccggcccctccgtcggtgacttctgcctggctgcgcatttgagggaaacccttcttctccaggctttgctttcctcacctatgaatgttgggacaaaatcatacccgtttccttcttcatcctttgtcctcttgtaccatgtgtacgtgggatgggaccgggccatggagcatagacggcccctccagaaatcattcgaacctgatggtacctggtcagcagagcctctagccatctggcgagagtggccctggctcagtggctgatggggccgactagctgcaaaccaccaggcaccgtggggcctctgggttggccctgctgactaaaggcaccctgctgtggtggggctggagcacagaggaagaaggctgaggctggcagagcatggagcccaccacaggcaactgggacccagagccccagggacatcagtgtggtctgaaagttcccacgtgcagtaaacagtgacagttcttgagtgcagtttgacctttaaattcccaggagatgacgggcacacagatgtcagctgtgcctgggatggacggctttcggtgggtgaggaggaaggaggaacagacctggagatggagagcggggatgggtgagcggtgggctcagtcctgcctgcgccttggaacttgggaaycagggcacctaacaggctctggacccccgtcccctccagatgggtgtccgtgggtctggggcttgttagggactctccacgtggccttggcctctcagcccactgcctccctcccgcccacaggcggccttcagggcctttggtcgcccccacccagcctgtcctcaggcaggcacctctgcgtttctgtgcctgtgggccatgtgtggctctgtctccaggacctcacccatcctagctcggcgtctgtccctgtgggacactgctgagaaatagggtaggaaagggccctgccctcaagaggctccaagtcctgcctggctaggagtcaagaccgcacacgtcaaaggatgagaaaccaagaggccggatatgccaggccaggaggcacccatggctgagtgtgagattccctgttatggagtccatgctgggccagagccggggcaacagggaaggctgactgggacaatatgtgatcttttttaaaacactcccgctcctctcagaatggatttgagacagccgagaggtggactcagaaggttggccaggctgggtgggcaggattctcgcagcagctgcgacagcggctgccagcaccaggctcctgggtcaggagtgtggtgtcctgatccgtaggggtctgacaggctcagctgcatacagacaggcgccrtctcctccgctctcctgcagcttgggagggtgtggataagatgtgaggtgcagcacctggcagataggaagttcctggcaaatacatgcaggaaaaccagctttcattcatatccaatttgatgttttggtaataaatgactttaatgtcaccaggttttctgattagagcattttgaaatacctgcaggctctcaaagcagaaattcgaatgggaaagagaccatcactgtggtgtctgtgctgttcctttttttagtgcctagcatggccttgctggccaccctagagccggtagcgccaggctggctgccccatggttggagcagccactgggaaggctcaggccccaggcttgccagcttggccttccttctttagtctgagaaaccctggctccaaacagccaccccccttcatgggtcaccagtgagaagagcttgaggtgaccacccagagcaggcagcatcacctgacgcctggccctgtgcgggcatggggcatgtgtggggctgcgtcttgtcaggctgtgccaccttagctgggtggggacgccacggccctcacggtttggtgcggtgtggtgtgggttaggtgagatggaatcgtccttcgtgctggagtgcataacgcgtgtgagtgtatggaactgaaatggactgtttctgcctgtgtgacaggttcgtaatattttgctgttgttttggggaaaaaaaaaacccgtttttccacagagagcctatctctggcagaagtagccaaygagctggacacggagaccctgcggaggctgaagcgggagtgtgggggcctgcagacgctgctccggaacagccaccaggtgttccaaggtacggagtccgcctctcccccgccgttctttccttctttttcccccttttttcagttaaataatgttttattttagagtggtttagactcactgaagaatctgacagaagcagcaagttccrcrgtgccccacccagctctgacgtgggtggcatttgacctcagggtgggacgtgggtcaccccgttccctccttgctcctctggacctcgtcccatgcgatgtccccaggctggtctctctccccctatgctgtgcttgctgacgcctcagctccacttgctccacgcaggacagagcaagtcgggtagccgctggccggtcccctgttggctgggggtcattgtttggcgtcatctttagctgctgcaaactgaaagcatcctgagccacagagccagggtggggagtgggaagagtgagccctgccccacaggcggaggcctggactcctgtggccctcgccccacgggcctgggcaggcggaggtcctggtacccagttcccctgctccccaacgccctgtgactccaggactgccagggtatggggaggcaggagggccctccacccgcttgtccattcactcagcccgcaaagcaaggcagacacatccctggccttctggagccggtggtgcagtgagggaggggggagatgtagcaggtgctcacccaggtgccagyggtgtacacacttccatcatctgcagcttccaggtgtgcacagagggggcaggaacagggcagggagccatggtttaccagcgccagcggctggggagtttgccataacttgctttgtggmgcttttttttttttttcctctttctgtaagtattttaaagcaaattctagctagcatgctatttcacccctaagtacttccacgtgcatctttaagaatagtaggtgtcttcttgtgtcaccaccatgccctaagcacacatttctgtgagttgtgatgtgcagggagaactggcctggcccgagtgggctcaggagggctttacttaggaaatgacacttgagctgggcctggaaggaaaagaggagtcaggaacagagaacagctttaggcagagcgaacagcatttgcaaagagccagggttgggaggagtaagagtgggagctggtcgggttacagccgccatgaccaggaaaaggactgggcctctgatgggtagggatgacaccgaagtcacagtgggaaggagtggcctggcttacaccctagcttctgggtcccctgcccatgaagtagccgtggggatcaggtgcagtacagtgtctggctctctgggtgtgtgagagagcacaggtgtgtgtgccattcctcatgtgtacacaagagtgcaagcgtgtgggtttgtgcacacacacacactgcctttgtgtgcctgcctgctcctggagagctgaacttggctttcagctgaactggcctctctaggtgagagctgctgttgggtggggggccggtgagcatggttggagcctgtgtttctcggggcaggcgcagaagcgtgtccctgaggctgcccccagagtagacactgggcctgcagtgctggctgggctgggcctgctggctgggctgggcctgctgcctggagtctgctcttccttgcatagagctttaggcagttagaatacttcccacctccacggggcctctttctgtctttcccaacacttgtttttgttggtttcctgaaatactgtctttttcacccatgatgagtctgcttgtatgtcagtgtttttctgtgcaggtcaccctgggggggcaaacttgtttttggaaacgcttctgagtaggaggcctgggaattgggttccaaataaacattctcctccagtcatgcgaaaactatgctctgaagctgggtcttatctctgtatgaggtttaggttttgttttaagctaacgtggctagtctcagaaaatgtttatgagagtgaggaattggaaatgtttccagatggcttcaggtcagccagccctgagcatgacccatgagggccacaagggccagccctgcctctgtccctgccccttcctgaggccgccaaggggcggcrcgctgcatccatgctggctggtatggagcctggcaccgtgctgccgggtacacgcggggcctcatctcatcctgcactcatggcagagcaggcctttcctccttgaacatgtagacaagtctcagagaggtcagtgcgccggcccgatgtctcccagtgagtggagaggccacgccacagtccgggccaggtctgacccagcactggcaccyctgagcctatggcatcatccgaggactgtaatcctcaacccgttcctcagagcaacttggtgaaagggagtgtctgtctgctgtcagaagcagtggtggagatggcggctcctgtgctgaggtagagtcccaggggatgcgcacggtaaggagggaggaggcggcaggaacttgggtsgagcagactgtggctctgtggttccatttcaaaatgaggagcacatttccagaggaggagagtctttctagctgttggttgtctttctagctggctagagcaagtgcctctggaaggccgccccttctggcacctggccagatgggggctcaggtgttaagaggggcggscgggagctacctgccatgtccagggttgtagacacggggagtgggtcartgaggctgggccagcctggagcctgcctgcgccgttcgggagcctcatctctatcatcagcgcccgctcctcagtccttagacaccctgcaggtcctgcttccaaaacatggttgggtgtgctcttaactccggagccgcgtgggagggcctgccgccagctggcctgtcacgttgtggtggggaagggggtgccgaggctggctctgaggggaatctgtactcagcctttggcctcagtgatcccccaccccccattctcttgacaggtcagggcatcaggccagaggcccctcactgtttgggatcatggggagttggggggaagctctggcccctggggctcctcctgagcaccctttagagggttccaggtccctcagtggccaggatgtgcccttctgtgctgcgccaggaggtgctgctgtggggacatgggcagagtgtcgcgggactgccttaacaggagacttcaggttaagaaacctcagctccratgttgggaggcgagacagagaggcagccgtgggagggcaaacagggtcaggcctggccttggcggtgcttccagccaggctgtgagggtgagcccccaactgtggcgccgttctctgggctcatttctctagtttcaggggaaactgtaaaacatcagtctgtcaaaagcacacaggctcgttattgccacacacaaggtgatttgaaggcagaattcgagctttaattcctacactttcaagttctctttggaagtcggtgagccagacttcctcactgaggctcctttattcccccgagccttctgtcgtgagcggtttcctagcttccagcgagaaccaggaaggaggtggttgctttggccatgtttcacgggkagttgttggattcccacaaggaaacggccaaatgggagcgtaggggggtatctcggcccaatttgggcggcggggtcaggaggcagcctagaggaggcctgcgaggcctgggacccaggtgacgagcgggcccacagcagccctctcctggccccaccccactctgatgtccctccagctccccagtttggagatcagccctggccattgggtcccagtggcactttcagagggggtatctaaactactgcacataggcaggtcccccttcgtgttcctgttccagagctcattggcctctgttactccacacttgcacctggaggggctccggttgggagrcgcatgtaaacccagtgcaccgggacggcaccaaggagcagaggctgccctgcaccagccccgtccttagactgcgtggagggacctgcgccttgcccctctttctgcccgtaatgctgacacagtcctcagaggtcggggctgcagcacagatgttttctcgtgtttcggctctcacaccgtggtccctccttcctccactcaagtgatccttctaaaatggtggctctgcaggacctgcctctcagccagagggaaggtcggtggcctcaatgatgaggccacaagggacccagctctgtcctctgccctcccctctggctgtccctcgaatgtggccagtcctggtgcagtctgtcctgggacactcgggtttgctgctgctttgcctaaaatgctcttcctgggtctgcgcagggctgccgctcacttcccgcagggctcaccttccccggccttgcctgaagacacatcccatacctcagtcactcccactggaggcagactcactgtgaccagcaggaactctaggctgtgttccggttstatccctgaccctggattggcacctccygtggcgtgggagctaaagagaggctggtgaattaaggaactttcaggtttacttctcagtgtgtcttctctgttccaaaccacagttgtgaatgggagagttcacatccgcgactggcgagaggagacactgtggaagacaaagcaaccggaagcgaaacagagactgctctctgaagcctgcaaaacccgcctctgctggttcttcatgcatcaccctgatggctgcgctctgtccacggactgctgcccgtttgcccatgggcctgyggagctgcggccaccccggaccaccccgaggaagaagatttcatgagctgcatccttgccagccgaggcctggttggggaggccaaaccaaggagagcttccccagcagtcgtcagtgctgtggtctctgctctggctgtgtttcagcccacctcctcccagctttctccacatcctcacagtgatgaaccgtatttcataaacatcacacgccagagaagccacagttactcggaagcccccagctgactgcctggcttgtttcagatgcagccgcttgaaacgtgcgcagcatcttcatatcataaagattgtgcacrgatccttacaatgtctcctgggggagagcggctgaggctgccttgcacaggcccttcccagggcgctgtccgacgcctgccccaccatgtccacatctgtgaagaggatggggctcctcgagaagtaagaccgtatctgccagcgtttctcaccacactggagagcagctgctctggagcagggatccaccagattggtatttttaaaaaaggtgtcaggcttgctatgttgaggttgtttttagagttacagagaataaaaacactcataatttcctgacatgggccactctaagtggcatgaaaaaaaaatcctaagtgaattgttgacagggctttaaaaatgtaaatatcacagatgacaaaggtaagacctacaccttcctccctcctccatgagaccctctccccagaaatastgcagcagtcctttttagtccttccagaaaaaaaaatcctgatttgtttctcttttatttttatgaagtgatagggtcttgatctctcgcccaggctggagtgcagtggcaagatcatagctcactgcagctttgaactcctgggctcaagccatccttctgcctcagcctgtcaagtgactgggactgtagatgcacgccaccatgcctggccaacttttaaaattttagaggcggggtctcgctatgttgcccaggctggccttgaactcttgggttcatgcagtcctcccacctcagcctcccaaagtgctggcatgacagctgcgagccatggcgtctgacccccgatgtttctatttaaagttatttctatggttttatacaaaaggtcacatgcagtccacactgttctgccgttgactttctgcagtgtaccctggtgcctctccattgggtatatctgcctgattattggcagcagccgtgtggcattccgtggcagcgccgcactcatcacacctgagcagtgagaataaatgggcatcttctctgaaggcacctcagctctgcagcaccacggggcggcgctgccacgggcccagaccctgccctctgagttccaagtcagtcccagagcgcagatcccaggctgaggatgtgccaggaggtgcctggccctggaagtgtccacccttcatcttactgggagactggcgctccgtggccctttggggcaggccccagtttgtcgagcagctgcagctctgactagtgaggcacaagggagctctgctgaggcctctggggtccccacgctgggaagttctccctgcaggggacacctggtgtagaagccccgagggagcagccaggagcccagcactgagggtggtggagcaggtagatggaaagaactctcttcccaaagacaagccgcagagccgcatcccttccccagcccctgtgttaggccgtgaggcatcttcctgccaggctgcaccagggctttcaggttttgttgctcagcacatccagggtcatgcacttcaggacaagccacctgatgcccctcggccccccagtcctgcagcctcgctggagctctccctgcagcaggaagggctgaggccaaccacaaaggggcttggggcgacatcaagggatggcagagcgagagggaagtgcagggagcctggcccagaagaccagccctgccgccgcctcctggaaggggcacacctcctgagctaagcccaggatgccgcccaagcctcggggcctcccaaggtgtcccccatgccagagtgtgtggcctctgccaggcccaggatggctccaggtggttggactcccatttcctctccccttcccaggtctttcccaagcccagagcccctgctttagttttccagtgtggggagacaggagagtggccacagagcctggttctgcgcttggtgctgctggactccaaacctggctctggagctgcagtcctggtgagggcggtggccctggggaagatgagctccccaacacttgttacggcagtttccagtcacaagccgcaaggacacagtctcaaaggagcatcagatggggttgggggcatgtggggtggccctggctctcccaggtggggtcctgccaggccaagagctatgctaagtggggcccaccatggccataggcccctccgtgtcacctggcataatcagctggtagaaacagcccttggggactacatcacctgacctgatctccaggttccaggtaccatttcttactgccccccagcagcactgtgcccctgtccacaggtcatgtgactgggtgtcgggcacggttcccttgcagcaatgaacagtacatctgtggatgaaggtgggcagatagaggtttggcggggggtggagcggggcactgatcatggcagcctgctgtggccagccccaagggcttcccggtgacttctcagagcctgaatgtctcccctggacaggtgggatcgagggaatgccatgaaggtgggcatgagggggaatctcgccaggggtacagtgcgtctacactgcttttcagactagtgccacgcaggcactaggtctcactggctgaggggcagcctctgtccccaggcgccgcgacttgccccatctgctgcagaggaggcccacctgtggtgagcattgtggtcttggggcctgcaggcgcccttgtggagttaccatggtgaccgcagccccttggactggtgctggggattcagacaccaggtcacgtaggccttggctcgtggcatggccaagccctggggtctgtcggggttggcagggcaggcttcctggaggaggggctgaggccgcgtattctccctctcatcctgccatccgctgcggctactctccagggccacaactgtcacagaacgaggaacccgggccttgtgcagaagagccttgtgtaggtggattgagaagagagtcccagaggagaagctgagccctctgctgacttgcccccagctcatttctgcttgacctttccttgttgccgtttttgcttggaaaactatattgtggacctcatcattctgggaaaaggtggttcacgagaaagcacagtcatgtgtcaattaacagtgcagatgcattctgagaaatgcgttgttaggtgatttcatcatcctgcaacatcagagtgtgccccgcgctcatggatgagacagcctgccccacacccaggctgtgggggacgggatggcctgttgcttctggaccagacgcctgcacagcacattaactgtgctgaatgctgtaggcagttgtaacgcaacggtaagtgtctgtatctaaacgtagaaaaggtatagtgaaaatatgatgtaaaagagaaaacatgcttcagctgtggagggcacatgcttcagctgattggggcctgtggacaaggctgtgggtgtccgtgagggagagggagtgcctctgaggcccttctgcaggctggatgaacaacacacttaggccacactcagtttatactaaaaaaatgtcttcaataacacattcacttgagcttttttctaacttgttaattttatgaattttaaaaacatttttgactcttttttaataacagcttaaaacacacatcgtacagctgtacaaaaatatttttcctttttttattttgtttttttgagacggggtcttgttgtgtcacccaggttagagtgtagtggcgccatctcggctcactacagtgagcctcagcctcccgggcttaattgatctcctgcctcagccccccaagtagctgggaccacaggcacgtgccaccatgttgcccaggctggtcttgaactcctggactgaagcggtcctcctgttaggggtggcgaatatttgagttgtcagtggtgaattcacatgggtctgcagcagcctcaactcttgcctccttggaagaaagaattcatctgaagagcataaggcggaaaaaggagactgaggcaagtttccgagcgggagtggaagtttattaaaaagctttagagcaggaaagaaaaagtacacttggaagagacccaagcacgcactgtggaggtggagtgcagcatttgaccttttgacttggggtcttatatattggcgtacttctggggccttgtgtcccttttcccatgatgctttccttagggtgggctgcctgcatgcacggtgccctccttgcactccggacgtgagcattcgcagtgggtttgtgaagttgtatgtatgtttgcctgaggctgcttcccttttccggtaggacgcccccagaaggtcatactctgccattttgtctcttaatgcgcttgctctagcccacttacccaattcctgagattttattggaagccgctggtgagcaatttcaagtgcctttatctattgggaaattgcctctccctggcgcctgcgaccaatgatcatttttagacagccagtgtaacaactgtgggaccatcacctcaaggactaaactgattttttatcttgcccaaattcctatctaaggggtctggggagtcctgccctgcaaatcagaaattctcatcagatgggttttatttaaccctatatattatgacttactttccaacctgaccctggcataacattacaagtcaaggaagaaaaatcaaagtagtttacctcaaaatgtgtttaaccatattttgaaatgaccctacaaagctgttttgtgtgggggaaaatttgcatctgtaaagaatctctgttaacatagctagatctttttcttccagaccctcccaatcctgaggagattaaaactctagcaccttttgaaagatctgaataggaaacagttgtcatctattgtctctaagggcagcgactattagacttcaaagaactttggtctccacaatctttatcttaacttgaacatttcctttctatcaatcccaggtcttcagacaaactcaaccaattgtcaaccagaaaatgtttaaattcacttgtagcctggaagcttccctcccctgctccgacctttgagttgtcccgcctttctggaccaaaccaatgtatttctcaaatgtatttgattgatgtctcatgcctccctaaaatacataaaaccaagctgtgccccgaccaccttgggcacatgttctcaggacctcctgaggactgtgtcatgggccatggtcactcatatttggctcagaataaatctcttcaatattttacagaaaacaaatactttacagggatctactctcttcgtcgacaacctgatgctcagtcacctgacattcctggtgggttggggtagccctttcctgtcccgctgctgcctgcctaccaacctactatgtcactcctgcctcagcctcccaaagtgctggggttacaggcaaatattctttatattatatcagcttttctctttatgcttttttacttttaaacttttttgttaaaaatgaaaagagaaacacacacattagcctaggctaggcctacacagagtcaggatcatcaatatcactgtctcccacctcctcgtcttgtcccatcagaaggtctttaggggactagcacacctagggcagtcaccgcctgtgataacagggctgctttctgaatccatcctgaaagccctgtctgaggctcttcttgaggaattgtcactcttttcagaaacatggccatggtgatgtgcttggtttccttttttcatcatagatttgcctgtaagcagataaggcactatgaacattcctgtctatgaaagaaagccttccgtgttgaggtctatgcttcagacttgttaaggtgcgtgtcgaggtctgcaaagcttttgctaaacccttcactgtaaattttcttggggctcatcttgtttttcgccagttgcctcttctcttgccccttgttcagctctgcgtccctcttccagttccagcagctcatttgtcagttcttcaggaaccgcctggaggcactcctcaacggcatcctcctccaccctagactggagttgtttgccgtcctagccacagccgtgttgagttttgcagcctcctcatcctgggcaaatcctttgaagtcctgggtgaactcttgcgtgtcctcctctggatgccactcacgcacaccttggcaggcacacctgggtcatcacccctttcatgagcgtccgcgtgaagagaccaccaaacaggctttgtgtgagcaacatggctgtttatttcacctgggtgcaggcgggctgagtccaaaaagagagtcagcaaagggagataggggtggggccattttataagatttgggtaggtaaaggaaaattacaaagggggtttgttctctggcgggcaggagtgggggtcgcaaggtgctcagtggaggtgctttttgagccaggatgagccaggaaaaggactttcacaaggtaatgtcatcacttaaggcaaggacaggccatgtacacttcttttgtggtggaatgtcatcagttaaggtggggcagggcattttcacttttgtgattcttcagttacttcaggccatctgggcatatacgtgcaagtcacaggggatgcgatggcttggcttgggctcagaggcctgacattcctgccttcttatattaataagaaaaataaaatagtgttgaagtgtgggggc

SEQ ID NO: 96351 - DNA, 60812 bp, Homo sapiens
  misc_feature (1)...(60812): n = A,T,C or G
tagagatggggttttgctttgttgcccatgctggtcttgaactcctgggctcaagcgatctgccctccttagcctcccaaagtgctgggattacaggtgtgagccactgcacctggctgagaaacttttattttaataacgtattttttattgtggtaaaatatacataagatgaagtttgccaccttaactatatttaggtgtatgctttagtagtgttaagtacattcacaatgttgtgcaaacatcaccatcattcagctccagaatgttttcatcttcccaagcgaaagctctgtactcacttaacagtaccttcccattcctcctcctcctcccaggccctgacaatcaccattcaactttctgtctccacacctttcactattctaggcagctcatataagtggaatcatagtttggactctttgtgattagcttatttcacttagcattacatcttcaaggttcatccgtgttgtaaaatatgccaaaattcccttcctttttaaggctgtgtattattctacctatatatatatatatatacagtagaatattatatatatacacatacagaccacattttatttatccactgatggacatttgggttgcttccaacttttggctattgggaataatgctgctatgaacacgggtgtacaaatgtctgttctgagtccctgccttcagttattttgtgtatattcccagaagtggaattttggattatacggtaattttatttttaattttttgaaaaaacaccacactgttttcaacagtggctacagcattttacattcccaccagccatgcacaagggtttcaatttctccacaccctagccaaaacttgtcattttctttttctctttttttttttgagagggggtcttcatctgttgcccacgttggaggagtgcagtggcacaatttcagctcacttgcagcctcgaccttccaggcaatctgcccacctctcagcctcctgagtaggtgggactacaggcgggagccaccatacctggttaatttttgtatttctgtttttttgtagagatgaggtcttgccatgctgcccaggctggtctcaaactcctacactcaagtgatccgctcagctcagcctcatgaagctctgagttttcagccatgagccacccaccatgcccggctgctttttttttgagaccgagtctcgctgtgtcacccaggctggagtgcagtggcacgatcttggctcactgcaacctctgcctcctgagttcaagcgattctcctgcttcagcttcccgagtagctgggattacaggcctgcaccaccacacctgactaatttttgtatttttagtagagacagggtttcaccatgttggccaggtcttgaactcctggcctcaagtgatctgcctgcctcagcctcccaaagtgctgggattacaggcataagccacagtgcctggtcactgtttttttctttttgataatagccatcctaatgggtgtgaagtggtatctcaatacgggtttgattagcatttccctaataactgatgatattatcttcatgtgcttattggctatttgtatatcttcttttgagaactgtctattcaagttatttgtctatttttctgttttgtttcttttttgagacagggtctcactttgttacctcagatagagtacagtggtgagatcatggttcactgcagcctcaaactcctgaactcaagtgatccttccacctcagcctctctagcaagaggctaattttttgctttttggagagacagggtcttgctgtcttgcccatgctggtatttgtccatgttttcaatcaggttttttgttgttgttgttgagttgtaggcattctttttttttttttttttttttgagatggagtctcgctctgtcatccaagctggagtgtagtggcgcaatcttggctcactgcaacctccgcctctcaggtttaagcaattctcctgcctcagcctcctgagtagctgggactacaggcacacaccaccacgcccgactaatttttgtatttttagtagagatgaggtttcaccatattggccaggatggtctcgatctcctgacctcgtgatccacccacctcggcttcccaaagtgctgggattataggaatgagccactgcacccagccaggtattctttatataatctggatattaactccttatcagatatgcgatttgaaaatattttctccatttcctgggttgccttttcactggattaatagtgtcctttgatgtacaaaattttaaattttgatatagtccaaattatttttttcttttgttgactgtgcttttggtgtcatatgcaagaatccaatatcatgaagttttcccatattttctttactttttttttttttttttttttgagacggagtctcactctgtcacccaggctggagtgcagtggcgtggtctcggcttactgcaacctctgcctcccaggttcccaggttcaagagattctcctgcctcagcctcccgagtagctgggactacaggcacgtgccgccaccaccatgcctggttaattttttgtattttagtagagacagggtttcaccatggtggcaaggctggtctccatctcctgaccttgtgatccacctgccttggcctcccaaagtgctgggattacaggctggagccactgtgcctggccaatttttctttctttcttttttttgagatagagttttgttttgtcgcctaggcctggagtgcagcggtgtgatcttgactcactgcaacctgcgcctctagggtttaagcaattctcctgccttggcctcccaaaaagctgggattacaggcatgcgccatcatgcctggctaatttttgtatttttagcagagacagggttttgccatgttggccagctggtcttgaactcctggcctcagacaatccgcctgtcttggccttccaaagtgctgggattacaggcataagtcactgtgcctgacctcccatattttcttctaataattaatctatttaacatattaaaatagtgagcattcaaaccatcactttatagatgtcacatattatttttaaagtttttcaaacttaagatattgagaatttaaataaatatactatgtaaataataggagaggtttagcatacatcttgcagttagtacccaagtgactgatgcttggtaaatactgtgctaagctaaactgcatccttctaaatatacctattgctgtatctcattcctaagctaagcagtcccccccccagtacccaatggttgcctcatgcatccatttaagaaagacagcagaccaaaactggagtcactaaatgctaaggattcatgctaccaaactgaaacctgggttgcttacttgtaagatcttctgagaaatcaggagagggatgaaagccaaattacattacaccaagatttcgtctacacctctataaggaaagtaatcttgaaatgactgatctgctatttgttcattcttcctgctttcctccactttttcctgcctgtcaaactcacccactcggtcctcattggagcacctttctatcttgtagactgcctggtgcatgcaatgctattaaaaaccaatcagatctttgaaactaaatttgttgaaattttgttcttatacacatctgaaaagcagccatcagtataaaggccagcgatatcaaaagtgggtaacaaagcaagtcatctaatctaaactgcaagacaagcattttgagaggcctacaacataccttattttcaattctgaaatgcagaaagtcctccaaattagtttttccccacgcttggagtaaactcatttgaactgatatgagactatttacaacctttatttatttattgtatttattttatttgagacagggtctcactctattggccaggctggagtgctgtggtgtgatcacagccaactcactgcagcctcaaccttccaggcccaagcaatcttcccacctcagccttctgagtagctggtactacaggtgggcgccatagtgcccggctaattttgttatttttattttgtagagacgggggtctcactgtgttgccgaggctggtctcaaactcctgggttcaagcaatcctcccgctttggccttccaaagtactgggattacaagcatgagccactgtgcctggccctatttacaacctttatatatcccacttagggtgaatatttgtgaatactcacacatttctgctatagaaacattgtttgactacgggggcatacaatatatctcaccttttttaaacattcaaaaaattctgaatttcacaaacacatctggcctgaaaggtttttgataagggactgtgaatcagtggtggcataattagtcttaggagtactaactaataggagaaatgttacatttgttaagtacttagtttgtgtccagcattgttctaagtatcttctaggtaaatgcctcatgtaatcctcacgatctctatgctttatcatcctatcctttataaatgaggaaactgagggagattaactatttaatttgctgaggatcatgcagcaaatagcccgaagagggattcatgcgtttcaccataatggttaagaacagggctttgtcaaaggataccttcaactgcagcagaatgatggactcaaatcacagagacacgacaaagtgacgggtagtcagctgtgggttggttcagaggctcaggctgttccggctctaggtgatttcctgctttcctagggttcccaccagctgccctcatggtgacaaaaaggctgctgcagctccaggaaacttacactgggcaaggacaacaggaagaaaacagcccccacccacccaactccccttttaactagaagatctttcccgaaactctgcctcaacagacctcgcttacttctccctggcccgtactaggtcgtgtacccatcgttagccaatcgctggcaacggattggccccgttttaatttatccaaaaaaggcgccagtctgggctgtttggagcagtcaagggagctccgtgctaaggcaggaggggcctggacatgcggctgcaggagtccgggcctcggtgccctaagatgagggctcagtggtgctcagcaccgcgccgggccagagactgagccgccgccggctgttgagggttggttggctgaatccccggcaggggccaggcggagcgaacatcaccgcggcaactgcctccacagcacacactcccgacagtggctgcgcttttccccttcagcacagcccaaaggccccggcagctcagcacctgcgacctcctagtgccctccagcctacggaggagtagaagtccttccggggcctcccaaccagcagccaccagccaccagccacaaaagccgtgagccgcgcggggctggcctgaaagctctgcgtcttcccaccgcggcaacagcagctcccacccggaagcgaggcagccctgcggaccacaactcccagaaacacccgctgtctcgctcaagctaattgacccgctgcgccatctattagccaaccagccacagggagacggctccccacgaggcctaacaaccaatcataagacagaggaggcgggcgctcctccagccgatccacggggtgttgtcaaaagtttggcgggatcctgaaagaatgctttctttagagccccacggctgctcctgtgaagggagaagcgacaagcagagatatgcagggacctctctgcgaagtaatgacttggggcagacggacaacgcccacagcatcccaatagtctcagaagactctggtctctgctactcctgcctgcggtcctcgccttggtgctctcgcgcttcccgcggcgtcccgcccctccctctccttattggctccccagggccttgtgcggaagggggcgtggtgcgcgggcctcggccaggcctgagatgccggkagggtttgaccctggggctgcatggacagcttakcgctcggccgctggcgacagcggagggcggaggatctgcaggttccgggggacgtggtgagcccccggggcctgggcgttagggacgggagggcggatggcccctgggcgggttcccaccgcgcctcgtttttgccggcgcggccctgcctgtgaggaggcctggcccaagacactcgcacgctcgcgtacgtccctgggagggcgtggccagtgatgggcgtggcctgttagggcggggttgtgacgccgctctcccggtttcgcgcctgcgcggtcgggcgcggagctcgggcaccttcctgacccacacgctcactggggctccagacccaggctccctaaaacatgggccgagactcattgcaggacctcgggtgcttggtatccgtgtcatgtcttctcctgccgtctacacytgactgttcctgagtctcgttcactgagcgcctgccacgtgccaggcccagggctgggtgttgggggacgagtacgtggggagcgaacacgcgcagaaaattacccggcattgagcgtgttagtgcttcttgggctgagtccattaactgatgagcagagggtaagatgagatggtaatggggagacttgcacaagatcccagggtgcgtgggtaagtcaggtatgtgtgagacttgaaggatgaccgggggtaggcaggatgggaggtgacaaaaaacagtgttggaggaaggagcttagcgtcttaggggcactgaaagaagtactgcaggattggagctggaagacagagctgcttggcattcctgtattttatcttccacctctgcttgcaaattggccagttcttacttaacctcgtttatttcaaagttcctcgctaggggcagcagtgagcagccaacataccgcatatttgcttttttttttcttctagagctacacaggcttggtaagtgcaggatccgtcttcccagttaatacaggcagcatttttttagatgtctttactgcgtagcgggaatgactrgctttctaccctgcaccatctctttcctcactactcactgcctggccgtgaagccagtaccacttaggtttctatcacagccgcacccctcctccaggtaccaattgttatattactagggtgcaggttaccccagtaatatagtaataatatggtatagtaatgtagtatagtaatagtatagtacagtaatatagcaggttagggtgcttttgtaaccaagagccttcaaagcacgctggccctaacaagatggaagtttgattctcctgcacagaacagcatggacgtgagcagtccagtggggtggagcccagggtcactaaatataggcgtagggctggtggtacccagatcaggggatatgcrgggacctaagttccttcccctcacaccatcccctgggtgtcaccctcctctgcatagccaagggtggctcactgctacygtgctaccagatggcagaaaaacaaacagaaaagtgacatgattatgctgatgtgttgagaccttacttcactgccctggaaaatgaaaggtgtgatcagggtgcaggcagggaggcaaggcttgtggctacagtagtgtgtcagaggagaagtggcagaggtttgcacaagagagggcagtggggtggtgacactagagagacgtgactgtgtagagggagagcagacagtctcactgatggagtggcagtggcagggtaatgtgaagagtggagtccagggtgttgtaggggttgacttgagccctgcgagggcagtactgctgctccttgagagaagagtggtgtggaggcaatgaagagctcctgttaggccatgctgtgttttctgcgactttgagacgtttagtggagacgtggcaaatactgctagtgattgaatggttatcatgtggattatctgaatttctttaatcaactaaaatttatttaagcataaagttactttcacatttgtctacacctacagtaaatacagttgttggcataaagacacagcctttagaatttaaagcctccccacctgcaagattacatacgtaaaactcccactgttgtttctataatagtggattaatcaaattaaaatagttatactatcgaataaaatacaatggaaataatttacttataagattcatatttaaatcatccttatttacaaaatactatcctaagaattataattccattaagtttcaatttgagcaaaagtgtaatcacttaagtaacagcagttacttgaaatgagatcagtcagaattacttttgaagagagcaaaaatattgccaggtatcttgctgcggttttggatgttccgtagcaggctcatttgaaggcggaatcagccctgaagggaactcacttctaccttcagaatgtgggggtcgggggaaaaatccaggtcttgggggagggtaaggaggaaaacccctcggtggatagacatttctcattgcaaacggagcatgtggtggacctgggaaatcccctggtggaaaataatctcgagaagctccaaacctggttcctggaggaggtggggggaaaggaggtgctcttctcatgaacgggccccttgtatccactggaaacagtggacctctgattagggcaagaggtggaggaacaaagcgagggccagttgctgcattttcagcagggagagatgaatcaggsayatttaaattaccaagatcatctttggtgtcatttctactggattccatttctgaaggcattgacccatccattttatccaaaggaggcatattaaaacttctgagttctgctggtccagacagtccaccagagttagaataaaatctgtcttgcctttgtggaggaagagctgaatcaagatatgattgcgctggtggaggaaacatcatcctayggtcctgttccctcrgaagtgacagggacccagtgtcagaaggagacctgtgaggatcggttaacctttcacagcttgattctcctcttkccttggtaatctgatggtccagaggattccctgggcctcttgagcctcttccttccccccctggaggcaaaggtgagagtctgagtggaccctccaacagagttgcgggagagagaaaagctctcgtttcagatgaaggccgacccaatgatgagggaccatatggggaatgctctctgccaaatgctgtatttggaacatcaagtacataaggatctttttttagaagttttattttatactctgtttcagctaatttttgtctgttgtgagcattttctttccttaaatcattgaggtttctttcagcagcccaagctgccaaccagttatgatgtgcctttttctcatgggaaataatctgccgttgataataatgaatagttctctccaattcttcttcaagatctttggctcgctgtctgtaggtctccagctctttagtggcatggctgatctttttgtctaccttagaaagtttctcttctttctctaaccggctattttcctctactgttaatttcctgtagagtttcatttcattttcttgatataattcagtcattactttaagtttctgttgaagcttctgattctcactttcaaaatgtgtgttttctgactgcaaagatgcttgttcagtccgaagatttttaatatgctctgtaagctcttcctttgttttatcaatttcaggtaactggatataaatttggtttctttctccttctaaggtttttaaagaagcatttaacttagtagcatgaatcagtttcttcagagctccttttagaggatcatctaagtaagcaccatcttctgattcactgttcacttctaagttatcatcatccgttacgtcttctctaagcctagcagcccaatctttcatctttagcaaatgttcagtcagagtcttgatgtgattttctttatcatttagaacttgttctgcatgtactttggagtcttcaaatgttattttctgtttattaagttcattcacttgttcgttccatacttcagcttcttgcaaaagctgtttctggctttcctgaaggtgagagttttcattcaaagcatcttttattgctatcttcagttgtttctcagtcattttaaatctcttgaagatcattttggcttcagctacttgtgatttgagggattctgactcatctgctagaggctgtatcgtttttgaaatatccrccatcaattcattttgttgcgaatgtttagatttctcttcttttaactctttttctagacagagaatttcatgctcaagttcagaattggacctgttcaacttttcacaggttgcctccaaacttcgtgcttctgctgccgccttctcaaagctggcatcctctaacgatgacgctacttcatagtcttcatactctttttgaacaaggctaaatttttcaagtagtttacatttttcttcaattagtccagaaagcattatagcaagctttttctctcttcccacataaagccgactcctaaccgatstaaaacttctccacagaaaaaggagaacagcaaaaaatgcagcaacagctgcacatatcaccatttcccatggaaaaccatgaggattcgaatccagtctcatactttcaggcagcgctgccacaaccctgcgtggctcccccaggaccagccccaagtaccgctgaggggtagcccctggctccaacatagcgccaaggctgctctggcggtygccgcagtaaccccggccacaacaagcagcggagaactcgcagycttgcgtccggaacccgaatccgcacccggcaaccggagcagaccattgtggagccggctgcsggggggagctgggggatgcgggcgctcacaggcccactctgcccacccagcccccttgttacactacatcctgaggtagcacatgttggacccgcgcaagccccaccccttggtttggttttggccaggcagccgtggggaggtggggagttttgttttgttttgttttgtttggggggggaggggaacggagtctcactcttgtcgcccaggccggagtgcagtggcataatcttggctcactgcaacctctgcctcctgggttgaagcgattctcttgccttagcctccggagtagctagaattacaggtgcccgccaccatgcccagctaattttgtatttttagtagagatgaggtttcaccatgttggccagactggtctcgaactcctgacctcaggtgatccgcctgcctcagcctcccaaagtgctgggattacaggcgtgagacaccgtgcccatcctggattatctgaatttatagcacaacactgctaaattattcccatgatacaaaggaggcagctgaaacrcagagggggtaattaactggcctaaggatacacagctagtaaatggtagaactaggtcttaaatccaagccatctggctccagagcctgccatcttaaccacagggctgcacagcttcccaygtggcatttgtggaactaaaatacaaagcaggccgggcgcagtggctcatgcttgttatcccagcactgtgggaggccaaggcaggctgatmacttgaggtcaggagttccagatcagcccggctaacatggtgaaaccctgtctctactaaaaatacaaacattagctgggcttggtggcacacacctgtgatccagctacttgggaggctgagacagaagaattgcttcaactcgtgaggcagaggtcgcagtgagccgagatcacaccactgcattccagcctggatgaaagagtgagactctgtctcaaataaaaaagtaaaaataaaatatacccacaaagcttcacaatgaagtcctaaattggctatcataaaatgatgaaaagtgtgatgctgtgggctgtcagggaaggggagccagaggtcattattgatcagagcgaacagggaaggtttaatggaagacaccctgaatgatctatcaggttggaattgctgaaatggagtgccaggcttcaggttgcaatacttcttgactgttaccaaagaataatgagttgggtatcttattggcatggtgtatattgcctcttaatttgataaagttttgtttatgttgtattgtgtcctagtctttgatttaataatccagattgagttcaataaagtatccaagttctaccaagttttctgtcctctctctgcctctctgtgtatttctctctcacaggcgtctccagaatttggttactgaggaacggtaactagtttcttacttctgttcccagcctagaggctctgtactctgcacataaccaccagcaaagttttggaaaacacagcagccaggacccatctctgtagtgactttgcaggtgattctcgggcagggccagagtgaagcacctctgctgtgatgcgagtgtcttatcactgtgcatttccttgcagtccagttagctagcgtggtcacatgtgtcatagttcaatgacagtagtgttttatcgtttccattgggcagacatgttttgagcrcctgctgtgtctcaagccctgtcctaggcactggagatgagatgaagaaacgatgagtagaggccttgcttacgtttatcctgcaactcatgatgaggcttactctgcaactccagtgctcggctttttacacagtaagtgcccctgcttaccacaccctggccacactcatgtgtttcagattgaaagttgcctgcctagaacgcctaaagattcatgtccacttagtctttcatctttgctgagactcttctccctaaagaactcactgaagaccaggtttcttgggtagagcaacattttagatacctgggctggaaaatcaagtcgataatatttttttttttctggtgtcatatgagttgattcaagatccttctttctagcttttttttttgttttctttttgagacagaattttgctctgttgcccaggttgcagtgcagtggagcgatgatggctcactgcagcctcaatctcctgggttcaagcgatcctcctgcctcagcctcctgagtagctgggactacaggcaagcatcaccacgcccagctaattttttaaaacttttttgtagagacgggatcttgccatgttgcccaggctggtctcaaattcctgggctcaagtgatccrcctaccttggactcccaaaattctgggattacaggcatgagccacygcacctggcctcgtgtacaagtgtgtatgtatttatttacttattgaggcagagtttcggtctgtcacccaggctggagtacagcagtgccatctggtttcactgcaacctctgcctcctgggttcaagtgattcttctgcctcagcatcccaagtagctgggactacaggagtgtgccagctaatttttctaattttagtagagataaaactaaatacccaaaggaaaaggcagagaattaaaaaatcamgactcagcwgtgcgtggtagctcaacacctgtaatcccagtactttgggaggccaaggcaggcagatcacttgaggtcaggagttcaagaccagtctgaccaacatggagaaaccccgtctctactaaaaatacagaattagctgggcgtagtggctcatgcctgtaatctcagctacttgggaggctgaggcaggaggatcgcttgagcccgggaggcagaggttgcagtgagccgagatcgcaccattgcacgccagcctgggtggcaacaaatgcgaaacacaatctttaaaaaaaaaaaaagactcaattataagtccatctataagaaactcactataaatataaagatgcaatagataaataaaaggacgcaaaaaaaatcaygctaacactgaccagaagaaaggtggagttgctatattaataaaagacaaagtcaatttcagggtaaagaatattaccatggatataaaaggtgatttcatagtgattaaaaaagtcaattcatcaagaggacataaaattcatcaatgtttatgcatctaacaacagagcttcaaaatacatgaagcaaaaactgatagaactgcaaggaaaaataggcaaatccacaattatattagtaagtttcagtatcttctcacaaaaattgatagatatatgaagaaaattattaaggatatagaaaatgtaaactaaactactggccagtgcagtggctcacgcctttaatcccagcactttgggaggccgaggtgggcggatcgcttgaggtcaggaatttgaggccagcctggctaacatgatgaaaccccatctctactaagaatacaaaaaattagctggatgtggtggcaggcgcctataatcccagctactcaagaggctgaggtgggagaaccactggaggcagaggttgctgtgagctgagatggcgccactgcacttcrgcttgggtggcagagtgagagtgtctcaaaaaaaaataaaaataataaactatcaaaccgcctgacttacttggaatttatagaactcttcactcaaaaacagcagaaaacaaatttcccaagactaattatattttgggccataaasgaaggctcaataaacataagctgggactwcaggcacatggcaccccatcccgggtaatttttgtgtattcttgtagagacagattttcaccatgttgtccaggctggtctcaaactcctgggctcaagcaatctgcctggcttcagcctcccaaagtgttgggatcacaggcatgagccaccatgcctggcctcaattttgttttctgcctgaaggaattttttttaaacatttcttataggacaggtttgctggtgataatttttttttaacttctatattctgaaaaagttttttttttttttttttttkkttttttttttttttgagacagagtctccctctgtcaccaggctggagttgcagagagctcactgcaatctctgtctcccgggttcaagagattctcctgcctcagcctcccragtagctgggactacagatgcttgccaccatagctaatttttgtatttttatagagatgggatttcaccatgttggccaggatggtctcaatctcctgacctcatgatgcgcccgcctccacctcccaaagtgctgggattacaggtatgagcaaccatgcccggycaaaaaaatcttaattttatccttattttgaaagatatttccactgtgtgtggaattctaaattgataggtttttttctttcagtaatataaaaatgttgctccactgtcttgacacagttgcttccaatgaaagagctgcagccaccctctctctgctcctcagtgttgaacgtgtctcttgtctctggctgcctttaaggttgcccttgacctgtggctttgaactgctcatcacgtgctctcatatagttttcttcatggttctgtgcttgggttactgagattcttggatctctgggtttatagttttcatcaaatttggtatactttcagcctagataaatagatagatttttttttttttttccccagacagagtctctgttgcccaggctggagtacagtcgcacgatcttggctcactgcaacctctgcctctcaggttcgagtgattcttctgcctcagcctcccaagttgctgggattacaggtgcgctccaccacaccccgctaattttttgtatttttagtcgccacggggtttcaccatgttggccaggatggtcttgaacttctgacctcaggtgatccacccacctcagcctcccaaaatgctgggattatagatgtaagccaccatgcccggcctcagctattatagctttcaacattttttctgtcccttttctcccctctccttctacaactcccactacacatctattaagcttcttgatagttgtcccacagttccctgatgctatgtctacttttaaaaatctcttttctgtgtttgatttttgattgtttctactgctgtgccttcaagttcatgaatctttttttctgcaatgtctagccgtccactaattacatccagtgcatttttaatcccagacattatagcatttgatttggatctcataacatttgatttttatcttttaaaaaatatcttccgtgttttgtttaatattttgtacatatacagttatattaactcttttaatgttcttctctgctaaatttaacatctgtgtctgttctttggcagtttttgtttttgagacagagtctccctctcttgcccaggctggagtgcagtagctcactgcaaccttcgcctcccaggttcaagcaattctcgtgcctcagcctcccgagtagctgggactacaggcacrcaccaccacgcctggctaatttttgtatttttagtagacatgggatttcatcatgttggccaggctggtcttgaacacctgacctcgtcacccacctgcctcagcctcccaaagtgctggaattacatgcgtgagccactgtgcctcgccctgttttgtccatttttggtcagttcatgcaggagagtaaatcttgttggtccagattggcccaaagaggaagttggataatacagtttgggtcagagtttaaaagaaaatgaagcccgggcgcggtggctcacacctgtaatcccagcactttgggaggctgtgttgggtggatcacaaggtcaggagttcgagactagcctggccaacatggtgaaaccccgtctctactaaaaatacaaaaattagccgggtgtggtggcgcgtgcctgtaatcccagctactcaagagcctgcggtgggagaatcgcttgaaccygggaggcggaggttgcagtgagccaagatcacrtcactgcactccagcctgggtgacagtgagagtccatctyaaaaaaaaaaaaataaagaaaaaataaaaaaaawttaggttgagcgtggtggctgtaatccttgcacttcgggaggctgaggcggacggatcacttgaggtcaggagttcaagaccaacctgggcaacatggtgaaaccccgtctccaccaaaaaatacaaaaatggtgtcacacggctgtagtccccagctatgcaggaggctgaggcaggagaatcacttaaacccacgaggcagaggttgcactgagccgagatcatgcctctgcactctagcctgggcgacagagtgagactgtgtctcaaaataaataaataaataaataaataaataaataaataaataaaaataaaagaagaagattcagagttaaatatcyttgttttaccccattggttgcagattttatagctcatctgctgagtaagatctttgccgtgagaacctagtaaataaccagctgatgatgcagcccctgacagaagccctcattttgccttctgtggtcactcttctccttctcaataattatcacccattcctcaagaagcaagctatttaattctctcacccattttgtattttggaaacaatctgttgagctatattatactatctgttatacwcagtttaatgagattccactatcctcccatgtagatataggaaattgatcaatgataattcatctttggttacaaccctaatacaggtgttcaccctgccagttatgcctacactcaatcatttctttttyttttttttttttgagatggtgtctcmctcttttgcccaagctggagtgaagtggcatgatcttggctcactgcaacctccgccccctgggttcaagtgattctcctgcctcagcctccctagtagctgagattttacaggcgtgcactactacgcctggctaatttttgtatttttagtagagatggggtttctccatgttggccaggctggtcttgaactcctgatctcagtgatccacccacctcggcctcccaaagtgctaggattacaggcatgagccaccgcgcccagccaatcatttctratttttggcaggtttctttatatatgacacagaaagtcacaatgaggttaggatcggcaaggaggccattttctgtggttagccacctcttcaggtgtctgttgtgtccagcactgaccctggaaggactctgccttggcttctggttctttaattaccaagtgcccagaactgagtggggcacatagtaggtattcaggaaaggctttttggttgactgacacgtgagggtgtgtgtgtgtttaactgagaattggtgaaaggaggattaagcaaatgcataaaattgttggtattttcaaaacatctttgtttagggaaaattataattcatttggggaaaacgccatcagcgtgccacatggtcacccttcrttatcatcacatagctactatctttttagatttctctcttggcagttaycaagaccgtgttatttaggtttagagttttttttgtttttgttttttgagacagagcttccctctatcatccaggcctgagtgcagtggtgtgatctcagctcactgcaacctccgcctcctgggctcaagtgattctcatgtctcagcctccagagtagctgggattacaggcacgtgccaccatgcccagctgatttttgtatttttagtagagacagggtttccctatgttggccaggcttgtctcgaactcctggcctcaagtgatcctcctgcctgggcctcccagagtgttgggattacaggtgtgagccaccatgcctggccaggtttagagttttttttttttttaagtgtgtaattaagtggtttttagtaaatttacagctgtgcaactatcaccacccagttttcattctcttcacttcagaaaaatctctggccattggtagtcactctgttcacacccctagctccaggcaaccactgactgactttctctctctggatttgccttttctggaactttcttgtaaagggagtcatacctgatagggtctcctgcagctggcttctttcagtttgcatcatgttttcaaggttcatccagataaaagcatagatcagtagtgtgctcctttttatggctgtataatattccattgtgtgaatagaacacgttctgtttatccattcattttggttatgaatagtgcagaaaattctgaaaattcacataggtaccgatcattgtgtgaacatatctcttagatggatacttagggctggaattgctggtttctatggtaaatttatttttaactttctaagaaactgccaaaatattttccaaagtggctacaccattttacatgcccaccaccaacatatgagggatccattttgtccacatcttcatatatagtcattctagtagatacggagcagtatctcactgcagtttttatttttactttttttgtagaggtacagtcttgctrtgttgcccaggctggtctcaaaccctggcctcaaatgatcttcccaagtcagcctcccaaaatgctgggattacaggcatgagcgcccatgcctggccatcactgtagtattgatgttgagcatcttttcatatacttactgacctttcatatatcttcattggggaaattactcttcacatcttttgcccctttaaaaaattgtgttgtctttttgtcaagttgagtttttaatatattctgggctgggtgcagtggcttatgcctgtaattccagcattttgggaggctgaggcaggagaatcgcttgaacccaggaggtagaggttacagtgagctgagatcacgccactrcactccagcctgggtgacagagcgagactctgtctcaaaaaaaaaaaaattaaaaaattaaattttatatatatatattttctggatacttgtatcatatatatgatttgtaaacatttcttctccacgaatgtggcttgtcttttcgttttctttttttttttaatatattttaagttttgggatacatgtgcagaatgtacaggtttgttacataggtatacacgtgccatggtggtttgctgcacccatcaacccatcatctatattaggtattacttctaatgctatctgtgccctagccccctgccccctgaaaagtcccagtgtgtgggtgtgtgatgttcccctccctgtgtccatgtgttctcattgttcaacttccacttatgagtgagaacatgtggtgtttggttttctgttcctgtgttagtttgccaagaatgatggtttccagcttcatccatgtccctgcaaaggacatgaactcatcctttttgagggctgcatagtattccatggtatatatgtaccacattttctttatccagtctgtcattgatgggcatttgggttggttccaagtctttgctattgtgaatagtgctgcaataaacatacatgtgcatgtgtctttaaagtagaatgatttataatcttttgggtttataccyagtaatgggattgctgggttaaatggtatttctggttctagatccttgaggaattgccacactgtcttccacaatgggtgaactaatttacactcccaccaacagtgtaaaaacgttcctatttctccacatcctctccagcatctgttgtttcctgactttttaatgatcaycgttctaactggcgtgagatggtatctcattgtggtttggtttgcatctctctaatgaccagtgatgatgagcattttttcatgttcgttggcctcataaatgtcttcttttcagaggtgtctgttcatgtcctttacccactttctgatggggttgtttatttttttcttgtaaatttgtttaagttccttgtagattctggatattagcccttcatcagatggagagattgcaaaaattttctcccattctgtaggttgcctgttcactctgatgatagtttcttttgctgtgcagaagctccttagtttaattagatcccattcatcaattttggcttttgttgtcattgcttttggtgttttagtcatgaagtctttgtccatgcctgtgtcctgaatggtattgcctaggttttcttctagggtttttatgattttaggtcctatgtttaagtctttaatccatcttgagttaatttttgtataaggtgtaaggaaggggtccagtttcagttttctgcatatggctagccagtcttcccaacaccatttattaaatagagagtcctttccccattgtttgtttttgtcagctttgtcaaagatcagaaggttgtagatgtgtggcgttatttctgaggcccctgttctgttccattggtctgtatgtctgttttggtaccagtaccatgctgttttgtttactgtagcctttagtatagtttaaagtcaggcagcgtgatgcctccagctttgttctttttgcttaggattgtcttggctatgcgggctcttttttggttccatatgaaatttaaagtagttttttctaattctatgaagaaagtcagtggtagcttgatggtgatagctttgaatctataaattactttgggcagtatggccattttcccgatattgattattcctttccatgagcatggaatgtttttccatttgtttgtgtcctcttttatttccttgagcagtggtttgtagttctccttgaagaggtccttcacatcccttgtaagttggattcctaggtattttattctctttgtagcaattgtgaagaggtccttcacatcccttgtaagttggattcctaggtattttattctctttgtagcaattgtgaatgggagttcactcatgatttggccctctgtttgtctattattggtgtataggaatgtttttgagttttgcacattgattttgtatcctgagactttgctgaagttgcttatcagcttaaggagatttttttgctgagacaatggggtttcctaaatatacaatcatgtcatctgcaagcagagacaacttgacttcctctcttcctatttgaatacctttatttctttcttttgcctgattgccctggccagaacttccaatactatgttgaataggagtggtgagggaggggatccttgtcttgtgctggttttcaaagggaatgcttccagcttttgcccattcagtatgacattggctgtgggtttgtcataaatagctcttattattttgaaatacattccatcagtacctagtttattgagagtttttakcatgaagggctggtgaattttatcagaggccctttctgcatctattgagacaatcatgtggtttttgtcattggttctgcttatgtcatggattacatttattgatttgtgtatgttgaaccagccttgcatcccagggatgaagccaacttgattgtggtggataagctttttgatgtgctgctggaatcagtttgccagtattttattgaggattttcacatcaatgttcatcagggatattgacctgaaattttctttttttgttgtgtctctgccagattttggtatcagaatgatgctggcctcataaaatgagttagagaggagtccctctttttctgttgtttggaatagtttcagaaggaatggtaccagctcctctttgtacctctggtagaatttgcctgtgaatctgtctgatcctgggctttttttggttggtaggctattaattactgccttaatttcagaacttgttattggtctattcagggatttgacttcttcctggtttagtttcgggagggtatatgtatccaggaatgtatccatttcttctagatttttgagtttatttgtgtagagccgtttatagtattctctgatggtagtttgtatttctgtgggatcagtggtgatatccactttataatttttttttttttttaatggtgagatggagtctcgctctgttgcccaggctggagtacagtggcacgatcttggcttactgcaagctccgcctcccgggttcatgccattctcctgcctcagcctcctgagtagctgggactacaggtgcccgccactacacttggttaactttttatatttttagtagagatggggtttcacctgtgttagccaggacaatctcaatctgacctcgtgatccgcccgcctcggcctcccaaagtgctgggattacaggtgtgagccaccgcgcctggccccctttatcattttttattgtgtctgtttggttcttctctcttttattctttatcagtctggctagtggcctatgtattttgttaatcttttcaaaaaatcagctcctggattcattgatttttttgaagggtttttttgtatctctatctccttcagttctgctctgatcttagttatttcttgtcttctgctagcttctgaatgtgtttgctcttgcttctctagttcttttaattgtgatggtaggatgtcaatttttgatctttcccactttctcctgtggcatttagtgctataactttccctctaaacactgctttagctgtgtctcagagattctggtacattgtgtctttgttctcattgatttcaaagaacttatttatttctgccttaatttcgttatttacctattagtcattcaggaccaggttgttcagtttccatgtagttgtgcggttttgagtgaatttcttaatcctgaattctaatttgattgyactgtggtctgagagactgttttgatttccgttcttttgcrtttgctgaggaatgttttacttccaattatgtggtcaattttagaataagtgcaatgtggtgctgagaagaatgtrtattctgctgatttggggtagagagttctatagatgtctattaggtctgcttagtygagagctgagttcaaatcctgaatatctttgttaattttctgtctygttgatctatctaatattgacaatggggtgttacaatctcccactattattgtgtgggagtctaaatctctttgtaggtctcttagaacttgctttatgaatctgggtgctcctctattgggtgcatatatacttaggatagttagctcttcttgttgcattcatccctttaccattatgtaatgcccttctttgtcttttttttkatcttcattggtttaaagtctgttttatcagagactaggattgtaaccctgctttttttgctttccgtttgcttggtaaatattcctccatccctttattttgagcctatgtgtgtctttgcaggtgagatgggtctcctgaatacagcacaccgatgggtcttgactctttatccagttttccaggctgtgtcttttaattgggggcatttatcccatttatgtttaaggttaatattgttatgtgtgaatttgattctgtcattatgatgctagctagttattttgcccgttaattgatgcagtttcttcatastgtcgatggtctttacaatttggtatgtttttgcagtggctggtaccagtttttcctttccatatttaatgcttccctcaggagcttttgtaaggtaggcctggtggtgacaaaatctctcagcatttgcttgtctgtaaaggattttatttatgtttcacttaatgaagcttagtttggctgaatatgaaattctgggttgaaaattcttttctttaagaatgttgaatattggcccccactctcttctggcttgtagggtttctgctgagagatctgctgttagtctgataggcttccctttgtgggtaacccaacctttctctctggctgcccttaacatttttttcttcatttcaatcttagtgaatctgacgattatgtatcttggggttgctcttctcaaggagtatctttgtggtgttctctgtatttcttgaatttgaaagttgtcctgtcttgctaggttgggtaagtttttctggataatatcctgaagagggtttccaagttggttccattctccctgtcactttcaggtacactagtcaaatgtaggtttggtcttttcacatggtcccatatttcttggaggsttggttcattccttttcattcttttttcttaatcttatcttcatgctttatttcattaagttgatcttcaatctctgatatcctttctttggcttggtcgatttggctgttgatacttgtgtatgcttcatgaagttctcgtgctgtgtttttcagctccatcaggtcatttatgttattgtctaaactggttattctagttagcaattcatctaacttttttcaaggttcttagcttccttacattgggttaaaacatgctcctttagctcagagaaatttgttattacccatcttctgaagcctacttctgttgactcatcaaactcattctctctccagttttgttctcttgctggcgaggagttgtattcctttggaggagaagaggcattctggtttttggaattttcagcctttttgtgctggtttttcctcatcttcatggatttatctacctttggtctttgatgttggtgacctttggatgggggttctgtgtggatgtcctttttgttgatgttgatgctttctgtttgttagttttccttctaagagtcatgctcctttgctgcaggtatgctggagtttgctggaggtccactccagaccctgtttgtctgggtatcaccagcagaggctgcagaacaccraagattgctgcctgttccttcttctggaagcttcgtcccagaggggcacctgccagatgccagctggagctctcctctatgaggtgtcrgtcaacccctgctgggaggtatctctcagtcaggaggcacaggggccagggacccacttgaggaggcagtctgtcccttagcagagcttgagtgctgtgctaggagatcccgcttctctcttcagagctggtaggcaggaacgtttaagtctgctgaagctgtgcccacagttgccccttctcctagatgctctgccccagggagatgggaattttatctataagcccctgactggcgctgctgcctttcttttagagatgccctgaccagagtggaggaatctagagaggcagtctggctacagtggctttgtcaaactgtggtgggctccacccagttcgaacttcctggaggctttgtttacactgtgaggggaaaaccgcctactcaagccttggtaatggcagatgccccgcccgccccccaccaagctcaagcatcccaggttgacttcatactgctgtgctggcagtgagaatttcaagccagtggatcttagcttgctgggctccttgggggtgggatccactgagctagaccacttggctccctggcttcagccccctttccaggggagtgaatggttctgtctcactggtgttccaggtgccactggggtatgaaaaaaaactcctgcagttagcttggtgtctgcccaaatggccgcccagttttgtgcttgaaacccagggccctggtggtgtaggcacccgagggaatctcctggtctgtgggttgcgaagaccatgggaaaagcatagtwtctgggctggagtgcaccgttcctcatggcacactccctcacggcttcccttggctggggagggagttccgtgaccccttgtgcttcccgggttaggcgatgccccaccctgcttcagttgtccctccatgggctgcacccactgtataactagtcccaatgagatgagctaggtacttcagttgtaaatgcagaaatcacccgccttctgcattgatcttgctgggagctgcagactggagctgttcctatttggccatcttgccagcttccactttcttaatggtgttgtttgaagccccaaacctttgaatattgatgaaatccaaattttcaacttgtttcttttagggatcattcttttggtgttgtatctgagaaatatttgcctattccaagatcataaggattttttttccctatgttctcctttaaaaattttacacttttagttcttacatttaggcttctgatccatttcaagttaatttttgtgcatgatatatgtcaagaggccaactttatctttttacatgtggatattgaatcgtgtcagcaccatgtcttctaaagactgttctttctccattgaattttcttggcacccttgtcaaagatcatttgaccataaatataagggttcatttctggactctcagttctgtgccattgacctgtatgttcatccttatgccaataccatattgattactggagctgtatattaagtttctattatattaagttttgaagtcttttttatacattgtttagtttctagtgcttctttagttgtatttttcagtcttatttctccacttagcctgaaagcagactcaagacccagctgacccagctcagtcatttcatatcaccagacttcaggcaagttggctaaggtttttttttacttctttttcctcatctataaaatagaaataaaactccatatccctccattgtcacaggattattgtgaggatcaaatgaaataacaaatgtggaaacatctaaactagttttctataaatgcagaggacatttattaggctctgcctgttgcaagtaaatgtgcataactgctttccttaagatccttaatttattcaggactataacttaggtttacagtgtgcttggtaaaccttgcaagcctaaaattaatcctcaacaagtccaatgtgttcatttatgtctttttcagaatcaaagtagaagagtggtttttccttaatcttctccattatctcaagataactcactcccctagaattcagttgccctcttactttgagtgttggcttgctcatatcagaacttgccttctcttngccaagctagacttggtcaagagtgtggactgaaagctcgagcatagtaggctgaggagtcttttttaaaaaaggtcacagtatcaagatgttaagatcctgttggtaaagccccagtgtgccctggtaatgcaggagttcagtgtgagaatcctaacttctggccctccttagttgatgcagtaccaaatgtcatagaaagaaacctcctaagagtacaaggtcattctccaaatgaaaatgtcataggaaaggaatctttacttgatggaaagaatgctttctttctaaatggcaatctgtggcgccttctcaatcttgttccatccagcattacctgttctgtgttcagaccaatgggcatccgtatcagctgctccatcctgcagaagtaactttatcatggtaggacttgaactaaactgaaccaaagaaacctccctcagctgactgttcctggtacctaaggactgaattacccagcattatacacttacactacaaatgatcttcggcataagggccattagtcaataaaaattctcaaaataccttcaaaatgaaagattagattattttatataaaatatattttcttgtggacttattaattgcattactgatttctaatgatttcctttggtattttatttatataatttatttttttgaaatggagtttcgctcttgttgctgaggctggagtgcaatggcgcgatcctggctcactacaacctctgcctcccgggttcaagtgattctccttccttagcctcctgagtagctggaattataggcacgtgccaccacgcctggctaattttttgtatgtttagtagagacgsaatttcaccatgttggccaggctgstctcgaactcctgatctcaggtgatccacccgccttgacctcccaaagtgctgggattacaggagtgagccactgcacctggctagctcctttggtatgttaatttgctgtatatttgcttaactcatatgctcgctcacgtgttaacacatgtaatacatatgcttaattcagtgtgtttgatgttgaagagtgtgccattttcttgctttgctgactgaagagagtatgtggtgcttttctgttgaagaggtcagagaaccatgcctcttctctattctccaccctcctcttgagcccagagcggaggctgccagcatggcagagccccaccggtggcagagctggcgctgggctctgctcaccctgctccgtgttctctggctctgctgtgtgtttctaggggctttggggagatgtcccctgtctggttcatataagggctggctcttctcagcacagaaaccaaagctttgaatctcatctctggcaaactgttaggtcttcaaccccctatcccttatagacacttcactcattaagctcacttgggaccatcacctccggaaaaggaagaagtccccctcaacaaatggttggtcttgcctcctcaggacaggcagcaagrcttcctgagayctgtggcagcttcgtgtgtttctatcattgaggcagcaccatccctgtttgctattttaatttagcatcgtttgaaacagcgtctatttctcggccacgctcctgcttcacctttctctgatgaggatgctggtcacttgatctattctagttattgttatgtaatggggtccttgtgtatacttaggattttcatttcgttcatatagtacaagtgtctttttagcttggcataagccttcatctgcctttgcgaaggctgacagatcttctcgttcaacgtaagcagccccagatgtaaatgcctctgtggcagtcatttttctttggtccaggcccatccatgacaactgaactatttcccaagtaagtgtrtagatcagtatcgtatgtggtcagctctcaataatccacagtaagtaacagaaaatatgaataaattaattcactgtgctggctgagtgccactgagatgtcatcctcacattccctactagaacccacrctctgctcgccttggtggcagagtatggcttggctctcctttctcctactacaggctgtcgggaccctggcccttcagccccctgcgccccttgaagaatgtcagcttttcattgcagataatcacaagtctgctgaccttaatgtgccaagggccattcaaccacacagaaaaggtgtagaatatagtttcataagtgttgtaaatttcatccagaaagtacaggttctcattcatattcatgcatgcctgtttgctttccttttgagtaagtcctgtgttattgagaaaagaggaagggaaataatattattgctattagccgactatggtgttactgatgggggaaaattgaaacttgtaaaattatgtggggaatacttaatatttccacttttcccctttaatccagktgattgaaagttgacagcaaaccagttttaacataacacacctccttttgcactgtaaggattgagcagatcctgaataaccagagattgaaagccttggtcttagttcttcaaactgtcatccaacttaggtgaagacatagaaggctgcattatttgcaaaagtcctaaggatgattaatacgattactgtaatatatggcagaataaggattgaatatattttgatatgctacaaatcaaatacatattccatggaaatcagatttaactagtgtacataggagagcctacagttaaattaaaagaagaaaaagaggaagacaaagacgacttaataagccccaggaatgagagagtacgtttgtgtggagaagctgagggggttgcaggggaggtgagctcgcatggacctgtgtgtgatgtggttgctggggctgttgacctagtgtgggtttctcctgtgcaaacacagtgkcaagtggtgattctactctgctagttacatggcattgaaagtattttgcgtggtttattttaagcgggatattggcaatttagaaacactggactagggtgtctaggatatgaagagtctgaagaacatctttgaaatggaatagtgagagagactagggatatttggttggagagaacaagcctccaaagtgtctgagaatgatcatcaaatatctgaatgtttatctcatacacaaggggytttgtttattttatgttgctcaaaggagaataattagaaacagtgggttgaggttgtgagaaggcaatttggtttagatcagtatttctctcacattagggatgcaagatattttttttttcattttaaaaaacttgttattttgaaatagttttagacatacagaaaggttgcaaaaacatagtatagagttcatatacatccttcacttaagcttgttaatgatcttagtatagttagcatgccatgaaattaatgttggtgtagtactgttaactatagaccttattccattttaccagtttttcctctaatatcctttttctgttgcaagatctaacccaggatcccacattgcatttagttattgtgtttccttcctctcttccaatctgtgacactttgacagtcttttaggacctcgacacttagtgattattggttagttattttgttgtcccacattttcttatgattagagtcagggtgygcatttttggcatgagtactgcagaagtgatgttgtgccatcttggtacgttgtacggaggagggttcatggtattgtgtcccattactgctgttgttaaccttgtcacttgattacgatggttttatccacggtaaagttactatttttctctttacaattaatacnaatcttggggaagatagtttgaggctgtgcaaacatccagtttctccttaaacttttgcctcctaattttagcatctattattagatcttgcctgcaataatttttactgtggtatttacttaatgtatttccttctttccttttgcatttgttaattagaattcaactgtaaggaagtcctttcccttttcagctatktatttactcaattatttttgatatgggtagactaataggcatttactttattctgtggattatccagtgctgttttttatttattttattgcttaaatcattccagctttggccaacaggaagtccttcaggtgtatgcctttgtctttttgacatgccctcattttacaagaactttctaagtttttggcctatgaagtgtttgaggctcatcttgtattttccctactccttccctgaatcagctgcttcccatggagtccagattccttttaagggaaaatggtatttcgaaaccaatttctaggtgataagtgtaatcttgctactaggatgccactgtccttagtggacacagctaggatatatatatgtatgtgtgtgtgtgtgtgtgtgtatcacctgcacacacagtaactcacacatacatatctttatatatttctatatctctgtctggatatgtatyaaaaattctaatgcaacaccactgggttcattgtagcctctcccttttctgtatttgtagcttatttcttaaacagtgagaaactttgctcttgttatttacagtgtatttacttatttatccaatgccaataaagtaatttcaaaaattgctaaccctgtaataaacacatttactagctagagtacaggatttctatacagtgctttttgtcgtctttatttagcgtttgagtttctagtcaaaatagtttttttttctttttgagatggagtctygctctgttgcacaggttggagtgcagtggtgcaatcttggctcactgcaacctccacctcccgtgttcaagtgattctcctgcctcagcctcccaagtagctgggactacaggtgcctgccaccacgcctggctaattttttttttgtatttttagtagagatggggttttaccatattggccaggctagtctcaaattcctgaccttgtgatctgcccaccttggcctcccaaagtgctgggattgcaggcatgagccaccatgcctggcccaaaatagtatttttaaaagttatttggggtagttcttttcagtgtggctatgttacttatttgtaatgtagttaggttcattatttttgtattccacttgggttcctctccccctatgtcttggtttacttmcatttttccctcactttttggcatgtgaaatgttactctggtgctttaatgcagagctctacactccctcttcatttctgttcccatgccaccctgttccccagccctttcctatccactctctgtaggaaagcagtctctttcatttctcaaatatccttcctgtatttcttttgcagaaatgagcagatagtgtccattttcttataaccccttctttcttacacaaaggatagcatattatagatactcttttgcactttgttgttttcacttaacaatgtattctggaaatcactctagaccagttcatggaaatcttcctcttccttttctcagttgcctagtacttcgttgcttggatgtaccatagtttatccaaccactctccagtgtaggggcatttaggttgtttccaatatattgcactattgaataactgtgcaaatgtgcttttttcccatatcgttggaggtgtatgttttgggtagattctagagttgtaattgctgggttaaaaaatgtgcatatagctttgtattgccaaatttccctgcaagaatttgcattctcaccagcaaagcaggaggtgcctgttttcctgcagcctcaccaacaggggctacaccacattctacaatttttgccattctgatgataaatgatatcttgatgttgacttaatttgtatttctttaaatatgagtgcatttgaacactttttttcatgtttgaggaccattttaatagcttttttaaattgtttatgtcttttctccatttatctttcaggtttttggtccttttttgctcagcttttgtaacagtttcttatattcaggttattcaccctttttctgtggtatatattgcaaacatttttcttccccttttatcagttatcttttgatgttgtttaggatttttttgtttgtttggccttacagaagtttttattttcatatagtcaaacttgtcaatcttgattttattgcctctgtattttgaatcatagttagaaaatctttccctacaccaagattagagaattcacttgtattttctcctaggaattgcatagttctttataattagatcttttgcattcaggtccctaatgcatctggtttggttttgtatgtggttgtattagtctgttttcacgctgctgataaagacatactggagactgggtaatttataaagaaaaagaagtttaatggactcaaagttctgtgtgcctggggaggcctcacaatcattgcagaaggtgaaaggcacgtcttacgtggcagcaggcatgagagagaatgagaaccaagcaaaagggaagccccttataaaacatcagatctcgtgagacttattcactaacacgaggaccgtgtaggggaaccgcccccatgattcaattatcccccactgggtccctcccacaacaygtgggaattataggagctacaattcaagatgagattggtagggacacagccaaaccatgtcatggtgtgaggtgcagatctaaatttcttttctccaaatggctccaagttgtcctgggaccgtatattaaaaagtccatcctgctgggcacagtggctcatacctataatcccagcactttgggaagccaagaagggaggattgcttgaggccaggagtgtgagaccagcctggtcaacatagtgagacctcatctctaaaaaaaaaaagaagatyatatatgtatgtataaaaagtccatccttatcacagtgatttgaagccaaactttcatatatattttgatttatatctggacttttaatgctaccacactggtctgtttgtctccttgtgtgccactgtgtttaattatggagtgtctatggtttgttttcgtgtccaggagttgttttattttttccttcagggttttcctggctcttcttgcatatttgtttttcattgtgaccgttagtatcaactagtataactgtataaaatagtttactgggatttttactgggattatattgaatttacaaattaatttttagggagaactgtcatctttataatgttgggttatcctatccaagagttggggatgtcttttctcttgttcatatctactttagtgtctttcaagaatgccttacattctccttgtatagattttgtgcaattcttgttaaatttgttcctagatatttaatccttgttgcaattattttaaatggcgttttctctgattattattttgtatttgaaagctattgatttttgtatgttaattctgtgttagtgaattcttttattgtttgagttaattttattattgattctctgggggtttccagatatatatatatatggttttcaactgcaaatagaagtggttttactactttacccctttttataatgctgattgatttctctcgtctcaatatattgggtaatacctctcatacagtgttgaacagaaatggagacagtgagcatctttgccctgtcctgatagtagtagaaatgctattagtttttcccccatttagtaatgaattaaggaatgtgtattttattaatttaacagtataaccctcaattcctgttttctttaacttttatcgtaaataggttttaaattttgttaaaggatttttcagaatctatggaggtcatcacactacttccttatgtttattaatatagtacattatatagtttcctaatatttcgaatatcttagacctcatttcatatttttacatcgataccgagcaactgattggtgtgtagttgtattttcttgtactttctgtctggcttatcagtgttacatttgcttgataaaaggagatagtgtgctagaatcttcttcatagagcattggcattacctggcctttgaaggtttgggagaattctcctgggaaaccgtctggtccttgggcttgtgggtagttacttaataactctttctgtttcttctgggaaatcatcagtttaagctttctaactctaatgggatcagttttggtaatcagactatccttaggaagttatcagttacatctacatttttcaaattcatttgcatagaggtctgtgaaatattcccttaagatttttataatttcttgtttcattggttatttcccctgtgtcctttcttattttctatttttgtattcactcctcctttttcttgagtaacttaactagtggtttatctacttttttccctccaaaaaccaggatttatatttgtacattagatctactgtttttctattctctacctcattaattttatcttatatattcttttttctcattaattttagctttttcctttattttttctttgtgttttcttttgttttgctttcttgttcttttcctagtttttatgagctgggaattattattgktattatttattttttgagacagtctcactctgttacccagggtggagtgcagtggcatgatgtcagctcacttcagcctcagccttatgggctcaatcttcctacctcagcctcctgagtagctgggactacaggtgcaccaccatgcctggctaatttttatattttttggtagagacagggtaccatattgcccaggttggtctcaaactcctggcctcaagcgatctgcctgccttagcctcccaaagtgctgggattacaggtgtgagccaccgtgcctggctgggaattattaattaattttcattctttcatttttattgataaaagtgtcaatgcaatgaatttttctctgattactgctttaaatgtatttcatggattctgatatgtagtgttttcattgtaatttttttttaaattctttcctctcagttggtgacctaagaaataataagactcttaaatttccaggtggaagtgcctttctgtttttttgtttttgttaataattgatagtttattgcattataatcagaaagtattggctacatttctaccctatagaaatcattgttttttcctttaatgccatcagttgtaactgtgctgtgagttcttgagaggaatgtgtatactctattatcagggtacagagttcaatatatatgtccataaggtcaaccttggttgattatgttgtttaaatctatctccttacttgttttctgtgtacttgctctgccttgtactgagaatggtgtatgaaacctcctgttattagtatgtttctaaccgtgtttgctcacatctcctgtagtctttgtttgataaaggttatggttgtattattcggctcataggtgttcatgagcattatgtcttcactgtgaactgtggcttttagcattaaaaaaaaagtccttggttgtatttaacactttgggcttatgttctatgtgatctgctcctgctctctttttgtttttatttctctattataccttggtccatcctttttatttttagcctttcagaatcacttgattttaagtacatctgtatagttgggtcttgttcttttaaaattttggatgtagaaggatttgtattttctagtgattatttgtatttaaaccgatttaatatccttaggtcccctgttttattatttaaccctttattgtctgattctcagttttttcagcatcagttaatactcacctattgcttatatgataatgaactatacagtaatgagaattctcctctcttccttttccctcatctcccatttttaatgcatcatttctagtctgtcataaggtttctatattgtgtagatgcattaagtgaaaaagtccattaataatatattaaataatagtagtatggataataaacacattttgcaaaagtgataaaggtggtttgcaagtgactgcagaggttggggagatgccagtgtaccatgaagtgtgttctgacatcagggctgtccagcagcggggcctcttgggctggctgccagggytcctggggtggatttctcgccctgggccagggtggcctccatgactgtttacagaggtcctcctgcctctgaaactctgtgtcagttacaacattgttaccctaaaaatacacaaagtcttgggactttcaaactgagtactttttttctttagcattacaggattccttttgtaattattttctttagttcacatagtagtaaaaaccaaatgctaactttcccaaaggttatcagttatggactgtgtatgcaacctttgtaaataaaattaatttgctcttcagtgccagtgagacacagaagtagtcacatgtgaattattcatattgtattaagaaagtatgtaacttgatactaagcaaaagcatataactagtttcttgaacaaaatttataggttttscacattttcaayatcaataaaccagtcaccataktttattacaagagtttcagccaaaattatttgaaatgactrttttaaatgtataaagctaagtaaatatcaggcaatgcawgaaataatgaggttaaatgtaatggatgattgttattctgaaaagataaagtttaaagtcatctcctcaaatgccctataaagttttccagctccacaggggtctgtatttgcagctgaagttttctgaaagcaaattcaattagagtgttgtgtgctttatgagaccatctaaagtaaaattttgtttgtttcagaaacgggtatgcaggagattagaagccagtgggcatgagygtggctgccaccaggtgamtgcctgtgccctggcrtcctggggcccagaggaccgggagcttccatcaagaggctgcctcccagcaccaaggccagagagtggccaggggaggctaagtacaggggtatgttcctcttcccaccaaactacttgtgagcatgttgaaatattttaatagaaagtgtaaataatcattgttctgatatatctgcaactgtgatttgttaactagatttctcagaatggtggaaggagctcagcccagccttgcccaagatgtattgcaggggaatctgtaagtgcattaaccttcttgctgtgacataaaagatagacttcttcttaaatattagatccataaaacaaagttaataaaaactgcaattatgtttctgaagaatgaggaacataaataaaaaggtgaaaattgatttaagcttttcttagcattctatcggtgtacaaactaatttgtgtccagcttcagattggaaatataaattgcaaatacatttaaaattccttctaaaaaacagggtttaggaaagggaccaggccactggatttggttaaaatagagaatyatttaaggacatcttggagaaaagatctttctcatttaattttccaaatagcaatcaacattgcttttttcttttccctgtttatgcttttcttgcatgtttctatcataaacttcacataaatcacagatttcagaagcaaacacagtgttyacaccattaattcaaagtaaagggaggtcagaaactgccagagtcagattctcagtctcttctactgggcagaatatcataaagtatatattagcataataatacctttgttattaattttgaacttactccaagaacaagttaatatgtctttgataacctctataattcttgggtttctttaattttacatttggaatcttaatattgcaataaaatagaattatatttaaattccacctagaaaccaggaatttgtgcgtgtgtatatgtgtatttctgagattgccccctaaagatctttagagaaatgtattgctgtttttgataagcaaaagattgagtcaataaattatggagatcctcaattgacatactgtaagctactgtgttttacgatgataagcactgattttgtttcaaacggagacctgaaaccatgacagccatcaccgtgtctgatgacagggtgaacctctaattatctgaagtccttagacaaataggaaaacaaagtttagtatgtaactcattccatgaaggtatactttgctactttttgtactctctttagaaaaattttcataggttatgttgcattctatggtgtaattctgaacaatgttgaaattaaagatccagcaacttgaatttagtatgcttatgttgattcatgtaactgttaaacataccctagaatacaaacgaataatgcttactttgagaactatgcctccattggggttgcattccttgtttgccgatgactgaccggtgccttctttgtccccaccccatttccatggaatgtatctttcacatccccccatctgttggaagcaaacacttggaatgtagtacagattcttactgctttgagagcttgtgttctggcatgaatggcttaaagaaaaaaaaaatttagttcaagcaactgattggatcattttggctaatattctgtttgaacaacagtacctatttgattagggtttttcctttctttgtaattccccaagcttgcctctgttatgtttcgtaggaaatgaatctatgagcagaaaaccttcattgatatgtaaatatcatttttttgttaatactcaatattcttttcatctaaatttcagaaactgactttaaaaaatcagtttccttttatttgtagttattctcaataaaatttcacccaggcttgggcgttttaatatttacacccactacttctgmaagtctaatgtaaataaagattgaaatgtgaatttgaaaagtcacacctcttgatatttgaacagactatagctgcatatatcttcttcttctaataatatggctagtttctctcctaagcttttaaaataataagacactatttttgtattataaaacatcaaaaggttcagtgttaaataaaaagcaaatagtatttttagagatgcaagatccctgggagtcgtgcttaacaataaatcaccaatggggcacaattccaaatttcagaagactttattaaacttgcagttccattcacaaatgcctgcttacacgtgggcctgcccactctcccatgatgcccgtaggcagctcagaatggttctcttggtcagagagaagccaaggtgatgtgaggggtagtttgtgtggmattcctaatgggaaacttacatgtgattctcagtttatttggtggctgttctccagtaagctcccttgcatcctgaattctctagtgtatttttgaccttcgtaggatgtcagctaatctgatctgttctgctctgaattctcagtatagccgtctgagcttggtggtccttctgttcctaagcttttccttatgtttatgattgagttgtttctcacacatacagggttttgacattttctcatatgcaaggacttcctcggtagacctcttcaacctcattttccaagtttgcatttcggtctatttctgttgactcattctggcgtattgtaaccattgttacaatggttactatttcaggagtgactgaggtggtttcttatagtaattactgttagggtttatctcctgctgtacattattatttaggaccgtcacctcgtagccctgaatcaccctgctcatgttactgatgatcgaaatgaatgtggtgggacccagtcttgcagcatcagggcgtccgctcctgcccagggtcgggctgcttgctctccctgtcatgtgctgtctggggctgcaagtctcgtagaggatgatcgccatggctaggaggcttcctttcctgccaccaatggctcccatgctggacagtcacctaggctgcaggcttccattcccggatcgcgcggcttgcgtgtgcacaggccacacggtaaccaagtgtgaaatggaaatgaagctgctccttgcaaattcagagcaattaaatgaaaccttaggggtctgccagaggtctccaaaataatcaaaagaaggtacatgaaaaggggaggaaggcttataaggcagagaactgtagaaaggatttaggatattggttgaggggagatatgatgatatttcctcagcaccgtgttttcctagtggtctctggtctctgacgttttgtagcctctcagtgctggaatcctctggagaaggggccaccctcagatcttactgggtcactggtcagcctgttgcctgtttttttctcagctccgacctcctttgtctgcccctcctctgtgttgtggagactgtttcccagactcctttgcttctgacttctgggagaatccagccaacgtgaggcattggtgggacacaggaatgtgggggagaaggaggaggaggccagagcatttctctctctctctagccctcccgcagtacatagctcctgcagagtagtccctctgggcccatctcttgcgagktccacctcctcctccctttgtcctcctggtgagtgtttggctcctgtagtagtccattttcacatcgctataaagaactacctggtgcctgtaattccagcttgggagaatgaggcaggaaaatcgcttgaacctgggaggtggaggttgcattgagccaagattgcgccattgcactccagcctgagtgacagaatgagactccatcatttccaaaaaaaaaaamaaacaaacaaacaaaaaacacacacatacacacacaaaaactacctgagactggataatttataaagaaaagagatctagttgactcacagttccacaggctgtacaggaagcatggctgggaggcctcaggaaacttacaatcctggtggaaggtgaaggggaagcaagcatgccttaccatggcagcaggagagagagagagcgccagaggggaagtgctatgcactttcaaacaaccagatctcatgagaactcactatcacgagaacagcaaggggaagtccgcccccatgatccagtcacctcccaccagctcccttccaacatgtgtggagtataattccagatgagatttgggtggggacacagagccgaaccatatcagctcccccgtttggcttctcatctcttccatcatttgtgtagccaaatcttgttacagtccctctgtttgaaatatacctagattggtttctgttttcttaccagcgctaatcagctaatgaatggacagattctcctggggaggaaagttgctgtttctaacagaggtctccgggcctgtattgtcccctgcaagggctcagtcagtagtccgcaagcttggcactccagagtgctggcagggctgatcctggtgataagccacatgagtcccgagagcctggacatgaaagttaaaaatacagtcaggcccttcaatgttgcccatcgctaatgctccttcgctgccttttatctgtggttattggtttttattactcaaacgggtagggagttaccactgaaaagccagcatgcaaaacatggtgtttcctggtgccatggagtctccgctccccacgttgattctggataccagcattgtcattagccttatctttttttcttttttttttcattgagggcaaatagcaaaggagcagtcttaataagcctccgtattattcactttttgacattgaaatctattgcctgacaacatttgtgtgtgtggtatatatggtgtgtgtgcatgtgtgtgtctgtgtacatatgtagtgtgtgtgcatgtctgtgtgtgtggagtcagccaacgtaggagtagaaattgagggcaggggaagggaggtgtttggtccaaacctattgttttggttcagttttcccttgtagggacaccaggaggagccaaagtatgattattctgattctaaatggatgcattttttctttgtatttctttttatctccaaatgggttacctttaaagtatttctgtttattttgtttacatatttgtacattattggtcattgctttctacacctacatcatctataaatactgcactagaacaggaagccttggaacccagtgatctctgccctcctctggtgcctgcagtgacggctgagaacactgcctgtgcttgctagggcgggtccgagtgtcaagctggggacgggaccaaagatggaaatgtaacgttctgatatcgatgaacagagatcgatgcgcagtgccctgctctttgtgtcctgtctcggccacagctgatagcaagcatccttgtcagttctttcttcttctgtcctgagagaagaaaacacaatcatggagggatcaacgggaacttcattgatcattctgtaagaatcaagttgtgctccatgcatttctacccccaggtttgtcaaggatcctggagttcattggtctaaccctgtcaatttacagataaggaaagtgaggtccccaggggctaagccattggactgccatgcaccgtggttgatggggaggcaggggcctgagcactctgcttggagccccctctgctttctgctctttttggctgatcagtgtgtttgcagtcagcatgccggcatcactccccaagactggcggcccagcgtcaggctcgaacaccctatgagaactgtggcagtgacagtgcgggtttttgtggacttcatccccggacacagtgagaagctcttggctaagayacagggctgatttactcacactgtgagggaataagctgggaatggaagagtctggctgtgtcagtatagccaaatacgaatcccagaatagatgggtatgaatagaccactgacaaaatcttcagatttagcatctagcagtagctgacagtgagtactttctctggaatatggatattgaaaaactacctttaaaaaaatttttaactgttatttaggtcattttctggcactgaaggagctgaggggcttcagatgactagaagaaaaaagaaacaagttcaatttagacttcctacaaacatgttagataaaaccaacacagatgtgtccccctcctgctgcagagactcaaggtagactctgataaaaaaaaaacacacagctgatcaygtaataggcgaagagagaaaacaaaagtagtgccgttgggaccaacacactctttagtggccgttcctgggtctgggtacttgttgggtttggtcctagattgcacccagggctgggaactggaatgctsacgtccagagatagatgtggttttggcctaacaaaggtgtgggagctagaatttggatccttgcataaagtttagagcctgaagatctgattgtaccctaaaaggggactggaaattacaataccaggccatgcatgggtatgggctccaagtttattttatctcagtcatacaggaaccaaaagtagaagccctgccataaaaacagttgcagcccattgaagtcctgaaggccttgggtggcagcaggtgcagaactgtcctgtaggcatgcctccaccacccagtgtgtaggagatttggagataaaacaacccccacggaggataagatcacactagaaaaataagcacataaacaaatctaccaccatggtgagaagaggggtcaagaaataaacagtagaatcaaagtctctaacaatctgaaataattgaagaacctgaaggtggatataaagtacgggcacaactcattttattgcacttcactttattgtgctttgaaggtactgtggtttttacacattgaagatttgtggcaaccttgcattgaacaagtctgtttggtgccattgtcccaaaagcatatcctcatctcatgcttctgtgtcagcattttaaaacaacaaagtatttttaaattaaggtgtgtacatatttttaggcagaatgttgttgcacacttaatagactacaagcatattgtaaacaaaacttgtatatgcactgagaaaccaaaaaatttgtgtgactcactttattgcagtgttctgcaaccaagcctgccatgtctctgaagtatcctgtagttattttataaaatgattaaagaagaaatagagccatagtaagaaaggaagacagtttgaaaaaaaattggaaggtttttttaaaaagaactaaaagtgcatgatatgttcattgaagtttttttaaaaagtcatcagattagacacagttaaagacagaattagtgaattagaagatagagctggataaatcccccaagcacagcaagagagataaaaagatggatagtataaaagtgtaattaggagtcatagaggaaagaatgagaatgcccattaggaaatccagaaggaaggactttagagaatgtttgagtagaatagttgaaaagataatggctgagaattttccagaattgaagaaaggcatatgtggtcaaacaattttgaagtagaataacaagcaagggaaattatccatcagatatcaagatatattacaaagctgtgaccattaagacaatgtgttaattggcctaagtgtagactaaccaatgaaataaaattgagatctttaaacatgcatatatggcagtttgaaggcattataaatgagatttacatacacctataaattgtgccagggcaattagttatccatatatgaggaaagataaaattasatctctgcctcacacaaaatcaattctaggaggtgggaggtgggggtgggagttaataagaacctatatatgaaagaaaaacctttaacattgttagtagaaaatatagaatatgacggccaggcgcggtggctcatgcctataatcccagcactttgggaggccaaggtgggcagatcacctgaggttgggagttcaagaccagcctgaccaacatggagaaactgcatctctactgcaaataaaaaattagccaggcatggtgcatgcctgtagtcccagctactcgggaggctgaggcaggagaatctcttgaatccaggaggcagaggttgcggtgagccgagattgtgccattgcactccagcctgggcaacaagagtgaaactgtgtctcaaaaaaaatatatagaatataactgyatatattaagacatgctacatatcagaattctttcatcattgtctaagaaaagctttttgcaggaaagatatttacaatgcacaaaatataaagatgggtttcttgaataaatatgcaaatcagtccagtaaataaatgggcaaagtatatgacctggcagttcagagaagaggaaacccaaaatagccartaaatataaataggtgttcaaccttactagtaatttaagggcttgcaaattaaaccatcaaattagcaaaaataaaaatggtgctataactgtgagtgaggtagagtgaaaggatgtgttcacttcctcagaagccatgtacatgggtaaagcttatggtgggcatttctggtaagctagaagatatggtcctaggtgtataccctagtagatgcccaagaaagtgtatacaaaatatttgttgtatttgggaggctgaggcaggcagatcacttaaggtcaggagtttgagaccagcctggccaatatggtgaaacctcatctctactaaaaatacaaaaaacattagctaggcatggtggcgcatgcctgtagtcccagctactcaggaggctgaggcaagagaatcacttgagcctgtgaggtggaagttgcagtgagccaagatcccaccactgcactccagcctgggtgacggagcaagactctgtctcaaaacaaaacaaaacaaaatatttgttgttgcactgttagagtaagaaaagccagaaacaacctaaatgttcatcaatagaatgaataaatgaattgcaatagatttactcaatgaartgttacagagagcagtgaaaatggatcaaatcaaatggagaaaaaaggaaattacagaaggatctacgtagaatgatactatctagatacaattttaagcatgggaaacattgatatatatctactaaaggaataaaaacatttatgagagtggtaaacaacttcaaaataagggcgttatttctactgagtggaagggctcagggtgcagtgttttggtgatatctaatgttttatcccctaagttttgtgagtcttgggygtgatgtatccacacatagataggtcatcatgacactggaggacatcaaaggcagagaaacgtgtagagctgctagagagaaatgactggctaagcatgaagggatgataatttgacaacagatctctcattagtagcaatagatgccagaagagcttggaatgcatctttgagctgctaaggggactgcactgtgacgtgcatgtggacaggctgcaccaggtccgggggtgcgatggccactgcagtggggttcctctccccaccccagaaaattcagttaccaaaactgactcaagaacagagaacagaatcagatcagtaacaatggaaggatctgggaaggttatcaaaaagctcccatcacagggattttacagattttaaaaaccctgtatgaaagaacacatggatgatttaacattagaaaaatgactgcattgtctgatmaaagggaaaatagagatcatctgttacatgcagcaacagcatacagtcagatgcgaatcccattcatgatatatatttaaaaactccacaaaccagaaatagaaggctttcttctggtaaaaattaaggacgtgatacttagtggaagcatctgtgttgaagagaaaaggacgaggatgctattagcacttctgctcggtatgctagggctcctagctggcataatgtgataagaaaaaaaaaagaaacaatggacataagaattggaaagagaaaaatctaaattgttatttccagatggtataattatctacatagaatatccaaggctgaccacagtgactcatgcttataatcccagcactttgggaggctgagacaggaggattgcctgagcccagtagttggaggctgcagtgagctatgattatgccactgtactccatcccaggcagcagggtgagaccccatctcttaaaaaaaaattttccagaaaatctgcagatagactagtagaactaatatccagcaagattgttgaatataagatgaacacacaaaaatagatagactcttacttactggtaacagtcaattagaagaacaaaactccattcacatggttgcagygtgaggatgtaagttactatctagtgttctgtatttcatcagcatttcttgtaaggcaagtcttctagcgacagattttctgtttttgtttatctggggatgtcttaatttctctatcattataatttcaatgtcgtttggttttgttggatattgaggaaaggcatatgtggccacatggttttgaagtagagtaacaggtgctgacagtctttcttctggcacttggagtatgtcatctsgctgcctctcactccatgatgtctgatgagaaatcagctgttggtatcactgaggctcacttgcacatagtatgtcgcttctccctttctgtgttcaagattctttggttctagatcactttgttatgatgtgtttaggtgtggatccctttgggttcatgctagtggaagttaattgagtttcttgtatatatagattaatgttttcaaatcaaatctgcgaagtctttggccattattttaaaaatactctttctgccctttctctgtgtccttttcctctgagactcccgcttagaggtgtgttgggacacctgatggagctgcacaggtgtcttcgaagctctgttcatttttcttcgctttttttttcctgttcctcaaactggataatctcaattgattttgtgttcactagttctttcttctgcttgctcaaatctgctgttgatccccgttaatgagtttttaatttcacttatacttctaaactgtagaactgtagaacttctgtttagtttatatgtataaaattctctctttattgataattatctatttggtgagacatcattctgcttttctttaattcttaatcataatcttcttttttttttttttttttttgagatggagttttgctctcgttgcccacgctggagtgcaatggcatgatctcagctcactgcaacctccgcttcccaggttcaagcgattctcctgcctcagccacccaagtagttgggattacaggtgtgtgccaccatgcctggcgacttttgtattttcagtagagatggggtttcaccttgttgatcaggctggtctcaaactcctgacctcaagtgatccacccacctcggcctcccaaagtgctgggattacaggcgagagccaccgtgcccggccatgaccttctttagttctttgaccatatttaaaatggctgaggtgaagtctctggtaagttcatgtctgggctttgtgttctgtttgcccttccaggtcagatccactgcccacctttcctggcatctgcacaggaggccagcctgcatggcttacatccagggggtgccgrgggcacctgggctctcccacttccctttgggctcagccgctagggggatttggggcaggcaacaggaggctggagaacgagggcagggtatgtggccatgtcccctggccagtgtcactcagcagcatgtgtcatctcctccttccaggttctggtagccgctgctgccctttatcccttgggtctggcccctgcactgtccctcgcggctcccaggacaactttgtgacaaatccttttgtaataacccctttgtgaggtctcctgttcgcccatgtatctgtttcctgttggggctatgactggtacagaagggtgcacgcccactttcaagtgttgacgcctccaagaaggaagggaggaagatgaggcaagggtgtgacaggtgtccctcggcacagggcacagcaggtgctctaaagacatttcatcatacaaagatgcatgctggtaaagacggatgattgtcttagaggtccaagcttttactgtaggcctttgtagaattctcttgagaagggacagtgttttgtggtagtaaagacgaatatgctgttaaaggaagaaaaaatgactcctctggcagatggtaatggcaggaatcgtcaacatctttaacccacagagggctgctgtcatcctgtcacacaggtactcggggagaagcagagagctagccacagccagggctctgcccattaaggaaaaatggcttcagcaaaaagggaaggagatgtggggtgcagttctctcctcccccagtccacagggatgacttgcagctagatgtaccagaggtgagggcatcaatctgggtgtttcacrtaatggtcccagatggagtgaggtgtgtccctgttggccctgctgtccttccggctccacagagaggtcatggagagcccagcgaggaaggcttccaaaaaggaaagggggacgttttgagggagttcatgcgtggtggcaaaccccacaaagaagccgttgcagtgagagatgaaagaagggctgaggccacacacgtgtgccccaagggtgtggaggagaaggcgctgggcagcaggtgcaaccagaagcagctggccctgggcccttttcatyccaaggttagaagcaaataaaaactccctcttcacaaacatcgttctcttgctccgtggaattgtgttttaccaaaagtggaaaagggttttcccattattgctgatcaaatcacttttcaagcctgaccaaacaggaggcaaggcattttaattgtctgcagtaagactcacagtcgaggcacaatgagcctgatgctcctcgtcagacctgcctctggtggctggtgtgggccatctgtgagtcccagagtctgatgacttgaggtcccactggcccagccccagtctagattggggtcagtacgaggcttctctttgggtgtcactgggggctgcttgctttgagagagacagagacaaactgggacgtgtcaagaagagagagtaggatgatgcggggacttgagatcatgccagggcagaggtttaaatgagcaatttcgaaaggttcctttgtgtctaagagagagtagaatggtgcgggggcttgagatcacaccggggcaaaaggtctaaagagcaatttctaaaggttcctttgtgtctaagattctgggtcttggccagctgcgttggttcacacctataatcccaagactttgggaggctaaggcgagtggatcgcctgaggccaggagttctagaccagcctggacaacatgatgaaaccctgtctctaccaaaaaaaaaaaaaaaaaaattagccaggtgtggcggcaagcacctgcagtcccagctactcaggaggctgagatgagaggatctcttgagcctaggaggctgaggctgcagtgagccatcattgtgacactgcactccagcctgggtgacagagccagaccctgtctcaaaaaaaaaaaaaaaaaaaaaaatccaggtctcagtcctcaaattgatgtggctctttgtccccacgttttatcctttctgtctcaaacatgtcttccaggtatacccctccttgaacagagcagggaaggatgcgtcaggaataagtcacctcagtgaatagctktttttaaaaaagaaatcattgtgtttttcaagttctgtggttggtgatgacgaaatgaattaaacagcatttccctgcagttcccctgtctcttcyctaagagacgcctgctgcctcctgggtctgcgcaccccacggcacctccaagtgagcctcccaggcttccactgactctgccccttcagtgcacagcccagagccgtgatttgccagctgggctcctgcgttcagagtctcccaacagaacaggttcttgtccagagaagttcaggaaatgctacatactttcccctgccttttagagacttgatgtccattagactgtgaaagacctcgagaattgcatgaagaaactkgtttccaaaatgtccttttgtaaagggatacctgctacacatgtgattctgggaatattctgggaagcgcaggcctgttgagtaaatgcagcacctgtattcaccatggcatccagggcccttcaaatctcagtgttgcttgacctcccagacagctgctcccatccctgccatgtgcgccacaagcccctgctccagccgccacagcttctccgatcctggaacagtctgaccttgtactgtkcttactgcttgaggtataccttcccacctccaaagattctcttgctccttcgtggcccacccgagattcctgtcttgtgtgaagccttcttcargcccctcaccaggtagggtcacgtgctgtcttccctggctcctgtagcatttcgttctgatcactcgaaggagccatcagtatctgacgtcagtactctgctgtctgataatccctccaggcaagttcagagtctctcctgtctggtccctgtgggtcagggcagcccctgccttccaggaagcagggacatcatcaagaactggacttctttgtttccccactgcccagcctaccccacccttcctgggctgcagccagctcaggagcctgttgccctgatggtggagtcctttcaggacagggaggctgtgcctgtctctgcctgtgggccagagtgccacgctgctatgtgccaggatatgtggccaagtgtgacagagattcctagatgctgacgagcctctcattgcacagtggtacrgtgtctggccaactgtctatccccagccatctggttctcccagttacttctgcgggtgaaggtgaggagatgagaggcctgctctaggaaatgggttgggggccggaggggccctggyggggattgccgtgagcctctcttactcccggatgtccctggtgagaggagccacttttgtgttgcttttgtgctgaatcctgattcaatatttagacatttttttaaaaatttattttatgaatatatgaatagtattttcattctcttgctattcctcaaagtactataggaaagaagggaagtaacatttattgaaagtcttctgtgtaccagycactactggaaatgctttaaatatcttaattataatgtaatatatattaatatatctatraacagatacctcaggaattaagttatcacttacaagtagtcattttaaatgtagtgctttgtgttggcaaatgtatatatagccaaggtgtattaatttggccaaggtaaattaattcccgcaatgtgctgttttatctttgtagggacattttagccataccaagaatcattagaagatgcaagctggaaaaaagaaggtcccagttttggttttgaacccttcatgttgcagcaaatgtgaatctcctacagatgggtttggggacttacctgttcaaatagcagcccggtgtcctctgtgggtggggggaggtttgtctgtcctttcattctagtaaatccaccatcctctgcacgagagccaggagaatccacatcacttcaaaagagcccccaaatccttactacgtactacagcctcctttcgaatgttcctggttgagagggagatcaattgcattatttacaagtcaaaaaattttgtatcaaacttcctatgagcttgggcactcatggcctatggaggcccacccagacgcagccccgccatcatgctttttcgttgttttgtggatgtacccagggctatttacacactctttcattaaaaggcttatttttatatttaaaatgttctaatcttggagtgaattttactaaatgctagtgtccaatctgttccccaactgaagttatcagagacagaatcccttttatattcaagtggaaattactcattttctcttgggttttcaatgtatcgtctgactgtgaggctggcattattttctctgggtttgaaagcttcctgagatgtcctgtttgtaagctcctgtccgcatcacgttatctgcagggaatgtgctccctccagggagtgtcctcggcactgatgtgggaagagccccctctataagtcatcatggcattcggtcatgggagagttccatacgggaaagatggagcagaggaagacaaggtgttgaaaccagtacagcaccacctgggatatggatgatccagaattacaggacacgtcttcattaagcctgggtaagatcccagagctatgactcgatcaaaaaatgccagttcgtgccaaacaaccaaagccgggaaagagggagaaggtattggcgtttgtagccttacgaaagatctttatgaagagctttagtttgttcttctcttttccaaaatgagatacacgtctaatttttacgggaaaaaaagaaaactcttagatggacagcatgttcttttttgtgtgtaaactcttccttctcaccctcgttcatggagagagcaggtgtccacccggtgtcaggtgggtgttttgtagctgacgtggcacgcgtccctccagctgttcatacgaagctggcttttgtagagaacagtccccgggcatcctcctgccccaaggaaaatgcccccgcttcagagtcagacagacgtgagttcccatctcatctccaccgaccatctccacctgaccttgatgagtccttagacttcttggagcctctggttcccatctgtgtggtggggaggtcgcccttggggtttgcccttagcccacagtgtgactcctcagtgtcagtgccctccctcctggtacacagcccctccaccccaaagcaggccttcggttctggaaaagcaaagctcacaaaacctgatgacccaggtgacaaggacgaaagggatgaggtgtaactggccagaatgtgggtgtattagggttctctagagggacagaataggataagtgtatatgtgaaggggagtttattaaggagtattgacttgcatgatcacaaggtgaggtcccacaataggccgtctgcaagctgaggagcaaggaaggcagcctgagtcccaaaacctcaaaagtagagaagtcgatagtgcatccttcagtctgtggctgaaggcccaacagcccttgcaaaccactggtgtaagtccaagagtccaaaagctgaagaacttggagttcgatgttcaagggcaggaagcatccagcacgggagaaagaggaagcctggaagactcagccagtctagtctttccacattctcctgcttgcattattctggccaagctggcagctgattagatggtacccacccagattgagggtgagtccgcctctcccagtccactgactcaactgtgaatctcctttggcaacaccctcacagacacacccaggatcaatacttggcatccttcaatcaagttgacacttgatattaaccaccacagtggagaaccagcagctttatccaggtgctggattttccagactgtgaagggaatggaggagcttgtgactgggtacctaaaaagggggatggcaacattttcttggtgttttcagccattttagtacaggccatgaaatagaaggctcagaaattccagattttcctaggtgtggtccacacctcagtcccatcctactctggcctcgtgtgaacagaggtcctgcccgtggccttgttgtcccctggcagccgccctccacccaccccctgacttgctgtcacagctgccctggcatccatcctggccttcagccccacctccctggctccagagtcatccctggccacaggacggtctctgctctccagcccaacccgcctcctgctgggattacctggaggagctcaccccgtgcagaactgtttctccctggcaaattaatttgtcagcaccacaggtactaaaacagattagctaataggcaaaacctgcatagatttcactaaactgggtcttgatgcacccatgatgagcgtgaaatgggattatccctttaaagtgcttcatctttgtattcttgtcaaaagaggaggaaaaagacattttcttacaccctgaggaaacagactgggcattgatgtgtctgtatgtccattagataaattttcaatttgttctttaattataatctgttattgcttttggggggatataggggctaaaaatgtcaaaacgtacctttaataatttcacaaagtaagtttgtaatggtttctaaaccaacaacttacgaaactcattttagaacattcaaaagcatggtaagtggttaacaaagatgtgttaacatcatttgacatgtttttcctccttcaaaaatatagtttatttccaaatttgtttttaaaacaaaaagtatacttgaaatccatacttattaaagaaaaaaatttttaattataaattttagataaacatgaaactaagtcgtccataatcccattactcaaaagtaactcatgttcacattttgatgtgcgtcctttcaaaattttttctatgtgaatatatgctcccaagcatgtacttttaaaatttatagtttattttattttgagacaaggtcccactcctgttacccaggctggagtgcagtggtgcaagcacggctcactgcagccttgacttcctcgggcccagatgagtacctcctcagcatcctgagcagctgggaccacaggcatgtgtcaccacgcctggctaatttttgtattttttgtagaggtggggcttcaccatgttgcctaggctggtcttgaacttctgggctcaagccatctgctcaccttggcctctcctagtgctgggattacaggtgtgagccaccgcgcccggcctagcatatacttttttttttttttttttttttgagacggagtctcgctctgtcacccagcctggagtgcagtggcgtgatctcggctcactgcaagctccacctcccaggttcacaccattctcctgcctcagcctcccgatagctgggactgcaggtgcccgctaccacgcccggctaatttttttgtacttttagtagagatggggtttcaccgtgttagccaggatggtctcgatctcctgaccttgtgatccatccgccttggcctcccaaagtgctgggattacaggcgtgagccactgcgcccggctgcacatactttttaatgttaacatcatgtaactcttttcatgtcaattaatatatattagattaccattttaagtgatcattaccattttaagtgattacacagtataccattaaatggaaatgctacatttacccagttccttcataatgagtgcttaggttgtatctatctacttgctattatagaagttgctgtctaaacatccttatattctgtaaagttttgcaattatattcaaaagaacattctagaagttgtgctgctggtgcagagggcaccttctggttttctgccctctggaaaggtaccaagagcccatgtcctgtccctgtgcacgaacattggcagaaacttttttttttagcatggagcactttgcacccacaaaagtaggcaggacaaacaaacaggacaaggaaccccgtcagttcttatccagctccagtgatgatcggccactgccagtcctgcctgcctgttcccacctggtcccactgttagatgcaaataccagacagaatatgactgcagctgtgctttttttcaatgtctctcctaaagagacatttgaaaagcaaaaccacaatacagtcgtcactcctaacacacaatttacagtaattccttatatcatgaaatagctagcttttgatcaaatttctacatgcttcatcaatttcatgatgattttgttttgttttgtgttttacaacttgtgtgaattgggatccgaatcagggccacacactgtgacaagctgatgggttcctaagtatctctctctatgcaaggatcttctctctctctctctttcccctccactaactggattatagagtttgtgctgatttcgctaattatatctccctgaggttttatctgcttccctgacctgtgtttcctacaaattggtagttgatgtagaagcttaagtggattctatttagattttttagcaagtcttctcttttgattgatgccagtatgatctttgctagttgcagttttaatttgcatgccacacactgcttttcggagatgcttactggccgtgtgtgtcttttgtaaactttccacctttgcccatttttctactggagcatgtgtctttatttatttttaagagttctttatatattaaggccattgaatctgtttttctctcatgttggaaatatttttcccagtttattatttttcactttgttttcaatgatatttatatatcatttgccacacaatttttctctgtcatatctgtcagcctctttttttgctggcttctagccttgcaatcatttgagaaaggcctttctttcccccaaggtcatctacattacatgagttgattgtaacttacacatctacatttttgcacaattctgacatttaaaactttactctagctacaactttctggagggtaaagagtgatatatctaactgtgttttttccccaaatattaaccagttattctaaccacatcttttccattgactgtccattccatttttatcatacatggtgtagtttctttacttgcttctctgttctttgatctttctcatgcattggccataacattgtgcatgtgtgtgggtggcctttttattaaaatataacacacatgcagaagagcgaataaatgtgtgcccaggtctagtacacctgcatgggtatgatcaactttaggatcattttgtcaaatctcaaaaaaaaaacccacataaagtgttgatggggtctgtgctgattattgatgaattgcaggataaggggtagctttacagtattaagacttacacagacacgtggtacattttgctctgataaacactttcctgtttcgttagtatagataggtcctgcactttaagctcatcccagatcatcttggttcaattactgtttctatgtgtaactgttataccagatcatttctgaaaaaaaaaaaaaaaatgctgtttaaaacctactagtgcatttttcccagatgcaaagggaaattttgatcaaatttctacatgcttcatcaatttcataatgattttgttttgttttgtgtggctgtcctcaggaagcccatccttcctgagcaccctgtatgtcagacaccgtgctgaatacttgacttacattagcatatttaacccccagaactccttgagagaagaagtaccttcactgtactaagaagagaggcccaaggaggctgcatcacttgtccacagtcagatgctggggtcagacctggcctccactccagcatctgccttctccagaccctcactcctagaactgcacatggattgtggggtggtggagtaggggtgggtgtctggttaaaatgcagactcttaagtctggggcaaggcctgggattctgcatttcgaataagctcccaggagatgccacagaccatgctcaggactgttatagcacattgcctgcccacatcatttagaatatggtaacatggaatcttgtggaggtgcagacaattccctggctctagagtggaaagcattctgttttggggaataatttgaacagtttaccttgccagtctaggaagcccctcaccttggtgccacttcctggagtcatgacgtctgagggcctgggcaggctgcctgcctggggctcctctgccacttactcagtttccttatctgaaatgagaataacaacagtacctgcatcatcactcactgaggagttagtgacataggtctgcatttgacgctcttggaatggagcatggtgt

SEQ ID NO: 96352 - DNA, 33555 bp, Homo sapiens
ttgtttgagtgtggggctgggttcgagtgttgatagatggtggaatggatggttggagggtgggatgctggtgtgtgtgggtgatggattggttggtgggctgtatgcgtgggtgaagtgttgtggggttgagttgctgtatggctgttggtctggatgcgtgatggagtgggtggatgtatgggtgggtgggtggatgggtggatggttgcgtggatggatgggtgggtgggtgagtgggtgggtggttgggtggttgggtgggtggggtggttgtgtgggtggttgtgtggatgggtgggggggtggttgggtggctgggtggttggatgatggatggatgggtgactgggtgggtggatgggtgagtgagcaggtgggtggatggatgagtgggtgggtgggtgggtgggtggatggatggatgagtgggtgggtgggtggatgggtgagtgggtgggtggatggatgaatggatggatgggtggatggatggatggatgaatggatgggtggatgagtgagtgagtaggtgggtggatggatgagtgggtgggtggatgggtgggtgggtggatggatggatggatggatgggcgagtggatagatggacggttggatgggcgagtggatagatggacggttggatggatgagtggaaggacggatggacggatggatggcagggatgggtggagggatgggcagaggaatagatgggcagatggctgggtagacagagagatggtacactgtaacaactcctagtccttgacccatttttgttggtcaggcacacaccatgtagttcccgtgcactactaagattatgtcacttaatcttcacaaggagctctacaaggggaggggggagtacaatgaccctccttttgtagacaagaaattgcaggttctgaaaatgccagtaacttgtccagagctacatggctctctcagtcttgccccgttctgatctcatggacatgacatccctataaacatgaccccactggctcccacccaagatattttgtggcccctgcctctgtggcaggtatggataggtggcttgtgtgagtggggacactggggccaaccgtcatggtgctgtctagtgacccatgggattgcagcctgcagcctgggtgaaggtcagccttgtcagtcctccttctctgtctgccctatgaccacaggagacccaggagctgcaaaagaagcagcagtggtaccaggagaaccaggtgacgctgacacccgaggatgaagacctgtacctgagttactgctctcaggccatgttccgcatccgcatcctggagcagcgcctcaatcggtgagcaggcagggcaggtggagagaacccactgggaggctggaccaccagctttgtaacccctcaccctctttccttgcctctctgacttcagacacaaggaactggccccactgaagtacctggctctggaggaaaagctctacaaggacccacgcctgggggagctccagaaaatattcgcttgatgtccctcctggggcctcagccagagctgccagagaaaggaaacctcttcccgcagcctggctcctgtgttccctctatccagccaatgcctgtttacacagacacctggcctcactgccagcccacctcccctacagccctgtttgttcctgcttctcatgattttcctgtaaataaacacactcttaatttgccatttgtgccttgcgcttcacaagctccagcagcagcctttctcttcttctgttatctatagcctgggaccacccccttcctccccttggcctgtcgtttgcttcctgtccttctctccgttggaatgtcaggtcttcacagcacctctgcagatggtcccacagccatctgcaaacaactggttatatctcaatgtgactagggtggcccacctcaccaagtgggatggggaaggctaagatgcatgccccagaatttgaggactgaatcccagctcctcctcttaccagataccacttacccatctgtggaatggggtagcattgttgcattaaataagacttatggccaggtgtggtggctcacacctgtaatcccaacatttagggaggctgaggcaggaggatcacttgatcccaggagtttgagaccagcctgggcaacataataagaccccatctctaaaaaaaaaaaaaaacaaagagccaggcatggtggcatgagcctgtagtcccagctactcaggaggctgaggtaggaggatcactttcacctaggaagtcaaggctgcagtgagccatgattgcaccactgcacttcagcctaagcaacagagcaaaaccctgtctcaaaaaaaagaaaaaaaagacataaattataaagcagggaggctgggaatggcacatagaaagcagtcattaaatgttagcttacaaaatagccaaaaaacacatgaaatggttgtcaaattcatgagtcatctggcaaatgaaatgtcacaacaccctccggtatgaaaaaaataaaaagtactggtgacgatgagaaacaactggaactcccaaatagccttcctagtgaaagtataaatcagtacaaccattttggaaaactgcttggcattatctattaaagctaaactaaagcccaacaattctactcttaggttctactccaatccatcattcatcaagtaagaatgatgaacaactcaaccgaaatgtagatagatagttatctgctaaaaggcatgtgctagaactttcatagcagcattattgataatagcaccatacttggaagttacccaaatgcccatcaagagcagaatggatacataaattgtggtcttcagatattttgggttgtctttaactgcttagggagaactgcttagggagaatgctactggcatctagtgcatacaggccagggatgctgctaaacattctacaatgcccagaacagccccccacagcaaataattatctaggtctaaatgccaataatgttgaggttatagagtatattagtctgttttcacactgctgattaagacatactcaagactgggtaatttgtaaagaaaaagaggtttaatggactcacagttccacacggctggggaggccccacaatcatggcagaaggccaaaggcacatcttacatggtggcagacaagaaagaatgagaaccaagcaaaaaggaaaatcccttataaaatcatcagctctcgtgagactaattcactaccatgagaacagtatgtgggaaacccctcccatgattcagttatctcccactgggtccctcccacaatatgtgggaattatgggagctacaattcacaagatgagatttgggtggggatacagccaaaccatatcatagagcaatgaaaatgaatgaactgcaacacaactatatggaatgatatggtcaaactgcctaagtataatgtcaaaagattcaagacacaaaagtacatactctattattccatttatggaaagaacaaaaataaggaaaattaattggtgatattagaagtcaggacaaccgtcactcttggagtgtgagggttagtgaatggatgtgagcatggagccctgggaggggaggttctggtttctagtcacgttctgctttttgacctgggtgtgttcggtttgtaaaaattcatcaaccttgtgcacttacaatgtgtcctctggagtgtttttgactgcttgttgtcatgaatctaatcaagcctttagccctaacttaagaaattcaagggaagaaatgcatttaagaagaacgtccatctaacaagaacttcaggaaattcaggtaaatgatactaaaaggaaacattcctaacgtgggacaatctaggtaaatggcctgatctcttcaaaagatcgatgtcataaaaataaaagtttggggacagaaatggaaagaacttaagagtcaagtgtggtgaatactgattggttcttagttagaaaaaaaaagtcctaaaaggtttttgggatgactggggacatacgaatatggactggttgttacagaattaaattttcttagcagtggtgataacaatggttattgtagaataagggctttatttttattttttgaaatggatctcactctgtcgcccaggctggagtacagtggccccatcccagctcaccgcaacctctgcttcccagtttcaagtgattctcctgcctcagcctccccagtagctaggattataggcacgtgcgccaccacgcccggctaatttttgtatttttttgtagagacggggtttcaccatgttggccaggttggtctcggactcctgacctcaggtgatccgcccgccttggcctcccaaagtgctgggattgcaggcgtgagccaccgcgcctggccaagggccttatttttaagagatacatgctcagtatttggtgttggggtgaaatgtcatatctacaattttcaaatggttccgaaaagacacacagacgaagcaaatatggcaaactgttaacaagtactggaatctacgtggtatcattatattgtcttttaaagttttctctgtttagttttctttttataatacaaaattaaggggaactgcaggctagacagttttgatccgatgttattctgctaatcttttaaaggtgtcttgcggtgactcacgcctgtaatcccagcacttcgggaggctggggcgggtggatcacctaaggtcaggagttcaagaccagcctggccaaaatggagaaaccccgtctctactaaaaatataaaaactagccttagcccgtcgtggtggcgggcgcctgtggttccagctacccaggaggctgaagcaggagaatctgaagcagaaggctgaagcagaaggcagagtggggactcccccacgctttggctttcagaacaagggttcgaattctggggctattactttctgaccgtgtggttttctgcaagcatcttaacccgggcctcagtttcctcatctgtaaatgggaacaggaattcctacctcttatggttgtactgggcgttatgtgagcccaaggagccctgacctgcggtgagaggctggaggccgaagggcaaggttcgaggggctctgggtgcctgggacaacctctgggcaacagggagaggcggctgcggggccaagtccctcctaagcggccacgcgagaggccctgagtcgagaagggttacggcgcttcccagagcccaccccgcccaacgtgtcacaaataaagctggcctttctccgattccctgattgcagccattcagggagcagccccttgcccacgcatccattagtcgaggcggtggctgcgtgtgcagtgctacagggttcagcgcctgcctcggctccggaatcaggctgtttccttctagacctcccatgggggattcaagccggcgtccgggtcaaagaacagggacaaagtcctcctgccacgggggaccatctgcaggcaaagtgaagaatgaggagcttcggcaaaatgccgactaaggcctccttaggttttgccccactccaagatggaaggcctgaggcttcacactgcccccgaagttcctttcccattggctatctgggaattgagttttccaataatgcggacgctgattggtcaatccaggacggttgctcaagccattggcgcagccgccattggagggcggctctcaaaagttttcagacacaaattaggttcgagggaggaaacggagaggaaagggaaaacttgagacggaggcgggactaaggaaacggcagcttgcattggtttattagaggccaaggggcggctcttgaacgttccttcctcttgattagtcctatttaggaaaagagggcgggtactgaggaaaagcggcagaagcgcctgcttccattggtcagtcctggcaggaggcggagcacccgcggcagctgattggtgcgggaggcaaggtgggcggggctctgagccggaggttttgttgtgagggtcggttgtcaagcagcggccaatcaaggcaggggatggaggcaagtgggggtcgcgcctggagcggagcctcggcctccggagccgcagctgcaggtggagtgggcaargggacgaggtggcgaggggacggtgggccctgggctgggccgagccaggcggggctggctgggcttgcgggcagagagctctgagcgtggggaggctagagcccgtactccgcaagcagagggttgggaggatcagccgtggccgagggacctgcccccgcccccggacgagaggggtcggggtggaggccggagggggcaaaaccagggaggccggaagcagagctgggggtctgcagaaggacaggtaatgaatagggagaagagaagtaggagaatgaatgaatgggagaccccgcgagcatatgggaaagggcagtaacgggagtctggcgaggcaggggccacgtgagggatatcgggagacaggatgtgcataagtgggagactcagggggcagggagaaaagggggtgtgaacggaggactagagaggcagacccggggacccaggagaaaggggacggaggggagcgggctcatgggaaagaggtgaagtggctgtgggaaggaggtgggaggctccatgaggaggccttttagagttgaagagtcatagccacttacgcccagactggaggcctagttcctagctctgtccttgggaatcgcagggagcaggagcggttcccttgccaggagctggggaattggaccatcagggtcgtcttcgagattctttccarggaggacttcagtggccgtctctgggatgcctttcctaggcccctaagcttagcttctgactccgctctcccacatcccacacgtcagacaaaaacaacgactcgcaggaaatctatgtgaattgcagacacgtggtcttctccgccccactgcggctgctgcactttaggcagccagcatcccggaacagagctgcagctcattatcctggcctctgggaggagtttctttttccttacgttccaaatcaccctacctgaggtgycccctctgcagattcccaaacctaatttgcagtgcagcttctgactctggtggctttggtgggtgtcagtctttatcaagtggtcttggtgatccagggarcaacagctcttaccaagcattttctaacatgacgtcacctcttgtttgtattgcagccctgtattgagctgagatggctcgagcctaacattccatgatccaggatcgtgacagatgtgcacaggctgctgctgttgctgctgtgggtaatttggaaccacgaggcaccccagggccagaagacgaggcattctgtctgcctggatgtgtgggaactctctgccaacttgattggtggatctggggggggatccacccccaccccacgaggaaagcacagtttattttgtggktggggcttcaggtgccasccagctgaaggatggccacccctgtggtcaccaagacagcctggaagttgcgtgagtggttttcatttttctttatcaccccatttattctgttagcggcttgttgctgggaggcctgaacccacagctttgtttcctgttcttggcacaggaggagactcctagacttgggagtaagatagaccattatgtaaatcatgactgtggcacttcttagctgggtgacactgggcaggtgacttaacctctctgaggctcagttttcttatatgtacaatgagatgacgcctgcattctatggttgctgtgaaattcaagtgacaggatgaacccatcctaaagcacttagcacagcatttccagttaggctgacagtggggtgagaaatcctgaaagatgttcacagcattctcagacatctcacawgtcaaacttccccagtcagataaaagcatcttgggcctgggatgggggaaggagtgggagcgaggaggggcgggcagagggatgcagacagggctcggattgtaactgatgggcactgtccactcccaccattgccctatacaagtggatctggactctttcatctgaagacttcatactttaagaattattgaggaccccagagtgcttttgtttgttggagttatatatctgtcagtatttaccacgttagaagttaatactgagacattttcaaacaagagtatataatcaaataggcctctagtgatgttctgggaaactccaccatatgcttgagagcaaatgagagtgcaaaaggcagatgccatcttagtgttattgtgaaaatccttttgtcttctcagaccccccgaaaggatcttgaggatcccaagcatccccagatcatattttgagaattcccctacacattggcaccttggtgggccctgccccacctattgtaactggttggcatagcttttgtgtgctccacctggtcactgtctgctgccasctgtccctgggctggttttcaggrgctgggacaagactccacacttttttttttttttgagacagagtctcactgtcacccaggctggagtacagtggtgcaatctcagctcactgcaacctctgcttcccgggttcatgcgattctcgtgcctcagcctcccgagtagctgggatcacaggcacccgccaccacacccggctaatttttgtatttttagtagagacggggtttcaccatgttggccagactcgtctcraacccctgacctcaggtgatccacgtgcctcagcctcccaaagtgctgggatgacaggcatgagccaccatgcctggccaagactccacactttttaaccatgwatttaaccataagactctgggcaaagctctttgcagggcctctgtttccttgtttgtaaagtgagaggtttgggccattttcatgttgttccccaaaactctagggctctgggagaaccctgttatggttccccaaggaaggcacactttggtcagagtggctttgtaattattgggattacgtattcatcccttcgacagctggcctttccccagagctaggcactggggagccactgggggacaaagtagtcaaggtctctgtacagcgggagctcagagcctggggagagcaacaggcaggaactggataaccgtatccctctgtgtctcctctagttgcaagctggtgcctgtgctttraatcagttagctggggggtaggggtaggggtggggtgggaatgctgcaggctgcatgaacagcaagtgcaaaggccctgaggcaggaggctcagtgtattggaaggactcaagggaggccatgggcagtggcacagcagcaggaggaatgtggggccgcacggacctactgagttctcaggaccccagccctcctgaggctgccgtgctttatcataaaggcaaggccaagccatcagtgtgtgcgagcaggaggtaatgagatcaggcgtattgggcatctgctgctgctgctgatttcatgtgcacggtggtgtccgtgggaatcaactctgaagagcccagggccacgtgacctctggctccttgtggctccagggtctggtgaggatcagaggtgcgtggcccacatgaggtcgttgaaacctagtactttgtatcttgcatttgggatgctgatcctcagcccctctggccacgccgcaccatgttccccagctttggctggatgtggggcccaggttgtactcccagagcttggcctgccagtagacactgaggatttttattttttatttttggtatgaaaatcaagtattcggcctgggctgttggttgctgtccaacaagccaggatgaaggaggagctcttggggtggtgccccgtgcctcctttgcaggtgcctgtgctgtgtccctgcccctctgccctccctctgtgggctccagtcagtccctggtcaggctgcttagaggggagtgatgtgggctcctccagaagggcccaacttctaaatctttctcactccaaagtctgcggttttgccagctcagtgtcccgcccccaccaccatctgattatactggggcatatttcgtgcaaggcctagaacaggcacccaggaaatactgatattatgaatgaatgcccctgactccaggggcagyagtcctgaggcccagtgaggtggggcccagccagacactttccctgggaggagtgagggccaggggacagacagagccctccaggtaggccagggggagcgagcagtgcctccacggagaggacaccaggctcgggcacggaatgccagggagaaggtgctttgccctctttctgggtcaggtggaaaccttgaacagacacgtctgtggctggaattcctcaggtttctgtcccgacagtgtccagaggacagaaggctctcatcgagacgggactaaagtggggcccagctccctgggatccccatggcgaactcccagcgccctggcccaggtttgggcccacagggaaccctcgcccttgctggcgctgctgcctgtgctggctctgccccgaccggcccaggaggcagggtgtcatcagtgagattcagcctgcgacttgtcccctgggtattcctggtggccccttggagcccaggtttctggcaagcagcttccctgggcccagtttcccaacctccttgtggtctgaagcccgcagcagagacacccaggcagggtggagtcggagctggggtgcaggaggggcctctgtggagcgccgtggctccaacacccttttccttggcgtcacccacgctggccttccgggtgcctcggggcgtcagcaccttggggttttcccctggcctgtgtggggagaactgtcttttttctcccttctttccaggaggagctcatgcagggatgggttctgaggcccgggccgcctcttggttccctgcctgtgctttgctccctgcggagtcctccgaggctcctgtctgccatctccacggaccaggccagggccttgggctgtctgcacaggctcctcctctgtgtggtcagccctcacccccaccccagctgctcagtctgttgcctcctgccccctcctcatgaagcccaccctctggtgcccgcccaggcccccatgcccactctctcatggtgactagccccgagcctgcccaatgtcacggagccctcgcctgctactaagcagcacgtaggcgcgctctgagggagtcctcagcatcaggtgtgagcagacaccacgggcatccccactttccagacgaggagccaggccctcagaggacaagtgacctagtagccaaggccacgcaatagcagatcacagacctcagaccagaacctgatccgtgattgtgaatctgagccgaagccctgtgcaggcttacctgggggcagcttgtctagaggtgacttcggttgttcttaaagtgtgttctccaaagcagggtttgtatgtacacacaagcagcagctgagaggtgtgtaggcagtgcatgggtcaattttttttatttcaataattgtttttctttttgtatcatagaaagagtatcatgagtatatcaaacttgtaatttcatggacattgcttaagcccaagctaataaaaatagcaagtcaattttaaaaattgcrtataactagtcaatattaccaggtgatrtgcagaaacaggaagaaaatcgtgaagtctaaaggtaggaargacaggcatgatgaaagttgagaaacagtgatttccgtctcaggcccatgccctgccctgtctgctggtcctgcagctcatggtggacaccaaagggggagctgaaggaggcagatccttccactgggcttcaggttccaaagcgggtagccgagcagggtcacccctccttcacaaggccccatcgggccgccctgatggcctctccctctccttccctgtgtagaagagatcgtcgcgcatgccagcaacgtgtcctcactggtgctgggcaaagcctccgggcggctgctggctacaggcggggatgactgccgcgtcaacctgtggtccatcaacaagcccaactgcatcatggtgagccccgacagctggcggggggtcaggacaagggcctggggaggggacggggacaggggttggaggctgaagagtgagcagcttctcagactctcttgagcccagggccccctatccgctggggcccagctcaggggtggagggggcgtggtggggacaccatcagtgcttcccccagctgtctgctcagtgaggcccaggacagcccagcatggctgggacagtggccagccctcaggagcgaggsagtcacctgcctgtggtactattaagaactccaggcaggctgcgtgagaagattaaaataagccctgggcctgtggttgagccaaaagacttgtacccctcccctcccacctgcccatctgcctgcctggcagcaacatgtgggcgtttattttaattcattcccagccttcattccccaatgaggatttgaggggacctggctggagctggttagggagctagttcttaaatagcatctccccactatttatgcagctatatgttcaatgctggaaactgttttccaaataggagtgcataaaggagaaaacacaaaattaactacatatagttccgttatccaaaggccaccacagttggtgttttggtgtgagtccttctagatgctgagacagatacatatacgtgtacatgcacgtaagtgcacacttgtacatgcatgtacacatgtatacacacaaatactcatacaagcacacacacataaataaaaatacactgccactcttgtgcagcctggtttttaaaaataacaatgttgtaaggatttgcctgtgtcaacaagtattcttttacaacataattttgaatggcttaatggtgttccattgtagggatgagccgtaattagcttagccacaccctgttatcagcagagaggttgtttccggctttttttggctctgctaaagcaccctgtggtgaacatcctcagccrcctagatccttgagcagatccgtgatcactgcattcaatccaagggtgtgtgcttttgttaaagctttcaaaacagattgccaaattgccccccagaaatcattttacattctcaccagcagcatcggaacctgccctttcctccctgccccaacccccatcccttgccaaccagggagtatcattgttgtgactcttggtgaaataaagatgaagaggaataggccgggcacagtggctcacgcctgtaatcccagcactttgggaagctgaggcgggtggatcacctgargtcaggagtttgagaccaccctggccaacatggtgaaatcctgtctctactaaaaacacaaaaattagccgggcgtggtggcaggcacctgtagtcccagctactcaggaggctgaggcaggagaatcgcttgaacctgggagacggaggttgcagtaagccgagatggtgccactgcactccaggctgggtgatagagcaagattccatctcaaaagaaaaagaaaaagaatatggcaaaggatgaatttcttagtagaaacttaatcacctcagtgtttttctgagatccagggggagaactgagatccaccccagcctcagcaagggtgccaggggtcagtaatgatgaattgaattgttttgttttactttgtttytaggattcaaatgtgttttctacccccatgaaatgccaaagtagtagcatacacaagttgaaaaagcatcaccaatgactgaccaaaaataggacatgccacgacccccagagaaacggggccaaccgtctggggcctggcctgcaggcttgttttagaacgccaggtgcagctgtcaggccccagccggcctcaccccgggcccctgccctggctcacacacaccagcctcccaggcctcgcagtgcctccagcctgccggggtctctctccccttggggtttctgtgcacgctgtccccctgcaggccgtccacttggatttatttttatttttgagtatgggatacacttattctgttcaacatccaaaagatagaggatccacagtgaaaagtcttccaccctcctccaaccgccacagccctctcctttccacggggatgggcagtcagggagagccaggggttctagaggggcgagatgtgtgcccaggactaggcaggccttggttccgctgtggcttacctcgctgaggggcttgcctggggcagagtgaagatgggaacagagcgggggcagggttgcttaacttagggctgaagggacagcatccctttatcttgtccagtcgctcccctccaaggggcccagggccatttctgcaggtgacgcccatgtcagaagcacagcagggaagagggaggtggtggggggatgattggggtttggccactcttagccctgggagctgaggccgagaggagtaggtgctcagaaagggcctgcaggagggctaggctgtggcccccatggggctccccctcctgccttagccatttcttgctgaagcctttccgggggacttggaattcagggcgcaactgcaggggtctgtccagcagtgcacggaagctgctgctctctctccacagagcctgacgggccacacatccccagtggagagcgtccgcctcaacacccccgaggagctcatcgtggccggctctcagtcgggctccatccgtgtctgggacctggaagctgccaaaagtaggcctccgagcttgcctcctgtgcacgcacacctgccttagtcttcaggctctgcagttgtrctgcttcctccaggaagcctgcctggactacgttggctgctttgctcctggagcactaaccsggcagtgtggcacccactccacccccattagcctggcattgacatgcactgctgcctcgtgtgggtggggggatgtgcgggtgtgtgtgtgtgtgtgtgtttggatgtatgtgtgtttggatgtgtgtgtctgcgkgcacgtgtgtgtgtgtgtgtgtgtgtgtttagaacctagagggatgtcacatgccgccaggggccctgcaggtcacatgaatgagtgaggtggctgcgtgggacagccatgaagaaccggggagcttgtaccctgactccaggtggtccccactctgccttggctccctggtgccattagaggcagcctggaatggccagatctgtttccttgtgctctgttttaatttagttttcatctgtatagaagttgtacatagcctaaaatttaaaacctcaaataccagtatttctacaattaatttcaatggaaagaggaaacttctgccccactccttcccattctccatgagcctaaactttctgtgctttcgtctgtgctttgctgatcgcctccacctttctagaccacatggtcataccacagtttctttcttttcttatttaaaaaacaccgtggccaggcgcagtggctcacgcctataatcccagcactttgrgaggccaaggcaggcggatcacctgaggttgggagttcgagaccagcctgaccaacgtggagaaaccccatctctactaaaaatacaaaattagccrggtgtggtsgcacatgtctgtaatcccagctacttgggaggctgaggcaggagaatcacctgaacccgggaggtgggggttgtggtgagccaagatcgcaccattgcactatagcctgggcaacaagagcgaaactccatctcaaaaaaaaaaaaaaaaagttaacacattagttattctcttcctactgtaaaggatgagaatttagctctctcatggcaccactcccagccccatggctcgtgtttctcctcccaccctcccagtagcaccatttcaataggtggtgtttataatgtaaggacgcataagtgtcatttaccactgactatttctttttaataacttggtttccctggagttaataatagttcctttttttttttaatctgtgtgttttctatgtccatattactcattcatccccaaattctctgccagaagagtaaagctcctcctgtttcttwgaaacccatcccataatccaggcgccttttctcagagcctctcctctggtcctagtgacctgcagcccagctgtcatcctgggcctctgtgtctcttctctggggaattctctccatctgttgttcctggtcccacgccgcaacctttcttggttttctccctctttttgatggagcacattcttttgtagctttctgagaaaatgtgctgggaaggcatagttttggagaacttccatggctgaaaatgactttctgctacccccatcatttgcttttgtgtttgttttatgagtttgagtatagagttctatgttggcaataaaatatcgccctcagaatttggaaggtgcagctyttctgccttttaggttctaggttgctattgggaggggccrgtgttgttctgatcccagatccttcacaggggactggcttcattccatgttctgtctcttccttcctctctctctctcttttctttcctctctctctctktctctgcaggcttttagggtctttgtcccagtgttctggtgtggtgagccttggggtgggtctgcttccaccctgtgctaggtygtcactggtttcatgcggttgtrgtctggaaactcatgccctcagttctgggctgagcggagagtctcgcccactgctcctgtgctgtgcctcggtgccttagcaggtggtgccagctctacggatttttcaagagaggctggaaatctggaaattcatgtgccttggtgccttagcaggtggtgccagctctacggatttttcaagagaggctggaaatctggaaattcatgtgccttggtgccttagcaggtggtgccagctctacggatttttcaagagaggctggaaatctggaaattcatgtggaatccacccatttaaaaatgttgacagctcattcaacatttgttttagaacaccatgcaggccagcactgtgaggtccaaataagacccgtttgcctgatgcttttcttttcttttctttttttgagacagtgtcactctgtcacccaggctggagtgcagtggtgtaatctcagctcactgcaacctctgtctcccaggtttaagcgattctcctgcctcagcctcctgagtagctgagactacaggcacggaccaccatgtcccgctaatttttgtatttttagtagagacggggtttctccatgttggccaggctggtcttgaactcctgacctcaggtgatccgcccacttcagcctcccaaagtgctgggattacaggaataagccaccatgcctggcctgcctgatgctttttgatagcccttgttggatcatcccgcgtgccaggcaggaggccacctacctgaagccctggagaggaagcagcaacgtggattttgccgaggctgctttttccagaagagagcccctctggcctggctgagacttcaagattcttctgggcctctccttggttcatgctctatgttggcggcagggcagcagccatgagccacacatgcacagtggcaaggttccctttgctcaggaacagtgggctctctgtgtaggtggtactcaataaagatgcacgcagcctcttcagtgatgcttgcctactcagtgatggtcagtttaagaacaaaagagccccaggacctctttgataacaaacaggactgcaggctttgcgtctcggcacgtgatcgcactgcctggccacaccagggcatgctgtgcttggtgtcgctgaactcaagcgggccagggaggagtgagtccaggatggctgggctctcatggagaagatgggaaggctcagrcagaaggtgggcagctccctggacctgaatcccagcgcgtgggcaccagccattcagtattcaccgaagaacaagagacagaagggagaagccgagggcgccgtgccccctgtccaggctttctcatccacaattgttttgctcacargggaaatgtgaggaattccttgaggtggctgagaaatgaaaactgaagattgctggattcctgggccctggacggccagggctggctgctccacaaggaactcattacgaactcacggcccagactccatcctcagagaacccgattcagtactggggtgggcccaggatctggattttaataagcttccaggtgattccgatggacagccaggttgacagatgggcaaacagaggcccagggagagcaccgagcttaggaaaaccccagtagctgcaggtagcagagcctgggacttgaatcccggtgtcaggactcccatcccagtgttgtctgttctgccattggatggaagagaaacttgccatcagcacagcaggtagagctaagacctccggcccccctccacaccccctcgccagagtgcaggtgacagtgacagacaggcaaattgaggccccaggtgtggaaaggttccaaagagagctgctctgcgggcatggtggctcacacctgtaatctcagcactttgggaggccaaggcaggaagatcacttgaggccatgagtttaagactaacctgggcaacaaaaggagaccccatctctatttttttttwaaaaaaaaaaaaaggagagagagagagctgcctcatatcggttgccttgaaaggccacccatcactggagggttcagatgtaggctgaggaggtgctcagctgggaggcgttgggggttcctgtgtggggcagacagaccccggaagcccctccactctgcagttcctagatcccatgattgaatgtaggcatcagaggccttcgtgggacagaagagcaagggcaggagtcaagccggaagaatgtggtcctgcctgctttccacagcgcagccagagggcaagggtagctcagcgcaggggatcccacgggatctcacaggagggcggccggtgcttcatgcagccagcccacacagggtgggactccgccacatcctctctgggcagggcaggattttggaagccttgctgtgggatccaagctgagtgggctgggagcgggtgtggactggagcaagagccagcgtggcctccttggccaggaggcaatgcccagcccccagcagcacctgatagctacacggagcaaggagtgacagctgcagagattctggtgcaggtgaattggatatgcattcgacagactccagagggatgtgaaagtatccagacccagctccagcgccagacagggccagctgcagaggggcactgaggcctggggaggaggagagaaggcccagcttgcgggacagccaagagcagaaggcaggccttgtgcaggaagaaatgtgaatgggactaattaagactggcatttattgagcacttaccatgtgcagagcccgtgctaagcactttatgtatgtttactccattctgtgacccaacatgaggcccaaagacagtaagtgattggccagggtcacaccaccagtgaggagcggagccaaggctgatcccagtattgtctgatgccagagcccacatcctgactttgggggtagagaagatcatacagtagagttcatttaattcacccagtgcttggatcttgactctgcagtaaagtgttatatatggaatcttgaatacctcctctgacagagagctcactacctcacaaggtgacctattgcaccttggctcaaaactaagaatggctggactcccacatttcctgaccctggcacttgggatggtcagtttcattcagatagtgaattatgaatctttccaaaagcaggaaacatgagacaaatctgagtggtactggaggacaccctgaaacacacaaggtttgcctccaggctgggccgctcctggccatggagatgcctgcaaaaccttcaaggaaaggataggagatgtggttcctagggcagtgggaggcgatcaggccccaccccaggagttctttggtcctcgcgtgtcctccctgtgtcctctcagttctcactgctcctcagtgtgtcctcacagccaccctcaagatcccttggacagaggtcacccaagaagactggtgtgtgcaccagggccaccccagccatgccctccacttgcccttcttagggcctttgcccatcacctccatctacctaacagcatccctcatcctccacccactgacatctactcaaataccacctcctccataaagccttcctggatttctctttccaaccaagcagyttctctcccagcttgaacctctcctggtctgtctctctccttgcactgtcttgggtggggttcagtgccctgcaaaccataagctccacacccatggggcctgaactgagtgtggtggttccctggttctgcttccgctggagcacagtctgtggggagagtgtggtacaatttctgcagacttgaggtaacatagggctgtcacctctcaagagaaatgtgggaaaattagttgttggcaggacgcagtggctcacacctgtaataccagcgctttgggaggccaaggcgggtggatcacttgaggtcaggaggccagcccagccaacgtggtgaaaacctatctctaccaaaaatataaaaaaattagccgggtgtggtggcacatgcttgtaatcccagctacctgggaggctgaggcaggagaattgcttgaacccgggaggcagaggttgcagtgagccgagatcacgccattgcattccagcctgggcgacagagcaagactccttttcaaaaaaaaggaagaaaagaaaattcgttgttagggtggtgggacccttgattgtttcctactgttttaaaaatgtgtgttattgttctatttttctgtgcagctaatccaaaagcgcacacacaaatgcccacagcagcccttcctctgccagccttctcatttgcctcttagccactgtctctgctttccttcttgttagttcttcgcacactcatgggacacaaagccaacatctgcagcctggatttccacccgtayggcgagtttgtagcctctggttcccaggacacaaacatcaaggtgagaggcyggtccgtgccccgtgtctcctgctgggcctgtggcaggaccagcccggcccggccctcagtgctggatgcctgctgaggggacctcttccctttctgcagccacatccacaccatcctagggaaagcgggtggcaggcatctatctgccagatgcttctgctcagaatgccagctttagtgagcagtttctgtccttgtctccgtggggagtaacgacctagagaaggcygggccccaccgtctgctcacgacygcacaccttcctccagtcgtggctctgacctctcytgactctgcccctctgcttctctctcccccacagctctgggacatcaggaggaaaggctgtgtcttccgatacagggtaaggatgcgctctgtcggtgactccatgagcaccttgcgggcattgagtgtggtgtggtgcccagaccccagcagggggtggaggggacggctgtcccacatgggtgataacataaaacatagacctggagctgagcaggagcgccatgggcggcccacctggatcccctggctctgcatgaatcccctagagccacgttcatcaaactgctccaagcagaaccaggcgggtaaccagtgttgttagatggaaggggtcccataggagtgaggaggcagrgagaggtctgttgggcccaggatcccagggtgagctcatgccgtgtcctccctcaggggcacagccaggccgtgcggtgtctccggttcagccccgatgggaagtggttggcrtcggccgcagatgaccacaccgtgaaggtagctcccggcctgacctgggcccaggggctgggggctggggtctgctgatcacagcaggctgagtcctcacctccctcctgatcgggctcacatgtcccaagcctatcccgagtggaaggtagcttgtggataaagagcttggcctggattagagggagggtgggcagccaagaygcctggtcaccctgacctcctccctgccctgcctccagctctgggatctcactgccggcaagatgatgtctgagttccctggtcacasggggcctgtcaacgtggtcgagtttcaccccaacgagtacctcctggcctccggcagctctgacaggtgaggaggaggagcgaggcgagttgcttgtgactgctgtccttcaccgccttgtcctctgtgcgtgtctctactgccggtctgtcgctgtctggggtgtcatacgtctgatgatcctgtgtggactgaattggatttcagccgagccaggactggaccctggtccatctcccctggctctggttccctggccccagtgtcccaggtctgtggcttcatgggcaggttgggacccaaggcatctagtgggaccccatagggcagggaggctcgtggctgttgrggccaaccctggggccagggccatcgggccgagcctcccccttgcaaagtcagggccagctctgccccagatgttgctcctggtggccctgccctgggggagaggtttctagagaraagctggcttcccagggacatgtggaggccaggatgagggataggcttygcagcacagcttggctgcctttgcaggacaatccgcttctgggacctggagaagttccaggtggtgagctgcatcgaaggggagcctgggccmgtcaggtaygcaggctgtggggtgggcggcccagcgctcctcccggcagtggggcgtggctgtgggtgggcctttcccatctccgctgctgcgccctccctgccctgggccctctggattcctcggggtggggaccaggctgggtgccacaggacccacggccatctctcgcctggcccaggagcgtcctcttcaacccagayggctgctgcctgtacagcggctgccaggactcactgcgtgtctacggctgggaacctgagcggtgctttgatgtggtcctcgtcaactggggcaaggtggccgacctggccatctgcaatgaccagttggtgagagagccatggcacccaccgccccccactcccacagggccacccgcctccctccagcccaggcccctcctcctacccccacactggggctgggattttgccccctcggcttgcagtcccagccccacctctccgctttctgcagataggtgtggccttctcccagagcaacgtctcctcctaygtggtggatctgacgcgtgtcaccaggactggcacggtggcccgggaccctrtgcaggaccaccggcccctggcacagccactgcccaaccccagcgcccccctccggcgcatctatgagcggcccagcacaacctgcagcaagcctcagaggtgagggcctggggggccttcgggggcccaggagagggactgtcacaggggaagcctcggagttccagccctgggcctcacagggcacctgcttccgttgggcttggcctcacgctccyagggtgaagcagaactcagagagcgagcgccgcagccccagcagcgaggatgaccgggacgagcgcgagtcccgygcggagatccagaacgccgaggactacaacgagatcttccagcccaagaacagcatcagtgaggccgggctcccrcccccagcccagcgtccccatcggtgaaagggaggctgggggtccttccagggtagcctgctgtggctccgcatccctttaacttcctcctaacccacacctgggctccgtatcctgtcctcacgttccctgggccttgccaggctgtgctctgatggaactgagaggggggcctgggcactccccagcagcggcccagcagctgctcagtgtcccagtccctgccctgccagggacaagtggkctgggaggggcaggactgagggttcctgggaccaggagcagggtccacagtctgcagccgcatgcctgggagctaccctccgtcccccgcactctggacagggccctgggtcccaggtggcctggccaggagcgctcacagccaggggcctctttcctctgcaggtcggacgccaccccggagaagtgagcccttccctgcacccccagaggacggtgagttgggtgagcctggtttcccaaggtctctgatgcccccccgtccctcatcttctcttccygtgaaccctcccaacaagccccttcccaggaccctcccctctcaggacacgacccacaccctctcccgctgggtctctgccctctgcctgttatgtgccaggtccctgcaagaccgatagtgcccccgtaggagcctgtgccctggtgtgtgggggacaaacatggacaccaccacackggggggcctgccaggggcactcgggctgtggaggatggagaggagtcactgggggcccaccttagatggggtctgctgtagacgggatgatcgggaggctctcaggaggcccaatgcctgtcaaggcctgggggccagtgagaagagagagagagaagtgcttctggcaggaagggagctgagaggaggtgagctggggcsagtcccagcaagaggtcaggcccacaaggcctcagctgggggtttggattaagaagggagaaaaatgatctgcactgtggttggagaacgggcaggcatggggccacctgtcctgtagagtacccctgccctcccctcagggaccgtccttgccgtcagtcctggctttcctaggagcctccacttccatcttgccagtcatcccagccccctccacatacatgccagtgaagggacaggatggccacatcctagagccccctgggtcccacccacaggcagacctaaggttgagttgggggagagggaggaggcaggtccaggcctgccccaggtcctctggaacccccacgccactggcctgcagcctcccccatgctcctgctccatccccccattgcagatgctgcccagagtcccgccctgagccctgcccttcttgccaggcccttctggccrgacccagtcatcttttcyttttgcctccagacgcagccacagcaaaggaggcagcaaagcccagccctgccatggatgtgcagttcccggtgccaaatgtatgtccatggagggagcatggtrtggggcctagagaaggtcctgacccagggttgggggtgcctcgggaggcagagagggaggccccaggccggcaaccgctgagtttcacactttcagctggaggtcctgccccggcccccagtggttgcttccacacctgcacccaaggctgagcctgccatcatccctgccacccggaacgagcccatcgggctgaaggcctccgacttcctgcccgtgagtaggagcccagctcgaggcatgggtggaggtctgtgggtggagggcagagctttgctgctggctcctcccatgccagcatctgggtgtccatcccacgcaggccgtgaagatcccccagcaggccgagctggyggacgaggatgccatgtcacagatccgcaaaggccacgacaccatgtgtgtggtgctcaccagccgccacaagaacctggacactgtgcgggctgtgtggaccatgggcgacatcaaggcaagtgcccacccttgcacagggcctcatctcgccccyctgcccctgccacctgcctgcccgggsttggggcagaacaagaagaggccacccatgggggacagtgtgggataggccatccctgacgtcacaccatctgtttccgccatcatcatcatcatcacagactgccgtttagtgagcatctgtttacatgcctggccttacactcattgcgttaggtgcagtgctgaatacccacagccccatcagcacacccacattcacgttcgtacccccaccctcaccctcacagggccacactgtcccccactgccccacccctgacggtgctctgtttgcacagacgtcggtggactccgctgtggccatcaacgacctgtcggtggtggtggacctcctgaacatcgtcaaccagaaagcgtaagtggctgcagagggggagtgggcggaggggcagggctgggctgatggcagcatgtcctggcctctcctagctccctgtggaagctggacctgtgcaccaccgtcctgccacagattgagaagcttctgcagagcaagtatgagaggtgcgtgtggggaagccatgcctgcctgaagcagggggaggggagaggtaagaagcctcctccagaaccatgggaaggacccccaagagcctgggtgttcctgtgagctggctgtgaagcattgctgcccctcaacagtccggaggtgggagtggaaacaggcgtgtgtgggtgtatgtgtgkgtgtgtctgtgtctgtttctgcccctctcctcctttgttccttgctgtttctctttctgtctgtggcccttggtccatctgtgacttcatccatctccccctaaagctacgtccagacgggctgcacctccctgaagctgatcctgcagcggkttctgcccctcatcacagacatgctggcggccccaccctctgtgggtgtggatatcagcagggaggagaggtgagggcagcgcatgtgttgggggcaggggtgccacaacaggtgaggggacaaaggcctggaggcctgggcccctcttactgacagtcctgctgggacagagtacagaggaggcgttggtctggggccatggctcagggtgtgggtgggcttagccagagctgggttcctccatggcctggctgtgcccacaatccctggcagggcctgggtggttcccctctgggcctccgccttcccttgggaggaagggctggagcagttaggacagcaaaggccctggggttgggtgtgggtggtggtggtgccagctagcccctcaggcactgccctctctacaggctgcataagtgccggctctgctacaagcagcttaagagcatcagcggcctggtcaagagcaagtcaggcctgagcggccgccatggcagtaccttccgcgagctgcacctgctcatggccagtctggactgaggaaagcagtgggcaggggcgctcggcagcccacagggcctggcctcagcccccactcctgytccttgtgcacccactggcccatgagcctctgcctggcccctgctgctgtcctgtggccgtcctggaggaggtgatgctggtccctggccacctctacagccctgaactcttgagacaactctctccagcaatagctgcccagctttgcccaactgttgcttcttggggcagcgaactgagccctggggctgctgctgtaatttataaggcaaattttattaaatttgtaactattcccaggtttccttgtggggaatgttttctgctggccacagggctccccgggcccaggagtgcctgccccatggtttgagatgaggccacaccccctccaagcccgggggtggggctctgggccatgtggccagcagggggcagcagagaatcaggcctctgggacagcaccagttcagccagtgcagactgggaaggaaggggaggcggcaaccacccttccaccactgggtgttgaggttaggggtggcccccaccagcccgttcctccccacctcagctacactcaagctgtcttatggacacccccaggatgcctccaggggcaggactagaagggcacctgccccttcctctgagcagggctccgatcagctgtcactccctgctggagtccccagcactggctggcgggaaagggctccctgctccgtggtcactgcgacaggtgggccccctcctgctcccaaggcagggaccaggtacagccccgccccggggtggtcagggtcctcggcactggaggaaggtggcgtggacctctggccagttcactgaagagggaaaaggccagggcaaagagtgggcagtgggtggtgcccagcagtaacctggaagcccagcatggtttgggcaaggctttgatagcctttgaagctctctccagccttagtttccttcccatcagtaacatggaggaatgcccctgttgggaggtcagttatcgtgggcacatggtaggtaccgcatgaggcgactgtgaccacaaacaacagagaaagtgacccagggtgggacagcgcaggctccccccagttgtttgttaaggacgcatgtccctaactgacctagaggacagatcccagagggctgtggggtgaccagccagcgggggagtccacaagacctgccagtgccccgtccccctaatcagaccaagaggggctcacagaccaactttttcagaccatacttgtgtaaaaaggcttcttttattttaataagtaaaaatggctaagcttccaaaagttcttaaataggatttcagagggaagaaaattcgagagaccagcgagccaggcaggtgagcgagcagcagaatcccccacccgctggctgcctctgccagccataaacacagcacggccccgtggcgggaggccatgcgcctccgcacaccccccagctgcgggaaccctccttgaaggagaggggcggggagggctgccattggtgccaccaacccaccccagtccccatggttcttgggtctgcccagaggctcctcgcccaccccctaaggagggggctggccagctctgcaagctgaggagaggggccgagaaagcctgggtgagaggcccaccctcctccacactcccgccctcctcacggggcccagttcgctgatggcccaggcctgccaggaagagcagccacccccgcctttccgcccatgcaatttgcactcagagccacagccgagagacaccgtttccttctgaacatgtttctcatctttgaggggagacggggcagaagaagagcctccactctcgcctctacctccgggggtcctggcgctgcagcagggacaggccagtgagggcccagcttcaggcccagcggggtcacatccgtcacacaggcagtggccgcgacttccctgcaggggcatgagatcatcagcctcttgtccacttgcccaccggcagcccacagcagttgccaccgagagcaggagggaacccagcaaaagcacatagacaagcgacagcaggggctagacccagctctgaacagcagaacgtcccagcgcagccctgcaacccactgcgggcaggcaggcgggcagccctgggccacaggccccacactcacctagagactctgcagccccagccgtcaggctgaaatcaaagtgacaggcgtctcactggtgggcttgccttgggccagtaccccacaagaccctgctgctgctacccctttggactcaaggatgggccaggccctcccatgatctgggctaaacaggggctggagccctgggtcccggtcctgtggcggggctcactcctcacctaggaggtaggcaagcccggccctttctacccccggggcagctgaggcacagggagggggctgcaggggctgctctggagggggcttactgcacaggctcagccagcccatgctcagagagcagggtcccagggtagagtcagcacccccggctgagaggctggggtctccttacactgcccccttcccacagaccttccatttcccacctgcagaacggacacagcactgtctgccctgactactgcctgggggcaggggaggttgtaaaacaggttctggagaaggtgtaagaactttttaaaaaggaaagaaaagagaaagcccatccaggtaagggcagcctggtgactattaccctggggagactccccacccacactgccactccaggctcacccgagggctgcagcttcctccggatggatccagggcggctactggtcccagagctgggggctgagtgggcccgtgccgagggctgtggcgtctgacaagccggctcccactgtgagcagggaagggcggatgggcgggggccacggctgccctggctccccaccctgctgtgcttctctctactcccctgccctgcctcctaacacccagtttcctcatctgcaaaatgggcatgatgtttgtgccccagcctcagttatggcaagaattaaatgagataattcatgtaaagaagtcaactagttaccactgagcatctactatgtgccacccccacggccagctcgtcaccccacaggaacctccgaggccaagaagaaatacctgtactgaagaggctgctggctgtgggttccagccgtagctccacccaactccggcagcttccctgcccccactgcttcaggacgtccccgcccagctccctgctcctgccatgacccaaagtctctgacccagggccacctgagccaggcctgtgacagtccccgtacctctagatgctcctggcttgaccaggacccaagctctgccctgcgtagcccaggccccagctccacagagcgcaccctctcagcaaacttgagggaatagagcgtctcgctagtgttcttctccacgggggacacctaggggacacgagagctcactgcccacccgggccagctggaggggcaacagggtcacgagagggagctcacagctggggccgtcagaaggcttcctggagaggcctgagggatggggtgggagggcaggcaacatggcagaggtgctgtggtcaaaggtggagaggagggactgggagttacacagggtgtgtgtggccaggtctaggggcggggaggtccatttgcacagcctggggtgactgggtctcactgctagcgtagcccctacatgctagggactggcccgccctaacccaaggtcctcacctgtaccaccatgagggtcttgctgtcaccactaagcgaatcctgcagcaggtaggtgagcttggagttgcggaagggcacgtggccctggcgggagcgcagggcagcaatgacgtcccccagagccgacagcgacttgttgatgtgctgcgcctcccgcaggcggctgccctcggcccccgacttgcccacgcgctccgagccagccaagtccaccaggttcagcttccctgcagggaaggcacccacctgatcaggcctgccctgccccttggggttgtggggatcctcaggccaggctgcctgccactctcacccgtggtgcggaggcctgtgctgcagtccacgcctcgcaccgtcacgatgagcagcgcgtgcgagcgggagctgtgctcgttcaggttggtgaactcggtcgtgcgattagtgtggccaaactcaaacacctgggggattgggaggagggcagaggcacagcgttgagaatggggtcctcagagtcacctggccccaagcacccatgaggagtggcaccaccctccgcagtttagatgaggaaactgaggctcagagaggcgtgcggacttgcccaagggtgcgtgcttaggacacagcagagcctacattcaaacccagttgtgtcctctagagcagtgtggctgtggtcaggggctcccgcctccacaccttgttgatgtcgtccacgctctgcacttggaactcagtcagccctggtacatacagctgcccactgccgtctgggcacagccggatctccagtttttcctgaggctctttccctagcaggtccctggaggggcaggtgagacagtcaccccctcctcccatttccagctgctgtttgcactgcacccagccccccagccaggaatgttcccccaacccaggaagccttctccagccatcagctgagtgcatctctcctcctccagctcctccaccgcattcagctgaagacgtggagatctcactccacaatacaatgagcccctgttggcagggcccctagctgcccactctcacccatggccacctggtgtagcccacaggtaggggcaaggattgcctgggtctcagagagagcccctcctccccccagaaccatccaacccactgggctgagtcaggacttgcagccaggtcccttgacggcctcatctggtccctacactcccttcaccttgacggcctcatctggtccctacactcccttcaggaagaccccacttcctatcccccattgctccagcaccacccctgaggatcccaaagctgcccctgaggcctgctccccacatactgggggtcccacctgaggacctcgttccagcaccaccccggaggaccccaaagctgcccctgaggcctgctccgcacaccctggggctcccacctgaggacctcattgtagatctccgcagcgctgacggtgatggtgtactcccagtcagacgccttctcctgcacctcggagaagagcagctgcagggcccgctggttgatacctgggttctcagcggtcccctggggacagaaggaaaggccccagtaagccaggcctgtccccaaagacgctcgtgtggtgtctgtccccaaagccccttgactacccctcacaagcaagcctccttgcccaaagctcttacctacctgccactgtcccccaaaatgccctccaccagctgcgggcaactgcacctctatttccccaccattaaaatggcatcgccctgccaggactaccctgagacttatagtgcagcactgggatgaggggcctggcccagaccccacacagggcagctgagggccagatgcatgcctggccctgtggggccacctgggaggggcactggaaatgaatgaccccaccactgcccagaaaggcgctcagtctcagggaggctgagacctgggctctgtgggtggtagagaggaggcacaaggaggagcgggccagtgtcctggggaaggacgggtgggccggcctttctagaaggaaacctggagtccccacccgggacctcgaggccctgggagcctggccctcacccctcttctgatagcacctctcactcactctctattccggccacaggggcctcctggctgggcctcaggtgcccctggcatgctctggcctcttggcctcagccctgcagctccctctgccccgggtactcctctgaccgccccttggccggctccgtcatctccctcagggaggctgctcccaagatgccccctcagggaggctgctccttcgcccagcacccccaaatgccctgtccctccccctagtcagttccgcattcctggctttatttttctccctggcctgacaggacacttgctgatttgtgtggaccctgctgtctccccacagccaggttggccctgtggggagggccctctgtgggggcagggactgtttgggtcacagctgtgcctggcacgatgcctgatacaccttatgcatcagcagatacacttgaggatgaacgctctgatgttcctggtggtcacctcaacactaagcaatcccaaagcagagcggggagcccagaggatgccgcacacatccccttcctc

SEQ ID NO: 96353 - DNA, 27147 bp, Homo sapiens
aatgtttatgaatgaataaatgtgtgtttaagtcaagcatgtgtgatcgataatacagtctttaccctcctacgagctcattgctgctagggattgggttctatatttagtatactttgcgcattaaaagaattcagtaaacatttgttgattgagtgtttaaaaagtgctaagttgggcagtccagtcattatatcctaaaatgaggtatggccccataagtctgtgttgcttctgtgagggtttccctgactttgaagtgctcaaatagttcatgttcttggatttagtggtggcacaggtagcagatttaagtgcttctcatgcaaatactcagctcaaataaacatgtttccacttctatgatattctataagtcagtgttttctgtgaagcagggagccccctgcattaaattcacctgggcagggaggtgaggtgtggtgtgtgtgggtcttattaaaatgcaagtacctgggccccactctaatgctgtggaatcagcccagcaatctgcagtttagtgtcaggtgattcctaaatcttgagaaccactgcattaagtctgtaggtaaatttgatggctaaactccatgtctgcttctttcattttttagccattgactgggttcagattgatgccaattcctcagttcttcatgatgaattcattgctcacaggcttggtgagtactccttttactaggaggttaaagggagggtattgtgcctagtgtcaggagggggcctccttccagcctcacccccagaaggcttctgggttctcattttggcttggctgtttggttttctttaaagtgcttttctgttttttacaggattaattcccctcattagtgatgacattgtggacaagctgcagtactctcgggtatgttgtgtgattgggtggaatgtgaggtttggtggggaggctttggttctcaaagggatttttcctgacatttggcatccagcttgaatactgttgtagttctggaacaacaacgtggagatgttgtctagagcctgggcaggccttggtcctgcgttctgatggggcttcagattgattagcacgcagaacatcagggagtgttgttaggcagctccaccacagtgcccatttatacttagagtggaggttcttccttccaaagcatctcttcccagtagcaggggccttaggatgctacaggagtcaacagaaggttggggtaggcaaggagcagagggaatgggagctgtctcacaagagcagctcctgggggactagtcctggtgtctgcagattcatgctgtcccctccctcgcaggtgatgctgcttaaacatggccacactcttagtgtctcacccccttcctcctggtcgtgtttgctccctgatggcatgttaacaggccttcagagtttggagagagtaggataggagtcggttaccttcatcctttcactaggctgcattacacagcagcttaaggctactccctcttgatggctttgggtgatccagaatcagtccattttctaatattctcaagggccatgtcatttttgtgatggctaatttgatatatcttataaatatgtgtgtatttttaaaaaagaaatattcagctggatgcagtggctcacacctgtaatcccagcactttgggaggccgaggcgggtttatcacgaggtcaggagatcgagaccatcctggctgacacggtgaaaccctgtctctactaaaaatacaaaatattagccgagcgtggtcccgctcccaagtagtcccagctactcgggaggctgaggcaggagaatggcatgaacccgggaggcggagcttgcagtgagccgagattgcgccactgcactccagcctgggtgacaaagtgagactccgtctcaaaaaaaagaaatattcaagcacagaaaagcatggagctagtgtaataaatactcatgcttctacctaatactacgttgtcacattttaacattttgccctatttgtttcagatctccagatttttgttttttaataaataaaacatagatattggtggggaccgttgtacaaccaattaagagcaatttggcgatatcttacataaagatacgcatgctctatcacctagcagttcctttcattaaaattttttctagtatttattgcacaaagatggcatggtctgtctctctctctctctggctttttctgaaaatctgtagaaaagttgaaaaactaaaataataccctttacttttcacctatagttaccaattaatattttacatttgctttatttttcatatgcaaattgttatttttgctgaactgtgtgaaagttgcagacatcctaacacttccaagtacttcagcatgcatttcctaataagaatagtttcctacataactacactttcattgtgcctaagaaagttagcattaatctgtaatatcaatattcagattttcctagtttttccccaaatatcctttattgtttttctgtttgtttgtgggtcagtcttgatccagtgaagattcatttggtcctcatagcactttagtctcttttcatctcaaacagactcctctcctttcagtacattttttttaggttaaataccttttcatatttttatcttccattacattttgattctcccatttcatatttctttatttttctattttttcagacaggtctcgctctgtcacccaggctagagtgcagtggcatgatcttggctcactgcgacctcagcctctgggctcaaatgattctcctgcttcagcctcccaagtagctgggactacaggtgctgtgcaccaccacacccaaaaaatacaatttttttgtattttttgtagagacagtcttgccatattgcccaggctagtctcgaactcttgggctcaagcgatcctcccacctcagcctcccaaagtgctgggattataggcatgagccactgtgcccagccccatttcatatttctaaaagtgattctgtctcaagggtctgggttgccttcctacctcacctgtgtgtgactgcagacgacctaggtgggacctctagctgctgcttcttcctcagcatgcaaacatcaaaagagtgttgggttttcctcactggtgtgagggagagaacagcttgcttgattgcatcctagtaactgtcttcttgcctgaagtgaaactgcaattaatagtccctaacatgggaatgagtcagttgttttaagaatggcaaaatgttaataattatggaaggtggttgatggttatgggatggcagtttcttacgtgcttctctatttgtgtatatgtatgaaattttccataatagaaaggattttttagaaaaggttagtgtagaacttgaaaggtacttttttctgttccttggtggttttattttaaatgatggttacattcccaagctggtcctcttagttcttgggaagctgaactatagagtgtgaaagcattctcctgtgcctcatagccttggttctctgaggaagagtagttcaagggccagagggagatgttagcaatatgtccccagaggtggcctggcagctggtgggagtgggaaagaaatgtgcgtgccagtgtatgtataagttgtctctaaacttgggcagtccatgagaatggtataccagattgtcacagcccacaagaacctggatactgatgaacccctttttacaggtgaagaaacttaaggaactgggcattagatgcaggaagccaagacaaggagccaaggcaggagttgccatctccctttgactcattcctgcttcccttcctgccttaggactgcacatgtgaggagttctgccccgagtgctcggtggagttcaccctcgatgtgcggtgcaatgaagaccagacgcgacatgtcacgtctcgagacctcatctccaacagcccccgggtcattccggtcagtgcgggagagcatcctcttttccctgggatcttttctcttctctggctggctccaagtgggccagactggggttgatccttagaaaatgttggctttccctgttaccctctgccttaatctgatccctagaagtgctaattctggattcctcttgggcatcgttagcatcgttggtgctgcgcaccctctatcacccagggactcttttaaaggccatggaattgttttgcctgaggctaccaccacaccctgaagtgggggttggagtcctgggggcatctgtgccaccacctcgtcaggtgttcgttccctggttgacagattgcagtctagaggtgctgggatatggatgccagaggaggtgactggggaggtgagcagctaatgaatgcctggtggactccctacaggtgacatcccggaaccgagataatgaccccaatgactacgtggagcaggatggtaagtcttcctgacctgtcaccgtgtgggccagcgggaaggagggaccagacacagcctctcgtgctgcctggtctcctcgaaaattggctttagaccgtttttccagatgtgtgtggtcttgcagtggcactccaagtcagaatttggagaagcatgtctctcctggcccttgactgacttgtgcctctccctgcagacatcctcatcgtcaagttgagaaagggccaggagctgagacttcgagcctatgccaaaaagggctttggcaaggagcatgccaagtggaaccctactgcaggggtggcttttgaatacgatccagacaatgccctgaggcacacagtgtaccccaagcccgaggaatggtatgttccccttaggagtgatggcaggcatttggggtgggtgtggcatagaaatggctgttgttgactgagatgtggcaggctctctaggaacttgggtgccccaaaaggagcagtggcaaccttgtgctgacctgtgtttgacctcaggccaaagagtgagtactcggagctggatgaggatgagtcgcaggctccctatgaccccaacggcaagccagaaaggtaagagcctggttggacatgggaaggtgaagtgtggaagaagggatggttttggttcaggccgtgagttaggcattccctctcccccacctcgcagttctcataagctgaggaggggctgctgactgctaaactagacctgtggtatgtgcacatcccaggggcaggtcgtcagccccttttggtcactgacaaagaggaccctccatttatccaggtggttcctgttctgattttcagcccccaaagaagagattcttcaggtcaacgctaggggcagagatttggacccaagttccacagggtgactgtgaaaggtctatcactggtcactgctcacttggttttccactctctcctcagggggcatgcatacatacagaactttaggattttcacaggtaccttatgaggtagttgtagcctccttgaggttgtgcaaagtgtgttgaaactaccctatgtaagaggttttacatgaaaggaagttagccctggcccaaggtcaagttccatgtgggaacagagccaagacccggaaggaggaagggttgtccatggccagagctcgggtcggccagcctgcctcgcagtgcactcactggactcttgcctcctaggttttactacaatgtggagtcctgtggctctctgcgtcctgaaaccattgtcctgtcagccctctcaggattgaagaagaaactgagtgatttacaaactcaattaagccacgagatccagagtgatgtgctaaccataaattaactgcagcttgcctgcttcagcaaaaacggagattcaggccagcagctggatatgggggtctctcttcagactcttctcgtttctgagaatctagtctactgttggttgagcttcttggcaggacatcagtaccaactagaagtgggtcatagatagattaccagggatgcagtggtgtttaggcaggataggtctttactggccctgactgctgttaataattggcagcagtgctccccagatcccagaaggtccctgctggagtgtttccagtgcacctgtagggaaccaactagacttctctcctggttagtccagctctttactctaaaccctttctgtccaaaatgagtcattttcagttgtaccttagatgtctggtgttgaggatcaagtgccatagcctttattcagggggcctataaacccttccagttcttgccccagggctggcctgctagcgcttcaaattcccaggtgtccctaatttgagaagtaaccttttggaatagcattagaccctggctgtcccctccccaccaaataaacatgatatttcattctctgtccagcagtcatgaaccccttcacctccaatgacctgatcatttagtttggtgggggtgggggtgggggtgggggtggaagcagccgcaggagcaagggcccctcccacatacacaggaggagtatttcatttctccttaatgaaggctctggccctaacccctcagcactgtctccagataggaacatgcacaaagcagttaattaggcagcctggagaaaaccagagatccagtacagaaaggaaaggatatttattgattaacagaagttgtctttttaaaagtgtttatttttggcaataaagagcacaacataatctccttcatgcgtcatcgtgccacttagctgagccagccagctctgcctccctccccaaagacctttggaccccagttcccctctacaggctagctcatccctctgggtggtcattccccgggtcacgttgagagcgaggctgactgcaccacctccctagctcaagggctcctttgggaggggccgcgtgctttatcatcctcctgccacaactcaaatagtggttatttacaagaaggtctgttcccacaaatcaggaccctaaagtattaaaaaacaaaacccaaaaaacaacaaaaaaccccacacaaccaaaagtttgacgtgaatagaaagatagcccttctgcatggtagtcaacaaataccagcactagaaaatcaattgctttaattgcattgcagcagggagcctcagcaccatgtggggaggaggaaatgggaaggtcttggtttcagagtgcttttggctggccagagggtggccaaacagggcaagggggctccctctgcttgggcattgtccacccctggtcagtgagaggggggcagcaggggtgctccccacggcagtcctgctgcggccttccctcctggcctattcctggggcaggaacaagctccagccttcctccacatggctgaggtaatcagcacccctaccccaggggcatcttcccagcctacaaagcaggaaggagcctgtgcagaagttacattttaaaaccagattttcacctgaggcgtcaaccagatgtcacctctgcttaaaactccaactgcaaggctggcaagcagcacagaggaagtgcagatccttcctgtgtcactccaggcccagaggaactgagaagccacctgctgttccggcccttgggctgtytgggaaaagccagcagtcagagtgccagcctcaagctctgattatccccctcctgtggccctggtagttcaagcaggtcctggcagcaggagggctgtgccatggaggatggayacgactgcactcatactcaaaaacagccttgaccgtggcctggtcatgggattaaaaaatttgtgtgtattggtggggaaggatggggtgagggtgaggggatctcattgatacagagtatgtcataagccatatatattaaaatcattaacagtatatagtcccacggtagctccaacccctcacacatgctcaggtggtgtggccagccctttgcctcagtccagcctcatccttgggggcaaggagggggcagcttgctccctttctccaggctcttggccgacagccccctgaggctgtccacggtacactgcagccagcccsgcagcaggcagcccccagcagtcatcggtgctcgccagcactgtggtcactgggatggggtcttggcctcactgctgtccccctggctgggctttggctttagcaggatgaatctgttgaggaggtctgtttccgagctggcctgggctgccccatacccctcacctgtgggcacagaagcaggctcagaactcagagctaggtcaaaagacccctgcccaataggcctcatcctccacaaagcctcctggcaggtgggtgtggggcatggaagcgactcaccagcatagctggaggcttcggcgatgttctgggaaccagtgatgtggtgccagtaggcactgcgcggcagcatggtcgtgggtgtgcagggatacgagtaatgttccgtgcccttgttcagcagctgtggggcaaaggaaggggtcactcccattagtggcttacagtatccctgagcagccaccccaagaccctacctgcctccactgtgtaccccaggcacttggccctgcctgcccgcccgttcccccctccccccgtaccctggactgatgcccgctgcctcaccctcacgttcttctccatttccagcaggacccgcttgtgctgctctgcgatggccagggtggcactgtggacgcgctggtaaatctgctccccctcttgtgtctggaaggtatagagtccttccccagcatcacacatcctggggacacagcacagagggcaagatggtggggacccaccacagacatgcatgtgattagttaggctctcttgcaactgcaagttgtggttgcattccaggccgggaggacaggtagggctgtggtctgggggtccgaccacacggtgcaaatgtgctgagcatattctataccagctggtgcttgaaatgcattataagaattaacccattcagttttctctaccacctccctctggtctctgtaccattaatggtttcctcattgttatgcattttcccaaaccattttatagatgaggaaactgaggcatacagaagctaagtaactcaaccaaggttctgcagaggattatatggaatttcagtctaggcagactgactccagagttcaagtgaggggatacccagtcttcactataattctaggaggttaggtactttattatccccgaaacccagactcagatccacagtcacagaagtagtaagtgcctgaacctgcatttgacttaagccaaagtagtatatgatttttggtaaatagcttcacttgacctgcatgctgtgggcaagttactcctctaagcctccatttcatttcttcgtctgtaaaatgggaacattacattcccccttgggaytgctaggccaataagtaaaccaagytcctagcacagtgcccaacacagagtgaatggcagccaccatcacaccatagtaggacagggctgggaggcgagagggtcctaccggccagcctcgaaggtaaagcgtgtggcatcccggccatagcggcgcagtgagcagaggggccacgagacgagcttcacacgggggttgtggatgtcccagaggtagatgttctcgtgggtgatctgcagcttgcactcgccatacacgtccaggttggggcagggcagcaggaagacattgaagcgatctggagtgggggagggtggacaagtgggaccagagttgccccagatggggacttcctccctccctycctctcttcctcctccccctccccacccccagggccagggcccggcctcacctgtctgttcacactgcacccctggggccaggaggtcaggttctcccagactgatgtcgttgaggcgggrccccagacactccacagatagtgtcttgtaccactcctctgcctctagctctgaagaaaatgctacttcatcatgcagctccrgagcccggtagcccaccccgtctgcccagcctgacttatgccaccatgcacagcagggagggtaaggacagtgggttctgcctgcctgtcttgcctcaaccctgagggcctgctccctgaaagcacccccaaccccacacacaccacaccaccatctccacccagggttagccctgctctgcccgctcctagctggacctctgaccaagaccaccccaggggaggcagatggaggcccatactcgcgcctcacctgagtcgcaggtgaaggtacgtgccgagtcatcagtgaatatgatggccaccgcctgccgcttggtctccttggggagccgcgtaacacacttgacgttgctgatctcagtcacctgggacagcatccacaagggacttagccaggccagtgcatctctctctctctctctctctctctctcctccctccctctctcccccctcctccttctctctcctcctctccctctctccccctttctcccctctctccctctctcccctctctccctctctctctctccatcccccacagccctgccacttgggggagctagggcccaggcctcctaaccttggggcagccccggaggcacaccgacttctcatctggatacttctccagccgctggggccccttgctggaggatttccggaacaccagccagcacctccggtagatctgtggagcgagatgacagggctcaggcctccctggaccactcccaccccaccagcatggccctgcagccacccctgcctgccacasggggyggtgccgcacagccttccctggagccccagcctggggacaccgggggtgggagtcaccagcagtgtcacctccctgggagagaagcctcctccccaaattgaaaagtcattgacttcttggctggctccaaaacgctgttccacaaagggtgctctcctgacctgccatgtactgtgtgcaccgctgagtttagtgtgagtagccaacgttcctgagtgcttcctgctcacacctgttattagcactgtgcacagtctcagggccactcctgagatcagttctgttatcatccccattttatagatggggaaagggaggcatcaaaacactaaggaatggtgatgctggtatttgcagcaggctgtctagatccagggcagaccctcacagcccactgcaggatctggccagggctcaggcagtgccagccacaacagaggggtctcctggggatagggattagacccttccccctgcccacctgtacatccccgtgcccctagttctctgagtcaggtgagggtctttacaaaggtaacccccactcttgtctcctggggctttcactcaccctctcttttcattctcttaccaaccctgaaatgtaaggggccctgctccagctgggaacccaaagctgtttgaggtaaaggggtggagctaggaatctgaggctcctcccacagcatggtgccttccctcctggccctggccactgctgatgcccctgtaccttaaactacctacattctctgtagcttcagggactcccccaagggggtggggagcagaggggagtgaccactctaggattgaagggacagactggcctatcattcatgggtggtggagagggagttggccccagccaccagccagagctgcccttgcatgacccctccctcctgcctagacttttttctgcccaaagtctgtggctggggtttacctactccttccagcgggcattccaaaagccygacagagcctgttccccaggcatctctggtgttcctcttactggaaacagtagggagactgagtggtggccgagagcacagcagaggaggccagggggcctctaggccccacccctcctcggccctrctgtgccatgcgtacactaggtccttggcaggcagggtcccagggtgcagtggccctaggcagcccccatttcaagataccactcagagccaggccatttctggctcctatctgggaccctaggaggcatgtctgctcctgcacccctgaccctggcttggcccctgtcctacccacctaaaccacagcagccctcagctctcagctgcagcgctcccttaagacagacactgaattttatccacagaatcctcactcatatcctggtagcctcattaacagccatgctaaacaagtgaatgaccatatgaaggaaccgtgaatgaatggatggatgaatggatggatgctgccgacccagatacaccctgccagggtgggctccatgcagcccgcagcatcaggggcagaaggcctgggggcctgagcatgccggttgcctggttacaggatacacattcacagccccagggagccacgcgctcaagagccctccttcccacttcgcacagggctttgatcagtgcttcagaaacactctgccacagctctgccrcgggagaaaggccctggcaggtaggagagccggctcctgatctctttcagcccctcccccctcacctctgtgggctgagatgagaatggctgctggggagggaccrcagcctctcacaccaggggaagtgaggctcctggcttcagagggaagagaattccctgcatggatagggcctggctatgccccacctccccatccaggctgtgcccacctgtcagccactcagtctccctctggaacaggtttgatactgagcccaagtggctgcccttgtggctggtgccttcctggcacactctgccctgggcaaggcctcagcccagctggcccctggggacctgctaagtctggggccataggaatgagaagtgatgttagaagcgaagcctctgcttccttggcctccctacctcagcctcagcttctctctttgttctgtgctccaagtcagtgggctgatccccctttcagaggaagagcaaagtagccgatggctgccagggcccagtctcaactaggttgagccccagggcagggaggcacaggaggggaagtggggccagaaccaccttctccaagaccagccctgctctgtctggtacccaggtagggaagctgggtggcagatccctctcccactccgcatgccccccaaccccactcaggctgagccagggatccttgagcagcctgagccgacccgcccccttcaaggcaatgggagagagaagggagaargggacaggagtcctgggtcaaacacaagacttgggtgacctcagtcaccagggctgtccttcctacaggggaaggggcaactgccagacctgtctttggcaggggggcctggcagaggaatagaggcagctctcagacagcctcgccgagatcatgaagttgatcccctctgctcctgtcttctagggggtcttcaccagttgggggtctacagagggtaggacaggatgcatgcccagtaagacctcttctctgtagcccctccaagcccccagttcagggccaagcaccaagcaagcacagagtcacccaccaacaacttggagggaagcagcctgtcccagagcactggaccattctgcccaaagttctcatttggaaaccacataaatatcagcttcagtgcctcacaccaccccgtctcgcccagccaaccactccccttttcaaacacttctttaacattaaactcgacaaccaaaaatttactaaatatctgcacacggaaagcagtcagaagcaaggggagaggatgacctaaaagaaaagaggccaggagaggtgaggggaggccgggggtggggggcaaacggaagggagaggaggccaggggaagtgagacgctgcttctcagctcagacacagcccggccttgccagccgcccctgctgctgctgtggtgacaacttcaacaatagcaggggagccgyctgcccatcggtggccaccattgctgccactaccaccaccactggcccagctgttgggatgccagccagccctctggggcgggggctgcagcaggcagaacccagcccaggcacatgccaggcagcacgctggcgaggagccccgagaccacagatgcacgatgcccggcagccggagggcagccgcgtgccccacgcgccatgcctccaagcctgggaccgagtcctcgggcccccatcccttggcagggcccctccgcagctcagggtcactcaccccgagcttcctgctcttcatcttcacgtagccttgcttgacgatgtcactgaaattggtcgccatggttttcccaccttttaggggcgcggggcctggcagaggcgaggggaaggatgcccaggtgcctgggtctccggctcctccaatcacctgttccagacactctgtcggggctgccgcgaggggctgctcctcacctcacccgcctcagcattgttctagcagctccttcgccccgcgcctgctggaaataaaaatgacagggagattagagacagtgacatctttctcttcctctcgctgtctcgctctcttttttccttcctcttcccacactcctcctctctccctcttccctccctccttcctcccgcccttcttccttcccttccctccccaccccaggacgacagaaccattcaggaaaaccgaggtggaggcggcagtgaggaaaatggtccagcccagtcccctccctcacggctggggctggcagttaaccccttcctgggaggactggctctggctcctactgtggaggtggggacccaggaagggaagtggcagggagctgctgtccctcagcactttgggatcgtggccccatcaactgtgataactctggtgcaaatttaggtcaacttgccaagagcaaaagccccttcctgggtacaagagctcccaggggtagcagggaagcgcttcccagagatggaggaggagggtcgcaggagatgacccctgcgtgtctgagtgaaccccatgctctgcaatgttaaagacaatttgcctggtcagctcagcagcccccacaaacccctctrccctcctgccccacccggtcctctacctgtttctctccagccccaggctaagaatcactacctcgagctcacgcagggcctgttcccaggccctgcaactcttccgcacgcagctctgggtgctgcttcctgggtgggagggcagagtccagtggggcgggcctccagataagcctgaggaatgtgctgggccggctggaggtagccactgtgggagcagacgccttgccctggccctggggttgggaacgctggccagtccgtgagggtggggcccgggccccaacaggccactgggtctggccaagccaagcaggccctccatgtcctgagcatgggcaggagttaattataggagtaccagtcagggccctggggcaacaagacatgcaggagacaatgtgggataccaaggggaggtagatatggagcaggaagtgggagtaccagcagagccaccccaaatcaggcagatctacagacaacaaagactcagactcagggggaggctcagtgttgacccagtctaaccccttcattttatagatggagaaagaaaagttgcccagagagggtaagctacatgactaaggtcacacagcaggcctggggcagagccagggatgaaggagaaggtccagggtggtgatggagaccagtctgtggggggaacatcctgctgccgtctctggctgcctgccaccacctaagccttccctgccatccatcctcgggggcagggttatgccagcaatgtggcccctgtgtcttcaggatcagcgggtgggaacggagcagcatttctggggtcagctgggtatctgtgctgccagaacrgggccctgggacaggcatgctgctggttgtgccagcagcttggcattaattaatgtcctggaggcctgtctgttgagtgcctaacaaggaacagatgggactaccccagtgggcacacgcacagatgggactaccccagtgggcacacgcaaacaagggaggggcagagasggtaatgcgcccctatcccacttgcaccctgatagcccctcaattccactcctgcccattcactgcctctatcccagctccctggggtccaagaacctcccacagttaggcagtctacattcctcctataaggtctggtctggggtcccctcactggcaactgatccccaacagctctgcyacacctgggctctggcagccagagatgggtcaattttctcagctctgtcttcaccgcctgcctctggggctgccttctcctcagagcaaggaccagctcaggagttcctctccaagatgattagcaggctgaccactggctgtgggtctacagtgtggaagcccccagtcagaacacgcctacaggaagccactggacccccaggttcatccaacatagctcagacatagcacagcccggagtgtgaatccagctggctgtgtggtcctgggcaagccgcttaagaccctgtgccttaatttccccattggaaaaaaatgagaataaatctacctactttaaatgaggaaatgaattcatgaggcacctgcttgcccacttgggacacagagcttctaccctttttctttttctttttcttttttgagacggagtctccctctgtcgcccaggctggagtgcagcggcgcgatctcggctcactgcaacctctgcctcctgggttcacgccattctcctgcctcggcttcccgagtagctggaactacaggctcccaccaccatgctcggctaattttcggtatttttagtagagacggggtttcaccgtgttagccaggatggtctcgatctcctgacctcatgatccgcccgcctcggcctcccaaagtgctgggattacaggcgtgagccactgcgcccggccttctttttcttcttttgagacagtgtcctgctctgtcacccaggctggagtgcaggggtgccatcacggcttacggcagcctcaaccacccaggctcaagtgatccacccacctcagcctcctgaatagctgggaccgcaggtacataccaccatgcccagctaatttttaaaaacttgtttgtagagatggggcttttgtttttttttttttttttttttgagacggastctcactctattgcccaggctggagtgcagtggcccaatctcggctcattgcaagctccgcctcccgggttcacgccattctccttcctcagcctcccgagtagctgggactacaggagcccaccaccatacccggctaattgtttcatatttttagtaaagacggggtttcaccgtgttagccaggatggtctcgatctcctgaccttgtgatccacccgcctcggccttccaacgttctgggattacaggcgtgagccactgcgcccggcccctagagatgggttttcaccatgttgcccaggctggtcttgaactcctggggtcaagtgatccacaaggctcggcctccctgagtgctgagattacaggtgtgagcaactgcgcctggccagagcttctgccttgaaaactccaagggctgtgtgtatgtatatatatatagttttcttcaagagttgctgcccagacagggcggtgaaaccaccagaagccarcctgctccttcccagtgttgccccaccagggactgtggccccaagctcgcaggagtgctcctgctgcgtctgtccataggccccaccccgtcccataccccaggtccccagcgggaagagtgaccttcacggggaaggctgggtgccaaagtcctgccagctcactccggccctgagtcacagggacccctggccacacttagtccctaatgatgtttgcaagagcaagacctaacctaggacccaaaatggtgggcaaagaggggttsggaaggggagggaaaggtcagggccaataggtggacccacaaatttgacaggcagtggggtcaagtggtgaggggggggcccagaaccaacccaccatcctccagaaggaatgcactgtgttaagcaagcgaggcggcccccaagctgagcctgtgaaggcccaataggacagcaagaagtggagagcagaccaggcacagtggctcacacctgtaatcccaacactttgggaggccaaagtgggaggatcacttggggccaggagttcaagaccagatccggcaacatagagagaccccgtctctacaaaaaatgaaaaaataagctgggcatgtggcacgtgcctgtagtcacagctactggggaggccgaggtgggaggatcacttgagctcaggaattccaggtagcagtgagctatgatcaagccactgcactccagcctgggtgatagagtgagactgtttctaaaaaatttcaaaaaaatcaattaaaaaaatacaaaaattggagggcagctgaggctaggcaggccaggaattgggttgaagtagcccctgccctgtttgtccctcaggcccttgtccccaacaggcctgcagcaggaagaatgcttgctactttgagaggacctgaggtcttgggtccttccccagcactgtgagctccgagctcccagctaagcacggtgtccagcagtcgctctcagggttccagtgagggaggaggggagcaagggccccccgcatcccacctcccagcctggtaccaatactgctgcttacccagggacagtacctgcctggtgccaggccaccacaggtttccgcgcagggagagccagctccaaaatgctcctctccccaggaagggctggtgtcctggggtggcggggagtagggagactcccagggccctcactgcccacctgccccacagggcagccatgctgagcactccctctcgcacatggattctgcctggaggctttggctccagaacaaacgcgctgaggctggcaaccaatgactgagcgagcggctgcctgcctggctgggcctccccacccctgacagatcggatcttatcagggctgcaggaacagccctacctggacaccatctcagtgtcgtctggctgtctcgatccaacggcgaagattggatctgtgggattctctccagcaccagagccatttcccatcacctgctgctctgcccccaccccaccccaagattgttgtcagaggccggctgggagtgctcccaacagatccccataggggccaccggccaaaacatggtgagtcccatcaaggtggatggcaaagacagaccaaatacccatctaggcagacagggacggcagaaggaggggacatctgaacagccatggtcccccagacccttaagccaggagagtaatgctgtggccccgtaccactctggttctcctgggtcccctgcccacccctcaacatgccaaaacccctccctcgagggaccactgcactagctgtttcccacctacaacattgttccctcacatgctcatggttcattccattgcttcatccacctcctccaggaggccttccctgactaccctcaccaaaggacccccactagtcagcctctctcacaacatcagatgcggctgtcttcatcgcacatcaccatgggattttcttgttcttacatctgtccatttgtttctggccacagagagacatctggaatgtcagctccctggtggctcggcctcgtctgtctagttaacagctctatcccagctcccagaatggtgcccggtgggaaggagatgctcaatatttgggggctgaacacgtaattctctccaggacttgtcctcctccccatcctttcttccaccaccaccagcctccatctggctggacctggctcagcttccagaggtgcgtgagccacagtgggctcccagctcctgggtctcagcgctgactggcatggccagcaggctgttgttactggagaaccagctgtgcccaagacccgcagtttggttcagagctgcctcagggaagagcatgctgctgacatcgaggccaggcctagttgggcggccccaccttggccagggttgtggggtgaggtcatgcccagccctgctgccctgcccaggagggaagtgctgggagtaaccagtaccagcacagcaaggcaagcaactggggagaggaggcacagctcctgggatcagagttgggggtgggggcaggaagagcctgtaccagcgccacatccctctgaaagggtccaggaaagaacctgccctaagcaagcccacctcacactgcccaagtggagtctcctagagatactgccaggcccctcgctgccctggccatcagacccctccaacccacaccctccatccaagcggaagcgccccagcaactgacgtgtccccatggcttggggcaggcaggctgcacagagcccctgctctgccacatcacccaggtgcccagcctcggctcatgccccttttcagtaatagaaagcatgtaactggatctagggccttgcgggccctgggggagaaggtggacaggaccttgggggccaatggagaaaggttcaaggacaggaggcagctggccatgagtttgggctgtggggagaaaccccataggcaggagggggtcggcagtgggggccagctggggtacagaaaatcatctcttggaatttggaggaggtgagcgaacaggaggccccggggaggagcaggaaggcagagagaaggttgggagctgccaggggctgggttatgccccttccgggggggcaggcccgggagcgcagggcctgggttgctcggatgaggtttgtgtgggtgcgggtgaggtcagctcgcgacctgggctcccccggagaggaaagctgcgggtggagagagcgcagggagtttcagggcccaggcactggcttttggggggcgggtctctaagctccccacccgagagtaggaaggtcccatgggacggagcgtcctcaggttcaggaagtgactgagggtcctcaggggtgggagtcgccgagactcttgcaggctctgggcggcctatgtccccctccctgcctcacgccccccaatttacctgggcgccgaggcccgggccaggagcgcctgctcagcggcgccgcggagcaggctcatgcccgcgtcacggcgcggctggcgggggcggcagggcggcggcggcgccgggctccaggcggggacggcgagggaggcgcggccgcagggctagggatcgggctccggctggggctccggctgggactccgctccgctcccccctccgccaggtctcgccgctgcgccccgccccctgccccgccctggcggccggcccccgccgtattcctccgagccgcgggacgcgcgattctgccctggcgccctggcacccccgcacccgcttcaggtcgcccccggtacccccagctcattcccaccgcccctccctgggccccaaagcccacatggcctctcagcccctgaaagctgaactccacatcagctcccagcccccacatctcaaccccttcacttcttcaggaatcacatacacacccatacgccacatcagctcccagcccccatatctcaattccttcacttcttcaggaatcacatacacacccattgctcccctaaccccatcatgactctctgggccctcacagcccagctctcccagccccacagtgacctcctctgctacccctcctcaagtagccgcaccagcacctctgtcttccctggtctcctctccaccctcaaaacatccagttctcccattctaggtccccctgagactttgccctcaagctcaaacttcattccccttcattgctgcccccacccagcccccaaccccctcacctctgcccttcgggcctgtgcagtggttgactcactgatctgtcggaatccccagtcacaggcctcagctgtgccaggcagggacaagagaagttgcccagtgcctcctctggggaggagctgtcccccctctggttttcacgtctgtacctttttacaccagggcttctcaaagtgtagtccctggaccagaagcttcccatcaccttgaaacttgttagaaatgcaaattccctgccctactcagacctatgaaatcagaatttttgggggtttccagcagaaatgtgtgttttaacaggccaggtgattctgatgcacacgaatgtgtgagaaccactgctttagaccatatatacaaaacaaaacaataggccacctgaacagccaaaatcctgagaaatgaaaatacctccacatccagctactgtccaggtgtctcagaggaataggcctaaagcagtgagggaccaaggatcccaacacccacccatggaatgcatgcccctgccccggagacgcctgggcctcagccttgcccagggagcttaaaaggaggctgcctctggatgtctgaaaatttccctgatggtcattgtggtgtctgtgatcagcctgagctaaccagccccaggcccatggccaagctagcctgggcctcaacctcctgacctccctatgcgtctttcaaacttgacctcacctgctttgcttcaaaccacagcccctaaagctcccagcacttgattcatcatagcaaactgtttttcaacaccagaaacctctaggggagctttggccaacaacaacaacacaaatgaattttcacaataaaaagccttctttttttgttactgaggctggagtgcagtggtgtgatctcagctcactgcaacctctgcctcggggcttaagtgatcctccctgctcaggctcctcagtagctgggtctacaggtgtgcaccaccacgcctagctaattttttggatttttttgtagagacagggtttcaccatgctgcccaggctggtcacaaactcctgagctcaagcaatccacctgcttcggcctcccaaggtgctgggattacaggcatgagccactgcaccccatgtgatgatttgcttttttactgttgaatttcgagagttgtatattctacctactagtcctttgttgaatatgtggtttgcaaatattttctcccagtttttggcttgtcttttcatccacttaacagagtctttcacaaaacaaaagttttaaatttcgataaagtctgaattatccatgtttccttttatggatcacacttttgttgcctaatctaaaaactctttgaattttctcctgtgttttattctgaaagttccataattttattttacatttaagtctgtgatccattttgagttgaattttataggaagtgtgagatttgatagaggttttgatgtctttttttggtttaggtttgatttcatttttttttttttttgcctgtggatgtctgattgttctagctctatttggtgaaaagactctcattgaattgcttttgcaacttcgtaaaaaatcagttggacatatttctggattctctgttctatttcactgatctgcatgtctatctctctgttaataacagtcttgattactatgcctatatagtaagtcttaaggccaggagcagtggctcatgcctataatgccagtactttgggaggccaaggcggatggattactggaggtcaggagttcaagaccagcctggccaacatggtgaaaccccatctctactaaaaatacaaaattagctgggtgtggtggcgtgtgctcgggaggctgaggcaggagaatcgcttgaacctgggaggcagaggttgcagtgagccaagatcgcgccattgcactccagcctgggcaaaaagagtggaactctgtctcaaaaaaaaaagtcttaaaatcaggtagaccagtggtccccaactttttggcaccacagacagtttcatagaagataatttttccatggatgttgtgggagtgttttcagcatgattcaagcacaatacctttattgtgcactttatttctattatgattacattgtaatatataattaaataattacacaactcaccataatgtagaatcagcgggagccctgagcttgttttcctgcaattagacagtcccatctgggggtgatgggagacagtgacagatcatcaggcattagattctcataaagagcctatgacctagatccctcgcatgcacagttcacaatagggttttgttcctatgagaatctaatgctgctgctggtctgacaggaggcggagctcaggtggtaatgtgaacaatgaggagcggctgtaaatacagatgaagcttcattcatagctgctcacctcctgctgtgcagccaggttcctaacagaccacaaccagtaccggtctgtggcccagggattggggacctctgaggtagattgttattaattcctcccaagttattggtttgtttgtttgccacaaggtttcactctgtcccccaagctggtgtgcagtggcatgatcatagctcactgcagccttgagtgcctgggctcaaggaatcttccaccctcaacctcctgagtagctgagaccaccatgcccaagtaattttttaaattattgtgtagagatggagttcttactatgttgcccaggttggtctcaatctcctggccttaagtgatcctaccagcttggcctcccaagtgttgggattacaggcatgagccaatgcgcccagccccaacttactctttttcaaaattgtttcagctgtcctggtaatattctctatctttctatgtaaattttagaataatgttatctatatctacagaatatcttgctgggattctgatagaaattacattaaacctgtatatcaattggggagcattgacatttttactatgctgagtcttccaattcaagaacacagtatgtctctccatttatttatttatttctaatgtctttcatcagcattatggagttttcagcatacaggtcctatacacattttgttagctttccacctaattattttatttacttatttttggtgattttaaatggtattgcatttttaattttgctgcccatgaatgagttcattgctggtatatggaaataatttttgtataattatattttgcaaccttgctgaacatattagttctaggaggtttttgtctttttttttttggtagattctttgagattttctacatagataatcatgtcatctgcatgtagaaaaggtttttttcctctttttctacctatttgttagtggtttatcgcattggctaaaatgttcagcactatgttgtagtatgagctgacatccttaccctgttgctgatcttcggggagagcattcaatttttcatcattaaggaccaacgttagctgtaggttttttgtagatgctctttatcaaattgtggaagtcctcctctcttattttttgagagctttttaccattaatgaacgtttaatttagtcaaatgcttttctatactaatatatgatttttcatctttagcctgtttttttgtttgtttgtttgttagtttttttccttgagacagagtcttgctctcttgcccaggctggagtgcaatggcaccatctctgctcactgcaacctccgcctcccaggttcgagcgattctcctgcctcagcctcctaagtagctgggattacaggtgcctgccaccacacccggctaatttttgtatttttagtagagacagggtttcaccatgttagccaggctggtcttgaactcctgacctcaggtgatccacccacctcggcctcccaaaatgctgggattacaggtgtgagccactgcgctgcacctggccagttttcttgtctttctttttgtgctacctttatctggttttagtatcagggtactgattttatagaatgaattgaacagaattcactcctattttctgaaaacaattttgtagaattagtattatttttttaaatgtttggtataattcttcaacaaaaacatctgagtctggagttttaaaattataacaataataatttttttaaataaaatgagatgggggctctcgtgatgttgcccaggctgatctcaaactcctaggctcgagtgaacctgctgccttggcttcccaaagatatttcttttttgggagttttaaaatttaaaatctaatttccttaattgttacaagactactcaaatgaactatttcatgttaaatgaattgtaacagtttgtgtctttgggggaagtagttatttcatctaagttgtcaactttacaataataataaacattaccttattattattattattgatgtcttcaggttttatagcaatattccttatttcacttctgatgtaggtatttgtgtcttctctgacatttttactctgtcagtcttgctggaggtttgtcaattttattgatctgttcaaaaaaaccaaatctttgttccactaattctctctctctccctctctctctctttctctctctctcattttagatttcattgatttctgctcttatctttattattcccttacttctgctggttttgaatttattttgctgtttttttctaggtctttaaggtgtcagtctatcaagtttagatgatatagagttcagatgacagatataagacttttcctcttttctaaggtgaaataaatgtccatattagtgctgctttaggtgtattccacaaattttgatatgttttactttcgctgtcattcagttcaatgtatcttttaaaaaattcccttgaaacgttctctttatccatggatcattcagaagcgtactgtttaatttctaagtatttggataatttcctgttctctttgtgttactgatttctagtttgattccattgtagccagaaaaaaacactctgtaagatttcaattcttttaaacttgttgaagtttgttttatggccaggacatggtctatcttggtatatgttcatgagcacttgaaaacaaggtgtgggcccggtgtggtggctcacgcctgtaatcccagcactttgggaggctgaggcgggtggatcacttgaggccaggagtttgagaccagcctggacagtacggtgaaaccccatctctactaaaaatacaaaaattagccagatgcgcttgcttggacccaggaggcggaggttgcagtgagccaagattgtgccactgcactccagcatgggcgacagagcaagactctgtctcaaaaaagaaaaaaaagaaaacacggtatgttctgctgttctgaggtagagtgt

SEQ ID NO: 96354 - DNA, 31261 bp, Homo sapiens
  misc_feature (1)...(31261): n = A,T,C or G
gggaggaaggaaggaagagagggagggagggaggaaggaggaaagggagggagggaggggaagggatggagagaggaaggaaggaagggaaggaaggaaaaggaagaaaggggaaggaagggaagaggagaaggaaggaaggatggatggtgggagggaagggagggagggagggggaggaagggagggaggggaagcaatgaaggagggagggagggaaggaggggaaggaaggaagagagggaaggagtgagggaggggaagggagggagggaaggaggggaaggaaggaagagagggaaggagtgagggaggggaaggaagggaggaaagaaggaaggaaagaaaggagcattctaacccagctgagtctgaacgcagtctccagatcagcacagaggtttgcagaggtgaaagcctcatgctggatggtgggccacgggtaaccaatgaccagaccaccagcttgaccaccaggagtgaccactgaaggtgagatctgaagtcactgagggctgagtgggggcttctgtccctgctttccccgagaggggtgaagtaagagccacccaagagctgccccatccccacccctacttagcacaaagctattttatacatttgtgtaatttgtagcaaaaattttggtcacaaacagtattcacctgctctgtgacaaccttctccctctgttactattattctgaggcagctttatatatatagatgccgtactagttccactttaaaaattttgcatgagatgataacggggtcaagtgttccacagaggttcgtgtcggggagaagcaggactttgtcctgggctagcagtattcttcttaagacccagggtttcatgtgagaggttttcaggttttttcaatgaagtttcttagaaatacaaatccactggtcgggcgtggtggctcacgcctgttaatcccagcactttgggaggctgaggcgagtggatcacctgaggtcaggagttcaagaccagcctggctaacatggtgaaaccccgtctctactaaaaaatacaaaaaattagccgggcgcggtggcgggcgcctgtagtcccagctactcgggaggctggggtgggagaatggcgtgaacccgggaagcggaggctgcagtgagccgagattgtaccactgcactccagcctgggcgacagagtgagactctgccataaaaaaaaaaaaaaagttggggggggcagtggggagagggaagaggccaggcactgtggctcacgcctgtaatcccagcactttgggaggctgaggtgggcggattacctgaggacaggagttcgagaccagcctggccaacatggtgaagcctcgtctctactaaaaatacaaaaattagctgggcgtggtagcaggaacctgtaatcccagctactcaggaggctgaggcaaagagaatcacttgaacccaggaggcagaggcttcaataagccaagaccacaccattgcactccagcgtgggtgnnnnnnnnnnnnnnnnnnnntccctctgttactattattctgaggcagctttatatatatagatgccgtactagttccactttaaaaattttgcatgagatgataacggggtcaagtgttccacagaggttcgtgtcggggagaagcaggactttgtcctgggctagcagtattcttcttaagacccagggtttcatgtgagaggttttcaggttttttcaatgaagtttcttagaaatacaaatccactggtcgggcgtggtggctcacgcctgttaatcccagcactttgggaggctgaggcgagtggatcacctgaggtcaggagttcaagaccagcctggctaacatggtgaaaccccgtctctactaaaaaatacaaaaaattagccgggcgcggtggcgggcgcctgtagtcccagctactcgggaggctgaggcaggagaatggcgtgaacccgggaagcggagcttgcagtgagccgagattgcgccactgcagtccgcagtccgacctgggcgacagagcgagactctgtctcaaaaaaaaaaaaaaaaaaaaaaaagaagaagaaatacaaatccatcatgtatatagcaggtatacaaacacataaaaataaacacttgtatacccaccgtccagcctaaagaaatagaactttcctgctgatgaagtcctgcctctttctcccgtctccctttggagccaactgtggtcctgaattatatcattccccttgagctctttattagttttgtcacacacatacatgtgtgtatacatcatgtatatgcacatatgtatgtgtatatccttaatgacaggctgatgcatctggcatgtttttgaactttatgtaaatgaaatatttctcacacacacacacacacacacacacacttctgtgacttgcttttgtggcttctgttgcttcgtgattcttccatgttgaagtgcacagctatagctcatcactgctgtgcagtgttccactgcttggacgcacagctcattcattcacgctcttgttaatggacatttggattgtctcttagaagtactgctgctttgaatacttgtctcctggtgcatgggccaaagaatttctctagggcagtggttctcaatcctggctgcactctacaatgacctgggagagctttgcaaaaatgctgatgccctgggccctactccaagggattctgactgaattgggttttggagaggaaatccaggaataggcttttgttttgttttgttttggtttatttttggaagctatccaggtgattctaatatgcagccagtgttcaaagtgacatgagggtgacattgcccaaagtatccctaccaacagggagttctcacccggccacattttcaccaatacttggtaaggtttctgtttagccttctccctgccacaaggacaggcagctgggctgttcacagtctctcttctccagtgcagagaccagggtgcttccagcatgccaggctccgctgtggggttctcccttcagccccactgcctgcctgtgcccttggaccccactgttacacacgagggcccattctgcagctcaggggtatcttcatctggagcaggtttgcaccctcatctgctctcccttctctcctgtccacactctggctccaaagcctctgctctcatctccttccaagtattttgtggttctgttttggctgcctcctaaccccaaggaaggtaatggtttgtctctgctgtcccctccatttactgattttgaatgatttcggaagggggaagtcccaaatgtacactgccaagttctaagctagagactttagaaaactaaaaaagaagaaatattacacccccagccccatctcggtccacattgggctgactcagaacatccaaggacatcaggcctcagtacttttttttttttttgagatggagtttcactcttgtcacccaggctggagggcaatggcaccatcttgccttactgcaacctccgcctcctgggttcaagcgattcaactgcctcagcctccaaagtagctgggattacaggcatgcaccaccacacctggctaatttttgtatttttagtagaggtggggtttcaccatgttggccaggctggtctcgaactcctgacttcaagtgatccacctgcctcggccttccaaagtgctgggattacaggtgtgagccactgtgccgggccaggcctcagtactttatttttttgagacggagtctcgctgtgtctcccaggctggagtgcagtggtgtgatctcggctcactgccagctctgcctcccaggtccaagcgattctcctgcctcagcctcccgagtagctgggactacaaggcacccaccaccacacccggctaattttttgtatttttagtagagatggggtttcactgtgttagccaggagggtctcaatctcctgacctcatgatctgcccacctcagcctcccaaagtgctgggattacaggcgtgagccaccacacccggccaggcctcagtacttttaagaggtgctcaggtgaatgatggcagcaggttaccctcccagtctcaccctttcctcagatgtaagatgaggttgcattcagtgattataagagcccatgttggctccaatactgtgagcttgctgaacgctgaaacctctagcctgtctggctgttgcctcactgggtgcaggtgtaggtgcaggtgtgtctgagcccccggcccaggtgtgtcctgctgattggcaaggactcttccctcactctgggccccagactccgagctagctggcttgccccggaccctgtggagtgacacggcaactgccggcataaaatcattaactatgccaactgcagcagacaggagatggcagtatcctttttgccagcaacagctgggactcagagcaagaatcggcgagggcttgtggcatttgctaggcctgtccaggaagctctggctcaggatctcttgtcctcaacatggaggttgagatttttgtccttcatatgggcaagtgcagcagaagcaaccaacagtggccctgcagcttaataattatgttactatcggaccaggcagtggctcacacctataatcccagcactttgggaggccgaggcaggtgaatcacaaggtcaggagtttgagaccagcctggctaacatggtaaaaccccgtctctattaaaaatacaaaaaattagctgggcgtggtggtacatgcctgtagtcccagctactcgggaggctgaggcaggagaatcgcttgaacctgggaggcagagcttgcagtgaaccgagatcacaccactgcactccagcctgggtgagagagcgagactccatctcaaaataataataataaataataattttgttactgtcaaaccattctggggctgaattagtttcctactgctgtgtaaccaacgacctcacatttagctgcttaaaacacccatttcttatcacaagttctgtgggccaggagtcctggcacagaagaccggggcctctactcaggatcttacaaggtgccggctaggctgcattctcaactggaacttggggtcctctccaagctaacctggttgttggcagaatgcggttccttgcagctgtggactaaggtcccctttttctcgactgtctgccagcatgtgaggagcctgcactcacagttccttgccaatggccctctccctacttggcaactgatatggttaggcttcgtgtccccacccaaatctcatcttgaattgtaatccccataatccccacgtgtcaagcgagaggggtggaggtaactgaatcatgagggcggtttcccccatgctgttctgatgatagtgagttctcacaagatctgatggttttataaggggctcttcctcctttgctcagcatgtctcctccctgccaccttgtgaaggaggtgtcttgcttccccttcgccttccgccatgattgtaagttgcctgaggcctccccagccatgcagaactgtgagtcaattaaacctcttccctttaaaaattacccagtctcgggcagttctttatagtagtatgaaaacagactaatacagcacttacttcttcacggctagcaagagaaattcttctctagttcttttaaaggatcaactgattgggtcaagcctactcaggataatctcccttttaattaacttcaagtccattagggactttaattacatctgcaaaatcccttcacttttgccacagaaggtaacctaatcacagtagggattatcccatcacattcacaggtcctgctgaaactcaagggggttattacacaagggcatgagtcactaggggtcatcttagacctgtgtataaaaggggctttggagccaaacttcaattagccaaacaaacaactaaaatccaccagcagggactaggataagcaaagcaaacttggagaatcaaatcaagtttcaaggacagatatcaatgaaaacttttatttactggtaaaatataaaaatccaggtctcttaaatccacacaatctctccaaatatttggcaagattgattccaagtccatatgggtggataacaagaacaaaggggtctctgctcagagagacgtattgtcgttcagagttctgccctgcttccctctaaatgctcaccaacctggactcttctaaagtgggcagacaagccctattctaagcgtaggaatagccccatttgtgcgtgacactaagttcctccaatggtccaaactgagcgtggatgactatccaacatcacacacaaatgcacatcccctctctttacaagacatgcagaatctcaagatatgtcaagatatgcagcaagtttaatacctgaaggttaacataaatgacaacaggacacagatgcaatgctacagtcaaatgtggttggggatggaagggggcagagggacactggatatcatcacagcaaccagtgagtgagtcctctggtgccctgaggaggttgtgagccacttgactcgtgtcacaaagaatggagtaaactaacaactctgaaagacaagagggtggcagcattgctgagatgagactcaaggcaggggtctgcagctctgtcacagagtgttaatgctcaacgatgcctgggctcaagagcgttctggtcagcattttaacatcagaagaagggcttcttcaggacacactcccttctcttaacatgaggtgaagaaacccatcccattctgaaaccaggtcccataataccttggtcttttgatacacagcagcactacacaccactgtgccccccagccagcttcactctgtctgctaagcacccactctgcaaacagatctcagagtgaacaaatccagaggaggtgggaggagccaccatggtgggatgtgagggacaggagttggctggaggagcagatgggtcccatgtcaggaacctcctaggcatcatgaagattgctatcactcagaagcacyttttccccaggtttgaaggctggcatcccaaggtaggggcagctggcacagcggaaggcatcgcccaggtagcactggagagagagaatggggaagccaagggtcagcttatcccaggcataccagccagaagaaagaaatgcctaatttcataatgtggccacagtggcctgaaggaaatggctatgtttgcaggtccaattgagaccaaaatactaagagttttcaagatttctggtttcgtgaaaaactatagtcatgaaaagttccctaggaggccatagttcttttttttttgtttttgagatggagtctccctctgtcacccaggctggagtgcagyggcgcgatctcagctcactgcaagcttcgcctcctgggttcccgccattctcctgcctcagcctcccaagtagctgggactacaggcgcccgcyaccatgcccggcaaatttttttgtatttttagtagagacggggtttcaccatgttagccaggatggtctcgatctcctgacctcgtgatccgccctccttggcctcccaaagtgctgggattacaggcgtgagccaccgcacccggcctttttttttttttgagatggagtctccctctgtcacccaggctggagtgcagtggtgcgatctcagctcactccacctcccaggttcaagtgattctcccgcctcagcctctggcatagctggaattacacacgtgagccactgcgcccggccatagttctatattctatgcagttcaaaacacaaccaactttagctaactgtctaaccatcaggtcccactctgaagtacaaagaaatgggccaaaaataaaaagcaacaagaccctccctgaccagcacaagcacgctaacccactctcactctcaggagacagcctctctccccattactacctacgttcgtgtgctcacgcattcgtctgttactaaaatatttgaggtggagcttgtctgtgtttagtttagaagaaggtctaatccccctgggggtttgtgaatgctgaggaatgatcctgatatttacgtttccacaagctgacttgggttgggagctcatctgttcccttgacttctctttttccagttcttcrgcaaggccacaggtgctgcgggaaaatcagtaactaatgaacragaattgtcaccacccagaaatcccaaatcctaacagtgccaaaatgtgctttaagccttttctcttcacaccagtgtcataactcagaagcctataggccaggcagacagcagcaatatgagaggctgctgagggagacagaagtgggaggaggatgagggaagtaccgtgtgtgctctgtctacagagggcagccactactcaagcttcagctggttatcatgctggggaaagtggacccagattgccatattttccaaattcaagaacagaagggaaaaaaatctgtgttttcacttgaaatttcctgatttgtaaatgctggcagcttttacatttaaaaaacactgatgattaacgctgatgatgaacatcactgattaactttctacaatccttcccatccatttataaaaacaaatgtgragacaccaaggtctcgctctgatgcccatgctggagtgcagtggcacaatagtggcttactggtagggttttgagggagagtgaaattagatacatggcacaattacggctcactgcagcctcgacctcccaggctcaagtgatcctcctgcctttgcctcccaagtagctgggaccacaggtacataccaccatgcctggctaatttttttttttttttaattatttgcagagatggtctccctgtgttgcccagcctggaaaatgtatgttctaaaaatagtacagcaccgcgatgtcttcagcatgaagccactggaggcagcatggcaggctccagtcaccccagcactcaccagttcttacaggccttcctctttttcccttccccacaagaagcagcccgcagggaagctggatctggcttcttcaaatcttctggatccagcagctcatctgagtcaatgagatcctggagagtgttcaaagcaatgagtgatacagtcgtggtctctgctaaygaaaagctaaagtgactgcaggcttcgagaggaaacttggagtccagggtaaagaaggtgtccaccctgtcctccttttggttgatcatcatgttcaacctgaccacatgctcaagaggccaayggtgagttaaactacatccacagaagatgcactaggatgcaaaggaattagaaacaaatttacatgagaaaaagctgtatgactggccagcaatgtgtagagaatatacacatgttgggggttgggggcaggagtggggagaagggagggaacaggcagaacagagaaagagagaagtgtttatgaagagtcacgtgaaaaagggaataaaatatcttttacataatcccagataaaaatcaaataattatatatacctttatgtaattctttgtaaatgtgtagacacttagtctgtaaaccctatgagagcatgaacctcacttattttgctcactactctaacttcaatagtagaggtgtagaaatgaagaactttattacagacatggccaaagatagaaaatagtgctttttaaagcatggaacagtcagcaacttgcccaaaggtgccaataaaactatttaagctgacaaaatcttttcaggtttacacatgsccacaagagttttcaacatatcgtatgaagtgagaacaagaaattatgtggggaaaaagagatgctaaaaaatttaaaatgccaccaacatggccaagcgcagtggctcacacctgtaatcccagcactttgggaggccgaggcgggcagatcacttgaggtcaggagttttgcgaccagtctggccaacatggtgaaaccccgtctctgctaaaaacgcaaaaattggccaggtgtggtggcacatgcctgtaatcatagctacttgggaggctgaaacatgagaatcgcttgaacccgggagcagagattgcagtaagccgagattgtgccattgcactccagcttgggcaagagagcgagactgtctccaaaaaaaaagccaccaacatggagtttccttctaaatcaaagatgtgacaggcatagtcacaaatctgggctttaaatacgttcacacctacaagtccagaaaggtcactatagctgttcacacccaaactggggcctgaaagaaagcaatcaagtgacaatgctgccagctcaccatgctgtcgtcctccatatcgttggctgagagggtccacagcttggcagcagcagggtccacagcaggtttcactgagtccaagcaataaaagaaaaaactccataaacacagtcagaaactattaattacaaacatacrtaaatgcttyctgctgtgtagaagagaacacactggcctgggaggcagaagatgtgggttcamagtccagctctacccctctgagaggtctgaccttgggccaaccacttgctgatagttacagaagtcaccatttgctaagctcttgctttgcaccaggcaccatattaagcacttatatacattatctaacttaattctgctgacaaccttatgaggtaactatctgtcatcctacttttaccgctgaggaaacaggtttagacacttaggctggttccacaggctgcaaagcctgtctgatgcttttaacctccattccatattgcttcctcctcgataccttagtttccattctataacatgaagttaaattgtacttcctatgttactgcaggtgttttgaggattaaatgagaaatgtgtcaaaaccttcaaaaatagcagagctttagcctcatgtaaacctgctacatacaagaaaataggctctagagctgctggtggcaaggtaacaccatcagtggcagacaaacctcacacttcctggttctctgtctagtcaggagaatgcaaggaagaggcagagagctgaggctcggatgcagtgtgggcaaatcctcgcaggcccttggggtaagagtaccctctagtgatcattgtcacagctggatgctcataccttccacaaggccaactgttctaagctattcctacccattctggaaccatgaatcgaaaggttagattccaaaggatttcttgaagatttaggttagacagtcaaaaccgtacaagtgggaatgtaccagtaaatatctgttaatgtctgcatacctcacagctgggtcaattcaggcatttaaaaatagggataggaaggatgaggatggagckgtgtgtgtgtgtgtgtgtgtgcgtgcgcgtgcgtgcacgcgtgtgcttgtacacaattttctagtcagaagaaatatagttttataagtgtcttagcatcctcaaagtaagaacagctgattttcctggcatggggaaaaaagcacatgagaacaggaacagggcactctcatacaccattaccactacactgtgaggtcttctgaggagaaacgttaattctgggacctggaaggacctcattaattaaactgtgtgactcagtcctgtaaaattaggaggcctcggtatcttctggtgcagaagaaggagctgaactagataatacctatgtattatttcagttttggatcctaatatgcccatgataatagtacattaagtattcttctttgtggaaatggcagaaatcaaaggactaatcctctaaaaatatcaccatctcatttattgctggctcaatttctaacatgtccctctaagcccattcaaacagaagaawgtccctaggccagccttacctgaaggagaagacttcttggtgatggaaagcttaagctgcctagaagaacccacttcaaagtttggttttttgcctgtgatctgaacaaacagcaggttgtcactttcatgaccaaggtgttctcgaacagactgtacttcctcaggggttaggggctcccgctgcagctagaattcaagacatcaaaaggattagttcaccctcctctgtaaaatggtttactatgtctacctacacaggagtcaaagactcatttctgtgcattaaggatgtaacagtggatggtaacagataacactttatgcctcacattcagtttctcactgatcagaaccctagagtataacctttgtctgcatgtttacttggagcctaccccttggaaaatgtaaaagtacttaaaaaacattagggatgaggcatatactagttatttgggatgtaatacaattatgaaaatgaaccagatgtggtcctactgtgtaacaggaaagaatgcccacaatgaagacagcagaaatttatatcccaaaagaaaaagggggaggaaaatcctttctatgttccttgggataaagtagcagagagtaaaggtagaaaaaaagggtcagggtgccacctctatgtccaataattatagactggttacataaatcacagtccatctattgtatggaatactattacatcattaataygaatgaagggaaatacactgaagtaggtaagtgtctatgatatctaagggtgggaaaaaaggtgattgaacaatgtatacttatgatcttatttacatttttaaaaaagtatgtgcatgtagatgcttgtaaatacataggaaaaggtctgaacggacatacaaaaaggcattggtggcttcctctggggagggaagtgtgagcaagaagtgggatgtcactttatattctgtatgctttggtgtaaagtgaatttttatgaggagtctgatatagtttggatatgtgtmccctctaaatctcatgttgaactgtaatccccaatgttggaggtggggcctggtgagaggtgactggatcatgggggcagatttctcatgaatggtttagcaccatctgaattctcatgagatgtggtggttgtaaagtatggcaccttccccaccccgactcttcctctctttcttgatcctgcttttgccatgtgatgtgcctgctcctgcttcaccttctgccacgagtaaaagttcattgaggcctccctagaagccaagcagttgcaggcccgtgcttcctgtacagtctgcagaacagtgagccaattaaacctcttgtctttataaattattcagtcttaggtattcctttataggaacagaagaatggcctaatacacattccttattttaaaatcaagcacagaaaaccttaagctaaaaggaaaaataagaaagggttggcataaagaatctaaggcctggcataaagaatctaaggcctggctcacgcctgtaataccagcactttggaaggccaaggtgggtagatcacctgaggtcaggagttagagaacggcctggccaacatagcgaaaccccatctgtactaaaaatacaaaaaattagccaggtgtggtggcgcacgcctgtaatcccagctactcgggaggctcaggcaggagaattgcttgaacccaggaggcggatgatgcagtaagcagagatcgtgtcactgcactccagcctgggcaacagagcgagactgtctccaaaaacaagaaaaaaaattaaaaaacaaagaatttaaggccctacattatgtaagaaataacaggcacaacagctatcatgctgtaacatttacctctcccacatccaagaaaattttaagatcaaagagtgtagaaatataaatacttctgcttaatttaaacatttccactgaattgtcagaaaaggaactttgccctctaacctattccagcctcccaccaaaaatgtgaggctgaactagatggcagtgttcacccaggcctaggattcgggtctactgagaggtgggtgttggaagcagcagagctgctgctcatgcccctcagctgtcaccaccactaaactagtaccaaggagacaagaacaagccccagcccacatgggccaagctgagtctctttgaagttggttattctcaaaagtttttttttgttttgttttgttttttttgagacagagtctcgctctgtcgcccaggctggagggcagtggcgtgatctcggctcactgcaagctccgcctctcaggttgacgccattytcctgcctcagyctcctgagtggctgggactacaggcgtctgccaccaggcccgactaatttttttgtatttttagtagagacggggtttcactgtgttagccaggatggtctcgatctcctgagctcgtgatccacccacctcggcctcccaaagtgctgggattacagacgtgagccaccacacccggccgattctcccaagttttgtcctttgaagcatcatgtatcttacatgcacagcatttcttgtttcctagttctaagcaatactgattacctcacctgcagggcagcaaagaaagttgtctacaaacstacctctttcacttccacaagaccagaaagagtcagggctgaacacagcttagatgctgtcttcactttgctattgttatctgccaaaaggaaaatcccaattaatagctttatagttcaaagtaggaaaaataataaaggctcaatcctatatgggttcgcaggcattcaaacaataataaccaggtgggcgtggtggctcatgtctgtaatcccagcactttgggaggctgaggtggacagatcacttggggccaggagttcaagaccaatctggggccaacatagcaaaatcccgtctctactaaaaatacacacaaaaaaaatagccaggcgtggtggcacacgcctgtaatcccacctacttgggaagctaaggcacgagaatcgcttgaacctgggaggcggaggttgcagtgagccgagattgcaccactgcactcttgcctgcacaacagagtgagacttgatctcaaagaaaaaacaaaaaaaaaataataacctattctgtttaatgtacagatggtccttgacttaatgatggttctacctataatttttcaacttttatgatagtrtgaaagtaatactcattcagtagaaactgtatacttcagttttcagtaaattacatgagatactaagcactttattataaacaggctttgtgttagatgattctgcccaactgtaggctaacgcaagtgtcctaagcgtgtttaaggtaggctaggctaacctaagcaattgtgtttagtaggttagatgaattacatgcattttcatcttaatagtatttatcaggatgtaactccattgtaagatgaggacaattgtatatatattttagtgatattattttattattattattattattattatttttgagacagggtctcactttgtcacccaggctggagtgcggtggcatgatctcagctcattgcagcctcgacctcccaggttcaagcaatcttcctgcctcagcccccaccaagtagctggggttataggtgtgcactaccacactgggctaatttttgtattttttgtagagacggggtttcgccatgttgcccaggctggtctcgaactcctggactcaagcaacctgcctgccccagcctctcaaactgccgggattacaggtgtgagccactgtgcctggccatagcgatactattttaatttgacaaatcctttttgttgttcgaagtgtttttacctaagctcttaaatgttataattccattattattgtttttttatcactctctgcttcttgaaaccccttccagaggttgtgagataatgactatgaaaagaggcttatgaactgcaaagtgcacagaaacacaagtattccttctgaatagttccttttttatctctgtatagttctaagacactacatttagtcatgtaaggtttaaattcccagcaaagaatgctgatttatactacacataacacaaagttctatttccaaataaacaatgaacacctttatacatttcaaaatactttcatttctattattctatttgatgaaatggttatgttttgactgaaagtctagtgaaaaatattaaaaatccagacttgaatcactctgacagctataccaccgatcaaaaaagtttttacttcatgaacactgtcattagtttcacatgaatcaataattaccacatcattcccagggttcggccactatttttaaacttttaattttgaaataactatagattcacaggaagttggaaaaaacaaaaaaaagttctgtatattaaggaggtcttcacttcgtccctccccacagttaacatcttacccaattatagcatgatatgaagaccgggaaattgatattgatggtccacataactttttcagatttcatttcttttatatgtactcgtttggcagaagggggctatatagttctatgtaattttattatatgtgtagatttgtgtaaccaccacgacattcagaacacagaattgttctatcaccacaggaaccctcatactacccctttatagctccaccaaccctttcctcccacttctaacctctggcaaactctgatctccaccgccacaattttgttatttcgagcatatgaatggatttgtacagyacagagccttttgagattggcttttttcactcagctacttcccttgatatccatccaagctgatgtacatatagttagctagttcatttttattgctgcatcactttccatattatgaacatatcaaagtttattcacctgcaaaaggacccatttttagatggcagtttccttctattttattacataatgagtcagccaaagattacaatttctccagatatgttgcttcagattttaacaataatttatccccaaggaaaaggttttgctacaggaatactgatctcccaatgatacctcctgctcacggagatgcagcacacatactctaagactcaaccctgtcaaacatgttttccaagtgaagatctccttacctacagctgtctctactggctccttcagaaaaagacatccaccaggccgaaggatccgggcgatttcagccaaaatctcagcactgtgcagagtggtgcttcctgggactaaacctgacaaaataatgtcaaagctggattctttgtgggcagctgaaaagaagaggactctaattagcaatctcctgagcctgggataatctcctggtcccttccaacccccaacaaaagctacagacctcaccctgagagaatggacaccactcgatatccatccaagaagctggatgaatagtaagtgttttaaaaaaacatggaatagctaccaagaaagaacatacttatggaaatcatcaactacactcctaagctctgctgcaggaagtgagggaccccaaacggagggaccggctgaagccatggcaaaagtacacaaattgtgaagatttcatgaacatttattagttccccaaattaatacttttataatttcttacgcctgtctttactgcaatctctgaatataaattgtgaagatttcatggacatttatcacttcctcagtcaatactcttgtgatttcctaygcctgtctttactttaatctcttaatcccgtcatcttcataagctgaggatgtatgttgcctcagaaccctgtgatgattgcgttaactgcacaaattgttcataaagcatgtgcatttaaacaatacgacatctgcgcaccttgaaaaaagaacaggataacagcgatgttcagggaacaagggagataaccatcaggtctgactgcctgagagccaggcggaacagagccatatttctcttcttacaaaagtgaataggagaaatatcactgaattctttttctcagcaaggaacagccctgagaaagagaatgcgttcctagggggaggtctctaaaatggccactctgggatgtctgtcttatatggttgcagataagggatgaaataagccctggtctcccgtagcactcccaggcctgttaggacgaggaaattcccacccagtaaattttagtcagaccagctgtctgctttcaaaccctgtctcctgataagatgttatctatgacaatgcgtgcccgaaactttattagcaattttaatttcgccccagtcctgtgatctcgctctgcccccgtttgccttattttattgccttgtgaagcatgtgatctctgtgacccacaccctattcgtacactccctcccctttgaaaatcactaataaaaacttgctggttttgcggcttgaggggcatcacggaacccgccgacatgtgatgtctcccccggacacccagctttaaaatttctctcttttgtactctttccctttatttctcagaccagccgacacttagggaaaatagaaaagaacctacgttgaattattgggggtggttcctccgatatatctcaactgaaaaacaacagggtgaccagccaccactatcacatgccaccctaaatgaaaactcagatatcaaggaaccacagaaatgcaacactcccatggaaacccctccagcctcataaagacaacgtgggtgggtacttacattgcaacagctgcttgatgttttccacagacacgcggccctcattgccggttaackcttgaagcttatccaccagacctttcagagcctccactggggatracttatcccagaccactgccacaaactggccagcagagatcccaaaatctgccattcttgcagtgcagtactgacagacctaaaaactgctggccaaaagggaatcaagactgggcagagacaaagtgcaatttaatctgtgagatatcataaaatatgattagaatcccaacctaacttgtaacygcccactagggaatgctgacaacattagaaactctactgtatatgctaaagagtctgaatacatgaaccccattatctcaagtcttcataagcccaamattcccaaagaaggcagatagcttccttggtgagaatcctgacttggaagagtcaagaaaggggattagaggcaagtaagaaggttggaggcagaaagatgatttcctctttgacctaagataattcagcatgaacggaatggaaaacacacaggacatcaattaggcaaagtgtgacttggcaaggaaggcaaataaattgacagaaataacccaaccacagattcaatgtttttaaaaagaaacaacacatttamatttgcaaackgaatactggttattttccctttcatcaaaatatgaaaatttaattccactgaatctgcagtgatcaagaatacttactatgtctgtaccatttaatattagctacattgttcaaagcatcttctaaacattatctcaactgaatctcagaacagccttaaactagatattattaccattttacagtctggaaactgaggcaatttacgttgcccaagtcacacagctagtgagtgctacatggataaagtgagagctgggatttgaacccaaattcatctgactgtaaatcccatgcttttaacctatggaaatttccctccagggatcaacttcctcttccacttgatacttaggtgagtatataatatgctcacaaagaaattaggtcaagagatagtactctactcagtttctcctttctttcttaaacattaatgacaccagtttccaatttaaaatagctcaaataaatgaaacaaacaatttgtggtagagragtcaaaatggattagttttatgttgaacacttcagacttctgcagaggtggccaactcagtggcaatcatgccaccacagatacagactgaattcaagcgaagtcactacactcttgtttcttttaaaatgttgacttcggctgggcacagtggctcacacctgtaatttcagcactttaggaagccgagccaggcgaattgcctgagcccaggagtttgagaccagcctggccaacatggtgaaaccccatctctactaaaaatacaaaaattagctgggtgtggtggtgcatgcctgtaatcccagctactcacgaggctgaggaaggagaatcgcttgaacctgggagatggaggttgcagtgagccaagatcgtgccgctgcactccagcctggtgacagagcgagactccgtctcaaaataaataaataaataaawaataaaaaattatagctgggcgtggtggctcatgcctattatcccagcaccttgggaaggcgaggcaggtggatcccttgagtccaggagttcaagaccagcctgggcgacgtggtgaaaccccatctctactaaaaatacaaaaattagctgggcrtggtgacagaatctatggtagtcttatgtagtaatcttatgtagtcccagctactggggtggaggagagggcctgaggtggtaggactgcttgagcccaggaggttgaggctgcagtgagccaagattgtgccactacattccagaccctgtctcaaaaaaaccaaagttcacttcaagtaactctcctctttgcctacaaaacatactcaggatgttaaatatttaacactcaagcattaaatactatagcactttgatttgtcactcttttcctaaaggagttactaaaggttttatttgctagactgatgtcaattrgccttctggatccacggcctccataatctggctctacctgtatctcccaccattccaaagtgatccctccttattctatgaaaaccctttgcattttcccctcatcatgccttttatctagctccttccatatgatccaactgcaagcgcccctaaaaggatgctaagtgttatcagacaagtaggattctttagtcatttaactctgttttccttaatgacagagggcaagtaaaaatggaaaaaaaaaaagaaaaaaaaataattaaaaagasaataattctggttttkttttttttttttttttgcgggggtggtggggaggacagagtttcactcttgttgtccaggctggagtgtaatcttggctcaccacaacctctgcctcccgggttcaagcgattctcacgcctcagtttcctgagtagctgggattacaggcgtgcaccaccatgcccgtctacttttgtatttttttagtagacggggtttctccatgttggtcaggctggtcttgaactcccagcctcaggtgatccacccgcctcagcctcccaaagtgatgagattacaggtgtgagccacrgcatccagctaattctgtggtgtttttgtttgtttgttctgttttttgagacagagtctcactccgtcacccaggctggaatgcagtggcacaatctcaactcagtgcaacctccgccttcagcgttcaagcaattctcatgcctcagcctcccaagtagctggaattacaggtggacgccaccacacctggctaatttctgtatttttagtagcaacagagttgttggccaggctattctcaaactcctgacctcaagtgatctgcccacctcggcctcccaaagtgctgggattacagacatgagccaccgtgcctggccaattttggtttttaaatccctaaacagcacacaatcaagaactgaaacttttaactggcacatgatgtcgaggaagaacccttgcaaacttcaaggtgtgcaatatgggatcaatctcccatttaagaaccagccaggcaagatgggagtatggrttgctgggcattaagttataagaaaaaaaaaatgacctgtttctagaatgatgttggaataggttcttccttgggacaatagaaagggatgaaaaagaccccacctactagactacyacaactttgcactgtacttacagaaaaaccctcataaaggaaacgaagggcaaaagcttacttattagctagagaaaacaagccaaatgtctagaccttttcagcaacatttacggaggcttttatagggcacaggttttgagtgcagatgacctagggttctatttaccactggatcttatgggcacatgaccatggataagttactagactctttgaatttgttttctcatcagtaaagtagggataaaaacctcatattttgcgaggctgctgtaagaagcaaatgagaagataaaaataagcaaggcactcggcaggctctggcacacagagctctgtaaagtaatgttctagaactctgggcttccacttctctgtggctagtttacctgcctttgcttcaagcagtcctataaaaccctgcttctccttagccatgcctgataggaggacactccagggagtgatgggaacctgctttttcattgttagaattagtgtaagagctgcgctttatgatctttggacagtactccagtgggactgtgtcagtaaattagaagaatgtaaaatgctttgcgttccgtatctcccaaaactaatcttatggcaagaggagcttatgaactacattcattaaacatcaaccctcaaaaaacaggcatagccactactttcagtcagcatttttcaaataaaataggagataatattcttttaaatatctaaagccaaagtgtgatacttttcatcatcagaattttatgttgctgttgtgaatttgtcttttaaaacaaaaaaacccgtaaggaaaaagtgtccagtatctaagacaacatgcttagaagctgtgagtcaggacccagtttcataataagaggtagcatcattgtcacgtcactgagcttgttgggtacctctccaactctgactgaggcacacacatgtgcatggcccttctaaaatgttactggcaggcagtaaaagcggatgtctgagaacagactgttttttaggtgcccagtaagcatcaaatcttgaggcatttggtctctcttctggtgaaaggggacaaaagcaaaaaataacactgaagtttgggcttcagttcaaaaaattctttaactcgggtgcataaaagagttccaagaatactgacagttatcagaaagraaaatcctaattaaaattaactaactgggctgggtgcagtgactcacacctgtaatcccacactttgggaggctgaagcaagtggatcacctgaggtcaggagttcaagaccagcctggccaacatggagaaaacccgtctctactaaaaatacaaagattagctgggcatggtggcgtgcacctgtaatcccagctacttggtagactgaggtaggcagaattgcttgaactcaggaggcggacgttgtagtggaccaagatcttgccactgcactccagccagggagacagagtgagactccatctcaaaataaaaaaaaattaaattaaaaacataaaattaactaactgaagctcttgtgcacatacatgtcactgcctggcctctgggtgaccagtaccaagtgggcctaaccagcctgctgtgcaatccaagtcagccattgcccctctctgggcctcagtttccctgccagctttagcagaatggtaggaaggcacaattacaacctgcaaatgagacctaagaaacctactatgtgcctgtccctacacgggagacagacaagaagacacttgttccctgccctcaagagaacgctctgtctagacacttagactaagaccttagaggtttttttktttttttttttttttttttttttggcagagtcttgctctgttgcccaggctggagtgcaatggcacaatcttggctcactgcaacctccgactccggggttcaagcgattctcccgcctcagcctcccaaatagctgggattacaggcacccaccaccacacccagctaatttttgtattctttgtagagatgcggtttcgccatgttgcccaggctggtctcgaactcctgagctcaagtgatccacacgccgcagcctcccaaagtgctgggattacaggcatgagcctggcccagaattttttttaaaaagtgagamtcaacaatgaaacaggaacgtctccaggcatttggcgtgtgtcaggaattagggtttcagaaaggatacccaaatgttagtttccacaggaaaggctcattcaaagatggatggatagaactcagaaacaaatccttatggagaggagtgttttacctaaaaccagaaatatggatctaaaattttaacctttggggtaagttttggcttaggaggtcttccccgcacccgtgcaggggggagccggatattctgaaaagactagatttgacaaggggtgtgcaaagcacaactttaacagacacaatgatggggtctgactgcaaacacaaaatcgacagaatcacatgctcttgtcgtcagttactcttagcccaaaaaccgtttacttcttcctactaagccttctctgatgacacccccgtgaagtgctctgttagtggctagaccgtgacctccttgagccatccagagcttggcactcagtaatgtcagaatgaagggcaccagcctttcccgaacttgcagatcctacaaatcacccgagggagtggttaaaatgagattcctggaccacacmcagacccactcaatcaatccttctggacaaaggcctagctgtctgttctagtaacaagcatccttccgatctggatacttaattatatcaactcaacacgctgggggttcggacaagttgcaggttcgaaattacaatcgtgagctcaggtaccccccgactccaaggctttcgtgctttgctgccaggaacccccagggaccaaaacgtcacggggactgaggcccaaggtcacaaygattggctactggtaggaccgggtctcagaaccaggtctccccgatcccaagctcggagccgtttctcctcagcgtggtgtccccggggcctcagagtagggccggctrcgcaagggacgaggcagccggggaacggcagaaattcccagtcaggaccccagggaggttagggccggccctggcccctcacaccgacttctcaggaataaaccagccggggctttcagcggggcggccgtggctgcgttcccatcgaggaacggggtgggaagagaaaatgagaggatgtgggaacgagggtgggccgggaggggacagttgagggagctctggcgctcagctggmccccaccactctcacctgccgcctgggctcgctcccggcttctctccagccgtcgactccacgcctygcgcctctcgcgagaggaggaggctccacggagcgacgacttccgccctccttagggccgtggtcccgtagctaccggtcgcgtcgccgtgggcgacgtgcccgcttccaaaatggcggcggcggcggtatctggtgcgcttggccgggcgggctggaggctcctgcagctgcgatgcctgcccggtgagggggctgccaagccggggagaggcggggagcgcggagggggcgcgaggccggcttcagctgggttcgacggtggggggaagaggccgttggggcggcccacgagcaaggtgaggtgaagggcatcggcgcgggctcgggcgagccgcctggctagcttcggccctgctccgctgtctgtgaggggcagatgcagcggggcagggcctgtcacccccatttcatggagttggcagagcctcagagagggctcggggtacgaaagtcacgcagcctgagcctgttggttacagaactggcagtcgcagacccattctcaagtccattgccaagtccactggaaggacaggtggacacggccacagagagcctagtccattgtttcccgaaagccagccgtttcctcaccacttcacgaattctgtgatactctcttaccacctttgccactatgtactcagtatttttatttttaaataggagttcttaaagaggaaactttatatcattgtcataaatggaaaactaatatcgccttccttaattagaacgtatgcattaacactttagcatacatacataactgatgaaacgttcacctgtatttcacctaaaatcttctcatgaccctcagtggtactacagtcatactttgcatctgctccttccttttcaaagttttgcggatatttgtgccgtatctttcagtacatgtattaaaatattgatattttggcacatactattctgtttcttttttttcttttttttttttttctgagacagggtctggctcctcagcctcccaaggagctgggactacaagtgcgtgccaccctacttggcttaattttgttgttgagacagagtctcactctgtcacccaggctggagtgcagtggtacaatctcggctcactgcagcctctacctcctgggttcaagtgattctcctgcctcagccttcctagtagctggggttgtgccaccatgcccagctaattttttatttttagtagacggggtttcaccatgttggccaggctagtccaaaactcctgacctcaagttatctgcctgcctcagcctcccaaagtgttgggattacaggtatgagccaccgcctagcccccttttgttgtatttatacaaaattccaaactaaagatgtgtagtaaaagtaatgtctatgaccccgcaaatccaccaagagaaatgaaggtatgtgtctacaaaaaagttagtacaagtatattcatagcaattttattcatagtagccaaacacagaaacagtccagttgtctagcaacagaatagtattttttttatggaatactattctgcaataaaaactaaaaatcagtcaaagagaaagctggacactaaagtgataaggaccatttttaatcagtaataactattgcaatagggaaaagagtctagcatgaacggagcccaaccttgagtttagagcatgcagaagtcactgggtgtttcaaagaaaaaatgagggaggagggaggaaggcaggtggggactcagtagagtcaggatagtgaataattataaataagattggtctgctagctggcagttaacaaagttaggattctgttttcccacagggagacaagccctatccttcttaagtgttagcctgaacaaacagtaaaattttttttgacagccttgagttttctcaggcaggcactttaaaggggggtagggttatcttaagggatgtggccctgagtgatgcttatgttagtgtgtgttcaagtctttataggccaaggttgaggcctagataagaagagggctcagaggagcctggttagagcctgatcaaggagagaatctttgccagatatactgataggcataaaaatatggatcaatctcaaaaatatactaagtggtccaggtgtggtggctcacacctgtaatcccagcactttgggaagctgaggtgggagggttgcttgagccgaggagttcaagaccatcttgggcaacatagcaagactctgtctctatttaaacttaaaataaataaatatatatatatacacacacatatatagtcctaagtgaaagaagctttactgaaacatgtacatatagatgaaatcttaggacaggcaaaactaagacaagcaaaaactaacctagagtgaaaaattcagaacagtatgaatggggaatgactgaaaaggcataagggaactttctggggtgacagtaatgttctctgtttagattgggtttaggttgtgcaagtgtatacatttgtcaaaactcatagaatggtacacttaagatttatgcatttcattgtgtgtaaatggcatctgaataacaaaacagtgaacgtagaagtctttgatgctaaaatgtttagaggtgaataatactgatatctgcaacaaatgcactgaaaatcaagatggatgaatgaagaacatgacagatgtgttgaacctagtggcagatatacaggtgttcattccataattctttcaatttgcgtgtttgaaaatttttataataggctgggcatgatggctcacgcctgtaatcctagcactttgggaggccaagacgggcgatcacttgaggtcaggagtttgagaccagcctggccaacatggcgaaactccgtctctactaaaaatacaaaagtgagcctgagagtggtggcgggtgcctgtgatcccagctactcgggaggctgaggcacgagaatcacttgagcctgggaggcagaggttgcagtgagccgagataatctcactgcactccagcttggccgacagagtgagactctgacaaaaaaaaaaaaaaaaaagaaaatttttagaataaaaaatgttgggaaataaaaaatactatgagtttatgcttaggaaacatacttctcatctttcttaaagtaaatggagatgttgcagatattgcagatgagaaagcagatagagattagtgacttgtccaaagataccatataaacactgggggagtagggctgagacattaaattactattccagagctcttgccataatatatataaatctgtaacatttgcaagccacttttactttttgtttgggccacacagtgctctcattgagcaagtagagattattactctaaatttgcagatttaaaaatctgcacattggggtgaaattgtttgccagttacccaggtaacaagtggtagaaacaggtcaagatgctaggtagatcatttttcctggcttaccacttttgctaccacttcgtgtcccaaagttcccagtttacccaatatttttgtgtgggacccaacacttggataagtggttctacaggagtctctggcctgcttttcctcctccttatctgtgttaccactctgggtctgaaagggtcttctctgttgaatgtccctgactgaccagtttctgtttcagtggcccgttgccgacaagccctggtgccgcgtgccttccatgcttcagctgtggggctaaggtcttcagatgagcagaagcagcagcctcccaactcattttctcagcagcattctgagacacagggggcagaaaaacctgatccagagtcttctcattcaccccccaggtaggcaccaatccacctatttctggccacttcatatgcttcattatgtctgttcctccttcacttcctctctcctctccatccccttttgtaccttccttcatttccaaggccatctttgttttttagaattttttattttttgtagtgatggcttctcgctacgttgaccagactggtctcaaactcctagatttcaagctgtcctccgcctagatctcccaaagtgttgggattacaggtgtgagccactgcacccagccacaaggctgtcttaggaaagaacctattgtttttataaaattggtgcctgtttgttctaaaacacctaaacagtatagagaagttcacaaaaataaagcagttttatccaaaattacagagataaccctgctaacatttttgtgaatatccttttagatgtttctctaagcttatttcatatgtaaatttttgtatagaatagatataatgtgtataaactctacatgctgttctagaacctgttttttcactcaacagtacatttgtaatgtcttttcatagcttaatagttgtataacattccagcaaatagctgtgccaaaatttatttaacctgtcttttattgatggatatttagatttccttcactagtataagaaataatatgataaagtgtgtgaatctctccttagaagtgggagcactgagtcaaaggatatgtacatttaaagattttttacttatgtgggccagttgccctccagaaaggtaatactaatttacatttccattagtgtttttttttcctaatcctgccattgaaaagtttctctatatctgaaattagcgtgttccttttcatttttctgatttcctaactaaagtacttttcatttcaattcaagaaatattttttgaggccctactatcatgccaggccctgtgagtaatatagcattactcctgccctcagggaggtagtctggtgtaagtttagatgaagaaaccctctgagcacagtgtgctaagggctgaaaacagggaactccagggtgcagcaatgccttcataccacatggcctcatttgctggattcctctccgtgcctatggggaggggaaggatgatctagtttttactctgttggcattaaaacgttgatactggctgggcgcggtggctcgcgcctataatcccagcgctttgggaggccgagacaggcggctcacttgaggtcaggagttcgagaccagcctggccaacatggtgaaaccctgtctctactaaaaatacaaaaattagccggacatggtggcacacgcctgtagtctcatcgacttaggaggctgaggcaggagacttgcttgaacccgggaggtggaggttgtagtgagctgagatcacgccactggactccagcctgggcgacagagggagactctgtctcaaaaacaaaaaacaaacaagaaaaccacattgatagtgacacaagagtaaatgtcttcccagcatgtgcttagaggagatccagagcccctagtttctggtcatgcccattgtacatgccaggagatgaagtatgctgggctgtgtcctcttgtctcaggtatacagaccagggcggcgaggaggaggaggactatgaaagtgaggagcagttgcagcaccgcatcctgacggcagcccttgagtttgtgcccgcccacgggtggacagcagaggcgattgcagaaggagcccaggtgtgtataggtgagggtggggccacctaaccaagatgagccaggatggagtcacaccaggcagagcggggggcctcatgccttcttccagtctagctcagagcccctcacagctgcaagattgactggtttttttcccccaatagggtggaactggctttattttgtagttataaagaacataccatggagttggttcttgggagttgtgttctaaaggcaatctattaggcaagaattgtctgtgatcaaaactcccatgtttcattgactctaagatgccattggttgtaagaagcatcatttttaaatgcatcagtaaaaaagaaaacatactgcccttcgaactatgacaaagcacttctgtgattcacactgattttttaaaatgaaaaatatatctgcatcttagaattaatgacatatggtgtttgaaaacccccaagaaggcaccactttggagaccaacacatcttattttcccagaaactc

SEQ ID NO: 96355 - DNA, 18404 bp, Homo sapiens
gtgcctggccagagtctcagttttatatatagttattggcatgctatattgtatcttcaaataaaattatatatatataaaaaatacgaaattcttcaaggcagcaactttactaaatgcagttagtcctatttgaggtggaaagccttatttattctaggtgaggagtcagcatgcttttttttagttgtatagtaagtattttaggctttctgggacatatggctgctgttgcaaataatctgccattgtagtatgaagggaggcataaacaagacaaatgaattgcagtaaatctttacctaataaaaacaggcagaggacaggatttggcccattgcccacccatactccaggtatctggtctgtttcttcaagctataaatttgagctaaaggtataggagactggaagagtagataggaagtattacctggttgggattatagggtaggagtgagcatttgggtggttactggctgaaatgcagtattttctttcagaatatctaaaatgtctttatctttttctaggtttgatgtggctagcatgatgtctgttacactcagttgtgatcaccgggtggtggatggagcagttggagcccagtggcttgctgagtttagaaagtaccttgaaaaacctatcactatgttgttgtaactaactcaagaatttctaaactctcccaggtcacactgattcattcttaacaagatatttatatgttattaaacaggtggttctttttattttaaccagttatttttattattgagtctgtccagataagttatttataatgggcattactgaatttttaaaatgccgattacacccaaatattgtgcacatttaataatcagacaccagatttttagctctgtactcctaattaagggacatgtatgtggccttgcctagccctttggtgataagtacttcctctaggaaatgtacgataggtagaattgtggttccctaaagacaagtacataaaggtgaccctgatgaaaccttgaagttctgaaatttaactgcctaaaatgttctccttagatgtgagagaaagagaaatcaggaaaattaattctcttgggggaagggcttgaattgaagctttactttagaatttagccctggtttgaaattttccattacatgatcttggtttatcatcgatgggaagggtagaaaacttcaaggaaaataagtgaaattttaaaagtcagcattttcttagacctcttcagctgattgtttatttttctatgaattcctacacatggttattcccccctacttgagataatctaaatataaaccagctacttgatgtaactgagaatttgtgtggatatttatttaaacaaatgtgtaattttgagtacagaattcaacagttacctccaaaaaagaaacattgttaatataatttaacagaagttgtgaaactaaaattttctaagattaactggtagttcattgtaaatgaacataatgaacagaatttatgactccactgtggaaaatgctatcaaataactaaggaatatatatggaataagtgtacatatgtaaaatattgttactagagttagatatgtgccaaagtccatttatcccaaatcctgtctgaaaaggaggggtacattggtaaacattttggagtgcttaaaaatgccaaaaacaaaatggtaatttctactttgataaagtaaaaaagttaaatgtgtgtaaaaaagtgttctgtgtccttctactccagcatcgtctcatgtaaaataagaaagccctaaaatactattggagagaaaaaattaactaggttgctactttatttgcctaaatacttttttctattttgttagattttgcctttcttttggaaggaaggaggcgatattctggattataaaaatgaattgggaacattatcacaattccagactttctattaatatttatgtgttttaataaacgtttgaaattatttatgactacttaaaatgaatctgaccagtgcttcctggtatatgtaatatgtggagttagcccctgaaatttgctttaagtgtttcagtgttgaatctgtttctaaatattcattattacatggtacacaagtgacactccatatattccacacagacttttaccttgctgtattattatgaaaacaatacattaatttgatttttcagtaattagtaattttaggttgaagattatccaaaagaaacaagcttatcacaagggaccatcatcaatatgatccaaatctggttcaaacattcaaaacttcaaagataattcatctttcgctaatgcttgtggttctgttgttcccttgaaaaaaaataaaaacagttgccttctaataaacattgttgagttaaaaattaatctgagctataatctaaatcgattcagtctcttaccagaactgaaagaaaaaagttagaaatagtgtttttggttcatatgattatttaaaaattaaagtataaatcttcaatatgtctggtttaatttttggtctgttggtaattattttcacatttaaattatttagatctagggacagccatgtatgtataagctctcaatacagataaattttgagtttatataattggcaaaatatggactacatttaggagaatataatctaacacttttaagctcaaagagttcctgaagcaccccatgttggggtgtggcacttattatcaagatggaaagtgtggtctggttctgttaggtgatttattcccaattctgaagcttgtgattgtgaagttagggtatcccaaggcatggtctagaaaggagtaaaccagcacattagagagataggaggaatgttcatcatgtgtaatgcacaagtcctggaatacatggggaaatcatcatcactactggtaagtgatctaaaaatgaagtctgtagaaaaatctggtctccaaattttttttttttttttttttgagatggagtctgtgtcgcccaggctggagtccagtggcacaatatcagctcactgcaacctctgccttctgggtacaagtgattctcctgcctcagtctcctgagtagctgagattacaggtgcctgccaccacgcccagctaattttttgtatttttattagagacagggtttcaccgtgttagccaggatggtctctatctcctgaccttgtgatctgcccacctcagcctcccaaagggctgggattacagctgagccaccacgcccagcctccaaatttctaattttgagaaaaagaaatctcagtaagattccaatttaaaccagtccatagttcattattagttaatgcccttactgggccccattttgttttttgtagggaggggaagatagagctgtttttattaatacaaaatgagtgagaatattttggaaaataactagaatgtaaattttaccactttaagtatattaggtcttgatgtgcattttaatgagtatacaaacacagatactgatgaaaatagcatctaagtgctgagtgcaagggtagagattcaattctatgtggttaggagtttttaggaaatacattttggtagtgattttgtaggagtaaagataaggtgaaggcactcagtttttttgaggggtgagaataggtttgttaattttaggacatgatacagttccagaaatttttcaggagataaattatcctgttgctagtagaatttaaatccaggccaggccttcaaaaaggagatttgaggcaaggaaaaaaaaacaaaaatccagaccaggcttaagaaaattatatttgcttttaggctaggcccagtggctcacgcctgtaatcccaacacgttgggaggccgaggcgggcagatcacttgaggtcaggagtttaagaccagcctggccaacatgatgagacccagtctctactgaaaatgcaaaatttagctgggtgtggtggcagtcgcctgtaatcccagctactggggaggctgaggcaggagaatcacttgaacctcgggatggggcaggggtagggggcagaggttgcagtgagccaagatcgcgccactgcactccagcctgggtgaccgagcgagactctgtcaaaaaaaaaaaaattatatttgcttttaaatgtcatgtatcagttatttctgttatacaacattagtttctatagttaaaaagttttaaaagtagtaagaactttggcctgcatgttgaactagaaactttattacaaggataattaaaggaaacttgtatctagaaaagataattaagggatgtttaaagtctgcatatagcttacttgatgtataaattggatagttggtacctttgtatttcagagcttagaagagatgaatgtacatcacttttgtacttctgatcatttctttaggggaaaagcacttgtcccaatgtcaactactttttttgttcaaatatgagatatatttttgcaggccgggcgtggtggcttacgtctgtaatgtcagcactttgggaggccaaggcaggcggatcacctgaggtcagttcgaaaccagcctggccaacatggagaaaccctgtctttactaagtatacaaaaattagctaggggcggttgcgggcgcctgtaatcccagctactcgggaggctgaggcaggagaaacgcttgaacccaggaggtggaggtttcagtgagctgagattgcgccactgcattccagcttgggcaacaaagcaagattccgtctcaaaaaaaaaaaaaagatatattttgtttgctgttactatgtcattgtatccaatctatcgacaagtctatatatgatactaaaatgtctggctgggtagctgggtctcctggcagagttgtttaactgaagtacagaggttaggggctgagtgccatggctcacgtctgtaatcccagcactttgcgaggctgaggcagatggatcacttgaggtcaggagttcaagaccagcctggccaacatggtgaaaccctttctctactaaaaatgcaaaaactagccaggcgtggtggcacatgcctgtgatcccagctactaaggaggatgagacgggaggatcgcttgaacctgggaggcgaaggttgcagtgagccgagattgtgccactgcactccagcctgggcaacacagcgagactcagtctcagtgaagtacagaggttaaataggcttgaatattatatttgaccctgtatttttattgttggaggagactcactgatatggcccatcctgataataaaaaacttcttgcacagtctggaatttcttcctgatagaaaaatttactagagactttttcaagcagtaaaccaagagttctcacttgttacttggaaacaattagaattttcccaaattataagttacttaagatatttttaaaacaagtgtgtcatagcaataatttttaattctggttgatgtttatttgagaagaagtgagttaaaaaatataagacatggccaggcatggtgtctcatgcctgtaatcccagcactttgggaggccgaggcaggtggatcacctgaggtcaggagtccaagaccagcctagtcaacatggtgaaaccccgtctctactaaaaatacaaaaaaatagctgggcgtggtggtgcatgcctgtaatcccagctactcgggaggctgaggcagaatcgcttgagcccatgaggcggaggttgcagtgagctgagatcgtgccactgcactccagcctgggcaacaagagcgaaactcagtctcaaaaaaaaaaaaaaaaaaaaaaaatatatatatatatatatatatatatatttgacataacaggtgaagagaaaatctcagtcaaaatgaacttagaaaataatggaattggtgtttaagataaactactacctctttagccaaaatgaaggtcctttaattcacatgactttagcactgaaaacccaaaacatatgatgctcttctttcacaccaaaggcattgtgatgattagcgtggatttttctttgataaattttgctgtggtcatttcagtatcaataagttttggaagattcagatgtaatctgtacttctcagatacttcaatcaataaatcatcctaagaataataaaccaagagatttatttcctgcttaaaatttgggatactaacttattgttcccagttattcactcctttgccataaaaagatcccatttgttgccatgtgacttggaatgagcaaaaaattactgttgtaaatcccttagattttaaggtggttactgctgctcactacatcacacgttaactgatacagtaccacagtagagtgttgccatcctaaattatgtggctgaccagcaaacagcaaggaaacttattggagcctggaaaggtagtgatccatgtttcataatgatgaagcctttagtgaaactaycacagtaatttggatgataaatactctgtgcctagttgatttgtggctttaggtgaagaagtgggaaaatagatggtaatgtgttggttctgttcactacatttaacaggatattacaagaaagatgagcttagaatggaccattttgcaagtcaaattaaaagggaattggctgagtgcggtggctcacacctgtaatcccagcactttgggaggctgagggcaggtggatcacttgaggccaggagttcgagaccaacatgggcaacatggcaaaaccccgtctctactaaaaatacaaaaattagccaggcttggtggcacatgcctgtaatcccagctactcaggaggctgaggcaggagaatcgctttaacctgggaggcagaggttgcagtaagctgagatggtgccactgcactccagcctgggcaatagagtgagactgtctcaaaataaataaataaataaaaaggactttatagagccccaagattccaagactcaatgactgaaaagtggaactaatttttattttcagcaagtaagggataaaattgagaaattacttttatcaaccaagctgattaaggcaatatagaggcaaagattaaatctttatgctctttgttaaaacctctgaattttttttgtttttttttttttttgtttttttttttttgaggggagacagagtctcgctctgttgcccaggctggagtgcagtggctcgatcttggctcactgcaacttccgcctcccgggttcaagcagttctcctgcctcagcctcctgaatagctgggactacaggtgcccaccaccacgcccggctgatgttttttttgtattttagtagagatagggtttcaccatgttgcccaggctggtctcgaacccctgagctcaggcaatccaccccccttcggcctcccaaaatcctaggattacaggcatgagtcaccgtacccagccaaaacctctgactgtactaaggtggacttcagtaaatccttacatttggctaaaatgacagcaattaagtctaaagagacaggtaagtcttgaaatatgggcaatgtctaaaaaggaattatgggtatcactgactggaatcaaaatgctaccagcctggactaaaagaaactgccttcaaaatttaaaacaatcctttgagccccaagattccatgagcaggaaccaggctgaagaggctacttagcatataagaatggcacattctccgatactcttcagatgtggccaaggtggatagtgggaaagggaaaaaaaaagaaaacatcttcctgaagactgaagctaaaggtcgtggaaaaaaatggaactggggagctaggtaattacagaactttctcaaggaacctaagtaagaacatcctctacctccagaaaaggagccctcacaatgtctgcctactaggatttcagaattgctgtgcaccagtaactgcagtgtgcctcttatttttcccatttctgaattgagatggttaattacggttatcttctccccattccacattgcatgacagatgggactgagggagtacataactttttttacatgtcttagtccatggttcaagaggaagagaaagcaaaattctgtcctttggagtctgatactgggattggaggtgttttccttccagaaagaagcaaatatttgcaaccaagagtgtagactggtagactgtaggactgactctaactatttgctcttctgtaagaggatagtacgtttaccctgccatatgacttcctgtgactgtgagaatacacttctcagtcctactgatgtagaactggccttgtgacttactttggccagtggagcgtgagtagaagtgatatcatgaagtgtcatgtctgagtagaagtattacgatccactgcatggtttgatcattctattttccctttgctgagatgtgaatggcacatctcagaagggaattgctccttcaccgggtaacctgagcaaatcattgtaagcccctgaaattatgtagtttgttactgtggcataatatatgttagtgaatgctggccartacaaatttacagtgttatctattcarcttacctcagaaacactaaggtcacagagagagacagaattaataccaggtaattcaactttcaactcaattttcagaggtttctcactgtgatcatgcacaatttttagttcataggctggcatcttcatctccacctggatttcagtactggaaatctcttctatcagacacactgctttgcctgaaacttggtcttttggcagtaacagttgaggaaagtgatctggattgctcatagtactgcttcgtatctgtccragagttagttctttatgaaaaaaagggtggaggggagataaaaaataaatctacaacataaaatactatgagctataatatatgtggtgttagtagagatggtagataaagctgcagttaaattagtttgggaatcaagccaaaagaatcttaaaccaaagaatttgattgaaaatttttcaggatttaaaaatcaaggatatgatatttctaatatttaatatttgcatttttctatcttaagtttttcaccttttaaaatagagatttctagtttgcaaaatgtatacaggatccaaaaacatcttaaagcagtttaattttccatttacaatcatcaacttaccccttctcattttttctcttaaatctatggaatcagtttggattcccatcagattttgtttcattctttgaatgcttccttttattctaaatttggtaatatggtaagagtgtgagagggtgaactggaatttctcctcaatgcatttcatggccatctgaattaactgattttttttcacttggtccttttctgctrcatgaagaacatcaggattgtaggcaacatcaatgactgtgtaagcatctgtgtgtgtaattgaaagggtatgaaatgaagaaaaattgttgcactaatgatactgtcaggcaatatattaaaccatattcctgataaagctagagaatattcctgtatttttcagaggtaatcacagtagtgctacagcaattatgacatttcttggcacttttgcatggattaaaacagctcaccttattacaaaagttaaacagtattaaatttgcataaagatacactaattgtaattatatyatcaacaaataaagagttttacttgaaatgctctcaaccaagtaagatcttgtccattcctaataaaatttttacaatgtgctttctctcaattatttgtacctgatatctcagttgtatcttctggtttgccaacagttagaggtactggatgagtggttgattggggagctgggatccttgtccactgacacaggttgataaaaagtattttttcttttggtttctggaaagcaaataattttgcacatctcaaaacctagtttaaaaccatttaaggccaggcatggtggctcccgcctgtaatccgagcastttgggggtccaaggcggccggatcacctgaggtcaggaatttgagaccagcctggccaacatggtgaaactccgtttctactaaaaatacaaaaattagccaggtgtggtggtggatacctgtaatcccagctactcgggaggctgaggcaggagaatcgcttgaacccaggaggcggaggttgcagtgagcyragattgtgccattgcactcctgcccgggtgacgagagtgaaactccatctcaaaaaaaacaaaaacaaaaacatttaaaaaataatatcctaaaagccactcaccacaggaatgaaagaattttaggctccaagtaagtcatttcatgtattaaaactgcgtttgattatactgttgttatttgatttccccaaggctgctggcttttaattaggaatccagactggggtggtggctcacgtatgttaccctagtactttgagaggctgaggtaggagggttgcttgaggcctaggagttcgagattagcctgtgaaacatagggagaccctgtctctacaaaaatcatttaaaaattagccgggtgtggtgatgcccacctgtgatcccagctacttgggaggctgaggtgggaggatcgcttgggctgcaatgagctgtgattgtgagctgtgattgtgccactgcactccagcttgagcgacagagccagcaagaccctatctcaaaaaaaaaaaaaaaaaaaaaaaaaaaaagtctgccaggcgcagtggctcatgcctgtaatcccagcactttgggaggctgagtcaggtggatcacctgaagtcaggagttcaagaccagcctggccaacatggtgaaaccccgcctctactaataatacaaaaattagccgggcatggtagtacacacctgtaatcccagctacttgggaggctgaggcaggagaatcgcttaaacccgggaggcagaggttgcagcgagccaagaccacaccattgcactccagcctggtgacaaagtaagactctgtctcaaaaaacaaaacaaaacaaaacaaaamaaaaaaaaaacaaaaaaaattagcaatacctaagtgtaaagtattctctggttattctgggatcatttcattcaagacctccccatccctggcaccaactcgacataccagaatcctggtctgtagacaaagctgtggttctggggcagcacagagctgtttcccttctttcagctgctgctgaataaacttctcatagccctcagggtcactctgagctagatcatctaggaggttccaaaactgagtaacttgggtaagcagaccttttgaggatgtctccatgacttatgagtggtgaataattttcttaagcctgtggaaaaacacgacttcaggaagaaaactgtctgtgtaattattrattcatttctgctttggggaggtggaatgggtcaggaattgttttggtgaagttaggacagcatttgtgtctaaaaggttgtggatcagcaccactttatgttttccttattctttaattatctagtacctcttcctaaattctcacattgtcctctcagataaggccttacttctatttggaccctgacaagtcagagtaatcattttaagtctgggtttcctgatcttcttgttccaacacctgactggtggctccccagttctgaaattgccagaggtgtggtgtggggtgagggccacataagacttccttaatcctcagtatagtttagtatttcaaagcatggacttgtgagccagaatgcctagattccggtcttagttctatctctcactagctctgtgaccttgagcaattaatgttctgttcaaaatgaagacgataatacctctaccataggattattgcgagattaagtaagctaatagagaggctgggacacttctctacgtcttcagataaatctccttagcctcttctcccattggagaggtgtcccacagcatctttagaatgaggaaaagaggtttagattcttcaattactgtgtaagggttatgctaaacgggaaacttaactaacggataatcattccataggtctgcaaacccacctcttctctcagttctaacgggtaatcattctataggttggcaaacccacctcttctctcagttccttgacaaaccgcgacgcctgttaccagggtaaccagcctgggtacaacawctaattgggtccggggaacttcagggagaaaagtctcttcatatctagttccggaatgtcccccttctggtgccaggcttgcttttcagttgggcctgacccacttctcttccaggaaagcgcccgccttcyttctgcacccgtcaacctctggagtgtcctgaaaaccctcccttgtgggagtctctgggctgcctgttggtgggacgatttctcaggagcacgacttccggcctgaaaaggaagtctcctcctttttctcccaaaccacttcttcccccctaccccccgccacgcgaggctgcggcgcacggtatgggtgtgtttgtgtgtatttgtgtggggagggcgtttggagggaaggttaccgggagctccgaggccgctggggaacagggatcccggtgacaaagatggggatatttcctctgtcttccacttggaaacctcaacccccgcttcaggctccctagatactttctggggcccaaccgaaggccgtagccatccaaagcgttcccagcctttctggggagtgaaacttacccccggggttcgtcctagaggagcgtgagcggggaatgcccaggtcaaccgggctgtccgaattccgccccggctcagcctccggcctcagtccgggagagagatctgcctgtcggtctgggctgggggaaacgcggcagtggcctgggccacaggtgagggcagagtaaccagtgggaaggctgcgttttcacgaaggactcgggtgaagctgcagagctgcctttgagccctgactccttggcttcctgggtcggaggagatcttgtaatggagtggttcttcgtctcactagcaagatgcctgatttcctcaggatcaaggggtgagtgagcgttggggtggttgcacaaagctcctgctagctacacacgaaaatattcttgtcatctagtttttggaagcttccgtagcaagtaggaaataaaatgcccccaaatggagaaatttaggacatctttgcatttgatgttttgagtaatcagtttctgttactgttgacacccgtggttcctgacactctcaaatctacgtatttgcttcagtgcaaactatattgggattggaggtttgatttttaatttagacagtgacatacatcatttgcctgggactatgtggcttgggacgttacagctttaagggaacttcatctacaaaatagggatggagatacttgcctcatataaaaagtagttatgaggattaaataaaatggtgctcatgaaagcacttaattttatgtagtcttgtgcattttcaaagaactttaatgtacattatctcctttcatctcacattagtgtgtttaggcatttccctcttttaatggtaaagggaaaactattctttagaatctctgacttctagttcagtgatctttcctgtacctcatatgcttctttataaaacttcaagaaaagataaagtaataacagaaattattactaaacgttatttgttgattcatttcagattgaagaatgtcccggattccactggggaaggtcctcctgaggaatgtcatccggcacacagatgctcacaataaggtgggaggtacaacctagttactcctcaacgcttactgaaggcaagcagtgtgccaagcattattttggaacaactgggagatacaaagaatattcttgtcatctagtttttggaagcttccgtacacagtaggaaataaaatgatgaataaaatagataattataatacagtttgataagtactgtataacagagatatttgcaaagtgctttggagcactaaggaggaaataataaaatctacactggggaattagaaaagattttacagaattagtggtatttcagctgctgatctttgaactggttcttgaataggtatacgtttaccaggtatgaaatatcattctggatagacagcatcatgcattaatatggcaacgagaaagagcattaatcacttggggcatggcaagaaatttatccagaaagcagggaaggtaggggatagtggcagaagataaggcctcagtggtaattagagttggattgtgatgtttggagctgagacttcttcctctaggcaataaagaagccatcaaatgtttttaaacagggtgtggcatgatcatagttatattttagaaagatggtttgtcagctgggtagggaatgaatcagatggggagatacagaagggagagtaattaggaggcaattgcagtattacaggtgagagatgatgagggttcgcatgaaattagtgacagcagggatgaagaagaggaatttaggagatagaatccaaagaagttggtggctaattagattataatgataagaatggaatctaattcagttgacccttgaacaatgcaggggctaggggcatcaaccccctgcatagtcgaaaatccatgtataactttttactccctcaaaatgtaagtgccaatagcctactactgactgaaagccatagcgataccataaacagtggattaacacatattttttatgttacatgtattatatactgtattcttatagtaaagtagctagagaaaacaacatttcattaagaaaatcacattgagtaggctgaggaggaagaagagggacttgttttgctatcttacaggtggcagaggtggaagaaaatctgaggataagtggacctgcacagttgagattcctgttgttcaaggtcaactgtgtaaccacctatgtgactgggtagatgatgacgattctgttaattgagataaagaacaaaaaatgggacaattatgataggaaaggtaattagtttggttttcaacatgttgatggtgaggtgcttataggatgtccaagcagttgaaaattcagacttggagtagaggagaaaagttggggctggacataaaggtttcgggattattgatgtataggttgatgataagaggtcatgagagtagatgaggtcacctaggagagcacatataatgaaaagagggccaaggcccctggtttagttttcttcagtaaactgtactacttttggtttgatcatattattattatcatatcacctgatttttaaaattatgggcgagggtaaaactgttacccgagctgcctatgcaattatgttaacctgcccctagttatatagtaagcttagatttaaaatggtagctagaaaaagataaatctagcacagatctaatgaaattatgcaggaagacttagaaataaaatgtgttctttgggtaatcacattctgcttttcaagaaattccctagcagccatactgattattttattttattttatttttgacaaaaattataatattaccagaagagatttagcttagggagtttaaagacctgtccttactagttttttgactttgttaaaatctctgagcttttgtttctttacagtaaaatgtaataatggtagctgctatattttcctcatgagattgcttaaggttcaattgagatgatataattaaaatcatattgcattttggaaatgtggcattatcatttgctaatcgcagcataattgcaagattgataaggtgatgtttgtctgtgcagcggtttaaaaattctattggggaagatttccacatatttgagatttactggattggactgttcagccactttctagagaaaccaatttgttttccaggttcctgatcatagcccagtctgtagcccaataattagtcagattgtattttcagttagttgcttttttttttttttctttttttgttgatacagagtctcactccatcgcccaggctggagtgcagtggtgcaatctcggctcactgcaacctctgcctccagggttcaagcgattctcctgcctcagcctcctgagtagctgggattacaggtgcatgctaccacgcccggctaatttttgtatttttattagagacggggtttcaccatgttggtcaggctggtgtcaaactcttgacctcatgatctgcctgctttggcctcccaaagtgctgggattacaggtgtgagccactgtgcccggccagttagttacttttctgtaatgtaaagttatttttagtaacttatttttatttcctttttaaaaattctagattcaggaggaatcagatatgtggaaaataagagaactggaaaaacagatggaagatgcttaccgggggaccaaaaggaaaatgctacccagcagttcaaggtgaagttgcagctctgagaactaaaataattctcatctttttcagaatcatcaacttttgtttaaaaatactttggtatattaaggataaattcagttctgtgagtccttaagccttccttctttcgtaaatctagacccaggcataaagataatggctgtgacgcatatggccctgctctttgtacttatttacaatggagagttaaaaaattctacctgaacaattatgaatgtgtagggttctgtggattctaaccttacctgatagcttttaactgaagattttatactggaatcttgtggtcactaagctgatcagtcattctattctctattaatctttcattctttcaggcttttctttttgtagctggaactgcaggtgcatgccactatgcctagctactttttttttgtagaggtggtgtcttgctgtgttccccaggctggtatagaatcctgggctcacgcagtcctcccacctcaacctcccagtgttgggattataagcatgagccacttgcctggcctcagacttttcttcaccctgtctattcaccctcttcaccagatcaacagccttttcacattaccttaatagcttgagtgtaaatatgaaggattatgcaggcttagttatcttccttgtggagaggcctaggaatgcttgaataattgggaagatccttacacgcttgtaagtgtaagagctacatatataagaaatacttaaactctttaggagcagggcttgtgattttctcatttgctgctatattcctgccagctagaccagtacctggtacataggaggcccttacaatttttttttttttttttttttgagatggagtttcgcttttgttacccaggctggagtgcaatggtgtggtcttggctcactgcaacctccgcctcctggattcagccaattcttctgcctcagcctcccaatcagctgggattacaggcacctgccaccacgcctggctaatttttgtatttttagtagagacagggtttcaccatgttggccaggctggtcttgaactcctgagctcaaagtgatccacccacctcggcctcccaaagtgctgggattacaggcgtgagccactggacctggccccttaaaaatttttgataaccgattagcagcttactggctagttagtagaaatggtaaacagaagctggatcagtggttctcaacttttttcctactccagtattcccatgggttagaccttgttcccactgttattgggacctctctatagtaagttgctggtttgcacagagggaagtgtatttcagaatctctagggtagtttgaagtgtcccttgctatgattatgttctgcttccctctttgcatgccctcctagttgagaatcagcgagtgaactatcacatgacatagtccagagttgatttcatctctctatgctttgcaataggatgggtactaatggtcagatttttttctttttttcttttttttttttcctgagacggagtctcactctgttgcccaggctggagtacaatggcatgatctgggctcactgcaacctctgcctccccgggttcaggcaattttcctgcctcagccttccaagtagctgggactataggcgtgtgccaccacacctaactactttttttgtatttttagcagagacagggtttcaccatgtcccccaggctggtcttgaactcctgaccccaagtgatccactcgccccggcctcccaaagtgctgggattacaggcatgagccactgcacctggcctggtcagatttttttccactggactttacaaatgtacagaggaacagataatcaaagtgctgggattacaggcatgagctactgcactaggcctggtcagatttcttccactggacttcacaaatgtatagagaggagcagataatgtctttgcctttttt

SEQ ID NO: 96356 - DNA, 68551 bp, Homo sapiens
tatgcaagtaactccatcctttttcttccccactttcagccaaagaaatactctccaaagcccagaaaaacatctcaaagaattgttgaaaactcaccaccaaccttttccatatttagattttaacaattaaatctctataatttaatttccagtaagaataacattaacaggttgatggtaaaacaaccctgtaataattcaataaaaatgataaaaatttatctttatgagataagcaacaacatccatccctcttaccctttaggtactgctctatttttttcaaacttggccactatcttagggaagcataaatatattttttaaaactccaccaacatagagatttcttgttgagagactatgaacatattcctcgctcataaaaataactaacgattgtatgagaatcaagtttgaattactgaaatagaaataaagcatacctctatacttttcatgttgtaaaagtactttattaccaggatattagcttattttggatttcttatagcaaaaagtacatcttactacactgatagcagagagacaaaatcttacattacataatcaagactccttaagagataacacggtatagtcgtcagaagcgctcactgaagacctaaatttcctggctatcaattgcagacctgccacaccgatcagctcagcaaccctgctcaaattactctttattccatgcctcagcctcctcatctgtaaaattataagtattgctcaggatgtttcgaggatgccatgtaatgagacttaggtaagtactacctctattactgatctaagaattcttattttagatgcatatacagctaaattaatgaatctaaatggatagcaggacaaatttgacatgagcaatttttcaaaaaaaattatttatttgcttttaagaggagaggctatgttgctcaggctaaactcaaactcctgggctcaacggatcctcccacctcagcctccaatacaagtgtgcaccaccgtgcccagttaataaacatttaaaaagttttacaatagttgcagatttacagaaaaattgcaaagatagtacaaaaagttcccaaatcttccaagaagtttctcttattaacattttatgatgtcagcaacttttagtgatagctcaatagtggaaagtcatttattctcagccagtaaaactacaaatttaattaatctgtaatttcagtaacccacctactggaataaaactttgaaacttgtaaataccatattataattagtaagtgctaaatttattgttttagtaatagcactgcacatactatactaatgtaaggtgttttatattctcattaaaaagaaataaaatgaaaaagttattttaatgtgtgtaattacttctatatacatattaagttgcaaattaaaacgtaaagtagaaaataaagccggaatatttaaatagatacttcataattttaaaattaaataaattttcttaatatcataaggtaactaaaactacataagggcaatgttggtgaatacattttgatatcagaattcttaatttatttcctcacttttaaagaatcatatttctagtaatataatacaaggcaaatttttctgagatgataatgaaagaggtaaagaggtgtatctatagcaatgttaaaagaggcacacagcattaaatatagacatgaactgccccatttagtagccactagccacatgtagcaaaattaattaaaattaattaaaattaaattcttcagttgtactagaaccacacgtcaaggactcagtagccacatgaggttagtgttacaatgttggaagcacagagagagaacatttccatcagtgcagaaagttgtactgaaaagtactgctctagatatgaacagattgtttcactaatcacacttaactgagttctacccaatagtcctaacctctttatccaaacaaattctttttattaaacttgcaaaaaagaagcaaggggataaaagcaggcttttatctcattttctgaaatgtttaagggatgaaaaggaagacggcctggccaattcccataacagacaaatggccaccaataaatgaaaaaattgctgaggtcctcaaagccattgctgtactcacgtggcagggtagcagtgggcccagtggccaggaggatgcctcttcaggggtacatttcctcactagggggaggggtccccatgtggggcctccgcactggtgggaccttccccattatagggctggggtttctgccagtgaaaaatgggaaatttcattgttagccagctttaaaacttttccccgttgagatattaaaaacactgcttactggattatttagttaattcaaaacagaattatatgagataagtttttagaactgatgaatcatgatgtgtgattgattctgtctgcccctgagtcccctaggaaaaaatcacctgcagtattaccagaactgtcataagaattttcaatcttattaaatgctgaaaagattagattgaaccagataatggtttttccaatcaggataaaaaataaggataattgtcttttaattatcagtaacagacagtggtgaaaagagcaaatgtaatcagatataacaaaaacctcaccaagttccacagcttctcattcttaccccatccgaatttttaaaatcagagttgaaaataagaagcaaatatttaaattccatccagttacttcttgtgaacattctgagatttggtactaaaataatgatgatgtaatggtcaatggaaacaaagatctgttgttttattctccaaaaaatttttaagaaatccatgtaagcagtctgttgatatctaaaaatgtggctaacaataaaaatcccccttacacttaccaaatgttttcacttctacaaaatgagcattttcattgtttgggctgcagcacacacagttcaatggaaagtgataggtgtattcctactgacgttctgtaatgccataagagttaccctaaatttttccagtttaaactctttctgctagtatacttacaatggcatgccatagtatacctttgggctgttaggtaagagggcaattcaatagaactctatggatgatggatattacatttctaaaagccattgaaaaaccagaaaatataagtttgtggtgaactccaagaaaggagacagaagaagtaaacagatggaactgtgcactaaaatttgtgacattatttttcccaccaggtaccagagatcctggatctgcctgacttaatctcctaatctctggagttgcagagggcccctttaatcccttgtaactacgctcccaaagagcaattcagaggtcagcttactacaaactgcacttttctgtctacattacaagaaagatgaggataaagaaaggaaacataaccaggaaaaggtattttatacaaaattaggtaacacatttgaattacaaattatcaccctccaattggtgagagaaatttattttaaatagaaaatatctagatcccaagtatttaatgttactgtaaaagttgaaatactttcacgacaggaactaatatcattcccaattagcttccaatcagaatcctcatattaggtcatgtattaaaaaatactaacttagtagactattcctaatagtattccaaatctccataacatgggtaagttaggcttacctgctgctagttgtgaaaattaaatttttgacactatcagtgtgaaaagtagttccagagtatatggtcaaacaaaaacattgccaaagatgtaagaataaagatttacatcaaacatcaaaaacagaaatgcctttcaggagttgacctaagttcctaggggtggaactggaaggcttcgtggcaagagcttcattctgaaaagattacggggtcactaacctcgacagactcagtcaaaattaaactctgttagacttcctgtctaccctaaaagaccctgatatccacagataaaaacttcttcacaactggcttatccattagaaaaaaaaatactgcctttaattaaagagataatttttaaaaacagaaacttactcctctgaacattgattttatatttactttgctatactgtcaaagtttcctaataacctttcttcctcacatgcagctgcaaggctgttttggcctgcagaaaggaatacatttttctaattcacacaaaatgccatgaatgttaataaaggctctgaagacaaccatgtaataccatatttcattgactataaaataaggtgcaccatcactttacaaaccactgagaaaagctcactaaattaggctgtaatatagtgatttcttatcacacaaaaattatattactcttcttgaaaggggtctcttgataagtgtaacagtcatgtttgctatatatcacacttgagcacaaagaaaggattacatgaacaaaaaaagaattactaaaacttcttcacacttggagtttaattcttctgaatcatttttcagctcagagataattgtttttccacaaaatgtagtcctttgtgccatcaagagcattgttgaggtagtgtatcttgaaatttctctccacaactgcccctggaattttcttccaaactgctgacattctttttgcaagatttttaaagaatgcataactacaactaactcacaataactacttgtcccaaagtaattgatatcagaaaggttaaaatatgtaaaaataggcttcttagaactgatgagatacaataacagggctcctgatgttgggacaaaatgcttttctttcacttcctttcacccatctaactattcattcctcaaatagttattaatcacctaatatgtgacacaggcaccaagggacagggcagtgcacaaacaggtaatgacactactctcagggaacttacatagagactggcattaattaaataaacacagaaaattaatataaaactactactgttgtaagtactgaaaaaaagatgcacatcatgcagtaacatatggctgatctgacctagtcagggaaatcagataatacctaaggaaagcagggagaatgaaatgtgtcaggcagaggaaacagcatgtaaggactgttttgcatggataactgcactggggaaagggaaatcccaaactttttgaggcctattacaattgagttctaaactacaccaatactgggggacctgaaatgccagcacgctcttctggtcagagtgagggtttatggaggccaattaattaataaagttttgacccaagtctcgggaactacagagaagagcactatcaaagacttaaagatgcaggggtggtggtcctcaccatattctctttctataccttttatgaccctacggataaaaaaaaaaaaaaaaaaaaaccaaacagacggataatgaataactgtaaccttaaactggtagaatccccagtagtaactggcatgccagatatggtatcaatttggtactcagctactgatatggtgaatgctttcttctcagtccctatcagtagggaagatgaaaggcaggtaactttcacaatggcaaagagaccataatatccttccccagggcaatgttaactcttacgatctcactcaaaattcagtcagccgggatatcttcacattccattatattcatgatagcatactaactgcatctggttagcacaaaatggaaagtaccctagccagcttaagtaaaatacacatagcagacatttcacaaaaattaagggttatgggcacacactgccaaactttttaaggagttcagggctccaggccatgctgagaacatcctctttaaggtaaacaagtttttgcatctctcaaatctactgttaagaaaaaggtggaccttctttgatcctggaggctgtatatttatatgcagtacttttaacaccgttttgatccatttatcagagaccccgaaggatgccagtttcaagagtgaccgagtgtgataaagaagactctgtagcaggtcccagctatggtgcatctgtgaccaatggatctcatggtacaagacctattttttttctctgtttaagaaatggggtctctctctgttcccccaggctgaagacctatcattgacggataaaaatgctgtggagtctctggcaagcaccaaaagagaagtcacaatgctgatccttggggttcagtggcagagaagaactttctgctagaaaaacaaatcctagtatgttacagggccctaagagaatttgcatgcctcactatgtgccaacaaataagtctgtgacttaaagtacccactgagtagcaagacgggcagagaaacaacccgttgtatgatggaaatggtatatttgggattaggcacaggcacattcaggaggcatgaaaaaattacattcacaggtaactcagactcccacatcactaacgcctttctccttcatgaccaactgtcaaggmaaaaaggattkccgatctagccaaatatgaactgctgttgcactgcagccttattcaggagcagacctaaagaactgtggtaaaagaagtttggcagatgagaacaaccggagcagtatatgtggtggtcatccatttcaaatggagggagaaatgacctgagctacagatatactctgattcattggcagtggtaaatggtgtctggctgtttgatcaggggcctagaaaacaacagtgaaagatgatgtgataaggaggtctggaaaaatgaattgggcacaaatcaggggcatttgtgtgtctcacaataactaccaggaggtatctaccaaaatggagcatgtcaacatgtgtgttgtctaatatcaacaatgaggtgaataggatactttattctatggctgtcagccagccttccacttgggccaccacagagttgacatagtgagcccataatagagtggccaaggtgcttcctctcaccaatgttgaaaagctattgctaaatgcgtaaactgccaatgaaagagactgatgacaaccactcaatatgacatcattactcaaggaaaccgatcacttggcataagattacatgggagtggggaggtagagggagtaaaagagttggtggcagggtggcaatgatttgtctttacagaattaatacctaatctgaacatggatttagttccagctcccaatacctctgctaccaccaccattccagggcttataaaataactgatctatcaacatggcatcccaccaaacactgtcttaggcccaaagtacccatcttataactaaagaagtatgacaatgggcacatccccttagaatccatttgctttaccgtacactccattcacaaataacagctggcccaataggtaggcagaatagcctattaaaaaatatcagctgaagagacatcttgaagatgacttcctgcagtgttggagcactgccctccagggtatggtatatgcatatgcattgaagcaatggccattacagggtgctgtgttataaacagcttcaatacttaggtctgggaactgaaggatgacagtagggttgactttgtgaaacttgtgttttctacccatcctactttcatctctactaaggtagaggttctgacttccagatggggttaaggggtgattgtttccaccagtggacatgtaagagttccaataaacttgaagatctgactatactgctgggatactttgaattcctcaagccagtacatcagtagaaaaaagggagtcaggttactgctaggaatattcaatctggaccaccacaagaagcaaagactgcagctacacaatgggggaagaagaaatatgtccagaacttgagagattcactggggtatctcgtggtgcttccatagccagcggttacaataaatgggatatttcaacaaccatggatcaacaacagcaaggcaactaagggctcagacatttgagggacataagtcatattttatttcagcaggcaagcaacacaagctggcaaaaaaaaaaaaaaaaacaaaactggtgaagaaaacctaaaatgagtgatagaagatgtgtatcaattactgcctcacggtcagctgcagcagaagggactgtaatttgtttctctaactgtcccgtctaaagtctttcggacagtgtggcagggctccaccttgaaggggattcagttactgattgcacataacctctgatctcagggatgaagtgaaggcatcttattctcacaaaaatggaggcctcatatcgtagtatggaagctacgtataatgtagagcctgaatggatctcagtggttaaaggggtgtattatactgggcatcttttatgcatcattcagatcttctcaaccttacttgtatcttagtccagctgtctaaccagcaccaatttcacataggtacatctgacagttccctgcctcatgcctcggggggcagttcttgccttgtactctatggcatctgcgttgacgctgctttggattccccacttgcatacccccatggaggaattaatatactgaaagatgaatctttggccaatgggagacagaaactaatgaaaaaattcttcctcctttcttctctcacaaggtacagtcttaaagcacagtttatgagagttttcaggaacgaacctacaggactgagtggtggcaggtaccacaatagcttatccatgtattgactctccacccctaccaaaccatattctccttgtttctcactctacttctygggattatgttccctaataaacagcacatgctgctctgcttccggctcttcttagtggggaagctgagctaagacagatctaatagtctgtggtgcctttatgatatttgaggtcattcctctggagttcagaggtggtaagtgaaaccacaggcagagatgagatcactcagagggaaagacagagtaggaagagaaaagagaagaagacctaacacttggtccattaatggccacgagagggataatggccagaaaagaagaatgctgtgtggccagagaggtgagtagaaaactggaaagtactgttgttattgtgagggagtttagtaggggacacaggtaatatacatctaatatacaagctgttaattttaaattactaaatttggttcaattattaatatagatatttgatatattatcaaagaaaattaaataatacatactgcaaacaaagtagtgatggaggaagtttttcaaaccacattcctctgaggggaaaccccaggcagagctacaggaaagcagaagaatcagtaaccacgcccccttatctatgcatctctggaaggcaaactggtagtggatacagactgaggaaaggatgatctggctggctaagttattcacttacaaaattctaccttttgaaaatttcttttggattttaaaaaacgctctgacatcaaaaaataaaagctcataaaacaggcttttataagatcttatagaaaacaacacagaaagctcagtgccttatgtaaggcattttaatttagtatacttaaaactatacttcatagtaagactttcttccttacacataggagggcataagagttcataaaaatgctttatatgtctttacgaacacttaggatcagaagacagatcttaatacttggaattaatcacaagattaaggtatgaaatatcaccctctcttacaagaagccagacaagtcctttttggggggttgggtgggagattaatgctatatacccatcagtagcaggattcatttttttttttaaatttagaaatgttttggtattctccttaagttcattaaaacttctctttagtgcatttagtttggtgtaaataaaaggatcagttctgcctgatyttcaccctgatttcctgtctgtttcagttaatattccttatcctattgttactaatgtttaatgaggtctttattaaaatatacatatgttcttttactcccagattttatttttgtagcatgtattacacaggccacataagtccaaagttacaatcaacaatataaaagtcacagaactaaaatctaaatttctaactaacaatatgaacactagggaacttcaatttaaatcacaaagcaaggctttgtaataacattcttaaagtacttaaataaatatgaaacgtctttgaatataagtggtacaccaaaagcaaatgtgttttaaacgacccaaatgaagagtttcattttctgacactgcttttggtaattaaaaaaaatgatatatttaaaatagttagctcataatatcacctaaagtgttgtacagttaacaacttcctttcaaaaataatagcataaagcaatactgaatacgctataacttaaagatgagacagaatcaatgctacctgtcagcagtgctagaggcctgccccaaccacatgactattaggaacaagtcagtgagctcctctaacaaagtctgtgcttcagagatggtggcatctcctccacacattaagtttccttacccaattcttttttttttttttttgagacggagtctcgctttgtcgcccaggctggagtgcagtggcgcgatctcggctcactgcaagctctgcctcccgggttcacgccattccctggcctcagcctcccgagtagctgggactacaggcgcccgccaccatgcccagctaatttttttttttttttttttttggatttttagtagagacgtggtttcactgtgttagccaggacggtctcgatctcatgacgtcgtgatctgcccgccttggcctcccaaagtactggctgggattacaggcgtgagccactgcgcccggccttccttccccaattctttgatagatgctcacttcacaggtacaattgttgcctgccaaccttgcagggtggatattagttttcatctgatgcttcagaatacccaagtgacacaacaccaggtcaaatgattttagtggtttgcaagtcggtgtaaaaaccccagctcttttgtactggagctcagtatccaaacagcccattctctctttagaattctaactaaaatgtcagtggcaagggatttttaaaatagcccctaggtgtttcaagtttcctgtgcttgtttcagcagactactgaccctgcctactcacaataagcgagtctcttaggatttaaatatacagctacattgccgtaacaagaaccagttacaggaagagcaggaaaaaaagttggggggacaaactggcaggaaatgacttcrggacactttttttctttttttttaaatccaagtcaaagaataactcagctctttacagttatttaaatctgaaaactatttccctgaaaatgaaatttctaagtaatatacaaatcaacttaactagactgaaacatttaggctgatcttactttatcctttwtctcagtatcttacctaacggttctatrtttcaaagcctgacagatttgtttggctggcatgatctgaccacttcctttctatcgagaaatacaattttctcttttgttgctgaaagatttctgttcacgcgtatgaacgtgggtccgtttacagattttgaagtgtaaatgttaacatggagataatgcaggtcagtattttacatcttattagatatctatataaagaagataagakagccgggtacaatggcccatgcctgtaatctcagcactttgggaggacgagatgcaaggattgcttgagtccaggagtttgagaccagcctgggcaacatagtgagaccccattatttttcctttttttcttttgagacagagtctcactctgtcactcaggctagagtgcagtggcgtgatcttggctcactgcaacctccgacccctgagttcaagcgattctcctgcgtcagccctccgagtagctgggattacaggcacctgccactgcacctggctaatttttgtatttttagtagagatggggtttcaccatcttggccaggctgstcttgaactcctgacctcgttcgtgatccacccacctcggcctcccaaagcactgggaytacaggcgtgatacacaatgcccagcctcttttttttttttaatataaaaaatttaaaaagataagaatgtctacaatgaataagtatagcttctctggcttcactgatagtataatcttgatgtcaggtaggtttcttgttcctcaaactgtataggttaaaacacaaaatgggctaataatggacagcactatggtactttagttatacatctggattgaggaatggagtgagaaatacaatgcgttttcgctgaaagtgtttaaactacttaaatacattaaaataaaaataaacacattaaaataaaaggttatctatctttccattgttataagatgtgggttccaaagcacttgagggatgggatggagacagctgctcaaggacaagytggagaaagttcattataagagtatgtataattcattccagacctctcaacgttctctctcataatctctttggggtcctagagactttgggcagctagccatccccagggctcacttgcttaaaattcaaatcccatttcccagatctcccttaatccaaacacttatccataagaagttctaaaacaattctagggttaagacatggaggaggaggggtgcctctgagtttgacagtatctcttagcgcaggtactataacacacaccctttattcctttagtccttggattcctggcatctgccagtaaccctatgtgatggccagtcaggaaggaaagcagtcacacagtttccttttgcagtgcacaggaagaatacgcatgaagggaaagtctcaggttagccttcccctgtacacataacagtattttttaaaaatcacatgttaaaagcaaaacatcatgaattcaatgtcaagaaattgaaacatttctttgaatcaacttatttataagtattattgagttcctgttccaaattttgcattctactctgattttcttgtatataaaaatgatcactcaattacttaggggcaaatctaacaatattcatgccttccttaaaataaagacaacaatagttaaccattatgtagtgtgttgagtagtattcaaatatccttgcaaagaagccacaaaccttatcagaatactaatatgttgttatcagaaaatttgtagtgatggtggtaacctgacaatcataaacccacagtaattctgattcttttatggtttcaatatgaatacagctgaaaccaaatattttaatttatgaactatgttaagtttctcttttccatttatatgtgggatggaccacatgcagcaatatctaatttagtaaatatttcaagcatatatcaaaccatgatgcataaaatataatgaaaaggaaaaatrttaatactttaattattactcaagaaagaacacatgactaagctgtcaccaactgcctatcataatgctataaaacttacttaggaccaactaataaaagctcaaaaaccgtacaactactgaaaatgtctagtatataacttgagaacatctgtcccttttaattcaaaccttttcaaatttaagttcaaggaacttctatcactacagaaaatacagaaatgtatcatctaattttgagtactatttctgccaatcctttgctcaaaccttccacaggctcctatggaataaagctgatgttctggttctggtaccctaaatcctccataatttggaccccctcacttcagccttatttcctcttgctccagcatgaggaaatcttttctctagagaacctgaattcctgaaccttctcaactctgcacctttacttttgctctttctgaagcttgtctggaacacctttcttgctttactcactgaagtcccacctgaatcaagttaaaatgctttacagaaacctgtactggttcatgtttgtgatcctacaatctgagcttagacactggcatgaaatgatgctcttcaaatctgctgaattaatctgactctaaagccaatttaagaccatacaatagtctgcccctcactgttccaacktggtcatttccagtaactgatctttgtagtcactgtgctcatactgcatttactgcccacactgagggtgtttaaaacttgctgatttcatggaatctctgtgtttttctcatgttaatcaaataagtggccacctgtcctgtgtgcggcacacaatgctgaggatgcagagatgcaggatgaccttttctgtgagaacatatacacaatctacgatacaagtatcacacaaagaaccaaaaggacgtagaaatccaaaggaggagggagtgcctgtctgacggaaacatgccagacactatacagaagcagtgaggttcgattctactgtcacaaggaaagtgttcatggtgattcagggcctccggcattcctctcctttctgagctcctatagtacttacgttttacactacttcttttacccttaatgakgaagatgaaggtcagaaactgattgcatttgctgagcaatcactatatgccagagattcttataattagcactttacatgatattaatgcatttaactgtcacaaaaacctaatctattaaaatactcctggatttacagattagcaaactgtggcacagagaaattaaacatcttggaaaaattacacaggtattaagtgggtggcatgggacctactatgcatggaaaagtcaaaagggccagttttaggtggcatggtcaaggaagaactatccctataaatagtagttgcaatgagacctgaaaaaagagagtcagacatgtaaggatgagtttttcaggccaagtaaactacaaggagaaaggccctgggatgagaaaaacctggcgtgtgtgggaagtggaaggaaggccaacgtggccagagtcaagtgaaagggagaaagaacaagagatgagcctccagaagcaggcaggggccagctcacgtatggcctgtgggcctgggttaggagtctgggttctatgtgtactgatttacctttacactacacaactcttatgtcttgttctccacagtgagagtgtcaatggcagaaaccagctattattttttaaatgtcttgtagcacccagctcatagtattatgcaaaatactctgtgaaacattccctaactgtgataaaaatgaggtgggtgtaactgcatgcaggagtggctgaaatggtctaatgtcggagatacaaatggagagacagagaggcattccagacctgtggtatgccagtttcatggctgcagagggggaacttaagacgttctaataaaaataagatggaacatggaaaaataagattttgttttggggagggagtatagtttttgtttttgttttttgggacagcatcttgccctgtcaccaaggttggagtgtagcggctcaatcgcagctcactgcagctttgagaataggaaaaaaaaaaaatcttctgtaaatcaagatataattagaacttatactcagattttcctttaaaggaaaacaaatcttcaaatgtcttctaaatgagagcgctccagttttctatgagaatacaacagatgctacagtgtacgaattctgaagaacgcaggactaagaaatgcccagtgaaagcaaagtactcaattactaacgaaatgttaacatgtcattctggcaagaagaaaaatatcatggaacagsagaatgaacctgggcactggagtcatgaaagttcacaatcagaactctagtttagccactgtggtataacacctaaaattaaggttcaatatcatgtgccgctttgacacctggtaaaatcgggaaggccttgaatgatctaacccagggatccccaaaccctgggccacagactgctaacagtctgtagcctgttaggaactgggccgcacagcaggaggtgagcggctggggagcaagcattgttgcctgagttccacctctgtcagatcagcagtggcattagatcctcatagcagtggggatcctattgtgaactgtgcgtgcgaggtatctagactgtgcgctccttatgagaatctaactaacgcttgatgatctgaggcagaagagtttcatccccaaaccagcctgccccgcccctgccgtggaataactgtcttccacaaaaccagaccttggtgccaaaaaggttggggaccaccgacgtaacccatacgttcccctctccactctgctctcatgaataaaggcccctagcgaaaccatccaccttaccaaaggggccagatgcagttcttccttatccttgaatagtaggtttcagtttcttgtcagcttgaggaattattcaaacaagccaatcacatccttccatgggaaccaggggatacccccaccctcttgatactacaaagcctgcctcccatagctcctagttgtttactctgttcccaagtgcaactccacgtgaccccacttgaggcacagggtcctctttgccttagctgtgaacataggtaactaactgctgctgagcccaactgacgtgttcagccatcctcataaccctatggcaggaatccttcccttgtcaaaggggtgaggaggaagtgaccaaaaccaccacttactggctgtgtgaatcagacctcacaccaagtaacttaacttttatctccaagctttttattctgtaaactaggattaagaatatttactctgcaggttacggttaagtattatctctagcagttattattgtgtgttgtatctagcagtgcagttttagactcatgactgattctactaataaaatccttatcccatcacctgtccctatcaccataactattactattgatttcaagtgtgtaagttcaaattatagagtttgaaacaataggtggggacataaataacaggccagattttatttaagaagcaatctggcttatttactagacatcacttaatttcagccactaagaaaacaactataaggagaattaacaagagttttgggaaaataagtagacatgaaaccaagactgctttccagatactaaatacttggttgaactgtaatttgattctgtgaatctggatatgcaaatgatgcagcgatttatggcaataaaggtctttttaatgagctaacattctgtgcgcaaatgctttatttttaagcaaatggaaaaaaatcacttgcttcagataagagacaaggggaaaattggagctaataaagcattacwctgagagaatttccttttcttcagtttttccttctcacatcttaattgtgctacttattaaacacacccccaatccaactgtttcctgaactcagtagtacatctttatgcctttcaatttttatgcaattacctaatttatacaagtttgcatatttgtacatttacagagaggaaaattataaaatatatagtctaatatacacataataaaatgaaaatttataactatttaaataatggagggaagaagacttacacaatatagtgagaactcctttggacacacatagggtgatcattttgggagtatctgtttcgtaccaagaattttttgcctttaaattttgtctagttaagtagagctaatgcacaattgtgtcatttgggggatgcaaactttattctcttcagaattctagtttgatactgaaatattactgtcataaaattagagataaatcacaatccaggttatgttagtaagcaattggatgttacattgagatcttttttttgctctttggctaccacattcaataagtatttaagcactagtttaaagtggatgattgttaaygtacaacaaaattgcacagtaataaagcctgtaataaaaataagcggaacacccacagctcatacagtgtagttaagtgtattagctggtctcaaaagcattaacttttactcaaatagcagcagtattctgcacaacctattagcttcagacagtgcatattagctgcagactaccagaaatttttatatttgtatgttcaaataaaatgggtttcactatattataaatagttccatataatattgaggatttattttaaatgtaaatgagaaaaaaggggaatcttttttcccttacaaacgaggtaayttaaaaatttaccattcttagtctacatgtattcccgtattttacatcttgtgaaaaagcaagacatgatatacttctattagttagcttttcttggaagttgtaaatttataaaaagagatcactgatgggccagcccttcatttactctcattctgttaaatttgtctttctcttaggccatagcttgggaatgttaaatccaaaatttggctcagtgtttttaaaacttaaaaaaaaaaagtcataaagacaagctgttttcttgatcctttaatgcattttcaacgtttaaatatcacatattctggttaatcatagccaataagatatcatcagatcatataaatctgcgtcaatgtacttagtttcaaaaaattaaaaacaaccaattcatagtgccaaccatgctcaaaaatcattaacattcactgttgacatcagtccaaagcattcacctgcattaaaacacttcattaaaacactcaagaactctatcactatttatctagaagcacrcataaaacaaaattcagttttacatacaataggatttaatcagctgtttttcagcttttttttaatggagtcaacttataattttttattattatgaagttattctaattctttatagaggagcacaataatgatatagcaaaattcacttgggagaaaagatatgagtataagattttggtccaccacagtatcctaggtgcctgaaacagtgcctggcatacagaaactgacattcaataattattttctgtaygaataaacaactgggtacacttttccaccaaaaagtaatatttattttttccttccattcacatcttatcacaggaataaagtattaaaggcatcataagttaaaagttctgttaatggcatcataagctgaaagtttagtgtttaatatattcaagttgcatcataatcaagamtctttctatcatgatatcgaagtgtctattcttatagaaccacacataaattatattaatattaacatctattatatctgttaatatgttaatagtttattattaaattattaatgtcattatcaaaggcaagaaaaaagtaacagaaaagaagtctctgtgtgactgttatctggaaatgaatctataatgtaaatacatctctatatggctgggaaagttctttcaaaagttcaattaaataaattttaattgaacatgaaatgcccaaaattgagaaaaccactaccaaatttggacagagtaatagtaagcatccttctcaactaatgaacttgagacgagaaagtaaggagaaaaagaacatggtagagctgtggagagactgacagcaggaatttatcagtaagaaggtataactgataatgttgatatatgcacttacataaaaagccttctgaatattaaaaatattaaaaatcatatcactgatgtaaaaaatttgtttaaagtcctatagtaatcatttctagaaatttgcttttaaatgctgatgctatttgttatgatttttggttattccttttgtttcactttttgccaattatgaacgaagaatcctcatacaaataataattgcacttatgatacctttcagctcacaatcttaatgcattaaccaattaattaagaaggaaatatttatcccaaattagggtaatcagaattaggaatggcaagaactctgttgcttcttttctctacacataccattttagaatttgactgcttgtgatataattactgtatctgacaaaacatagaaagagaaattaatgaaaaactgatttctggatatagctgcagaacatttatccaaattttctgtactgaaagctgtacattacagtgtgatgactagtagcgtttgcctacatgctttacacttaaatcattagatataaacgtggtttcatatgacytgtctgtgagagcttatttagtagtcttagatcatcatcttctaatgactacttatcagcttgtactacagtatgtgggccragttggcccattcttactgaaaatrttttgaattaattttaacccctaaatattaaggccctattttcacaaagtatcacataactacatttgaacaggaagatatttctacgtatagtggttaatgcaaactaatatatagtggttttcagaggctaaaaaaaaatctgtttatactattttatttttactgcaaagttctattttgtacttttaaagaggagatctgaagatgtcagaagtgatggtaaatctataaacctcactttacaacttataagacagctctattaaataaaatgttatctaagaaaaggataagaaaattaacagctgacatataccacagctcacaggcatcagagaagtttttttaatgatttaaatctatccatattaatatattgtactcatagcattttcctgaaaaactggaaagctggctggtggcaactattgttttagacaacctactacttctgtggctttcccgctgcagaaacattcaggaaagcatctttgaacagctcactaagcatgaccccagtggacctcaatcacattaaacaaaataaatccttagcaaacagattcatcttcctgactttttctttcttcagtgtaccatcttctttgagtcacaaaggctcaaaatagcaaagtggtttttcacaccaaagcctgtgaaaacttcctttgtcgtatctcaagcactcatctcaaaacccttttatttctattcacccacttccagttcccagtgaagataccaaatagataaattctcccaacagaccacttgtcccatcccactccattgttgtaaagtcagcactgaatctctagaacattctgcagtttctcaaagtaaaggctgtaggctactgcagcaaaattaccctcatatttgttatgattcactggccaaatctatactcaactgaaagctcccactcaatcaaaagctctggcaataagatccagcatttcataaactctgtatttgattcttatgtatacagaaacttgtcaactattgcctaaaaaatgaagtaaacaggccaggtgtagtggctcacaccagtaatcttagccctttggaaggctgaggtaggaggattccttgaggcaaggagttcaagaccaacctgggcaacatagggatatcccatctctacaaaagaaataagtaaataagccaggggcagtggcacatgcctgtagtcctagctactcaggaggataagacaggaagactgcttgaccccagggggttgaggccatgattatgccactgcacttcagtctgggtgacagagtgagaccctgtctcaaagaaaaaaacaaaaaaacaacaaaaaaaacgccacacaaccaccaagaataatagccaacatattaagtgcttaatgtgggccaggtactgttctaaaaactttaatggatgaactcttaatcttgtaacagccctatgaggtaggtagtgttactatcactacctgacacatgaggaacaaggcaaagacaggttaagtaacctatatttaagtgctatattatagaagatgggagataaggtatactaattggaaaggaagaaatgagactttcttcacaaatcatatgaccatttatgtcgattatagaataagctgcgctattatagaaggtggcagagataagatccaagctcaaatagtctgcatcgagtttatattcttaagcactagacagactgcttcagtccaacattcaaggggtctgaatctcaaaacctaacctttccagaattaactcctactactataaccatgattaataaaaatgttccttcggccaggcacggtggcatgtacctgtaatcccagctgcatgggaggctgaggtgggaggattgcttgaacctgggaggcagaggctgcagtgagccaagatcgtgccactgcattccagcctgggcaacaggccgagactccatctcaaataaataaattctgcttttttgttgctggtatatagaaagcaattgacatttgtatattaatcttgtatactgcaattttgctataattgcttattagttccagaagtttcttgtcgattcttttcggttttctacataaatggtcatatgatttgtgaagaaagtctaatttcttcctttccaattagtatactttcccctgccccttttcctatctcactacattagctaggacttctagtacaatgctgtaagagcagaatgttgttaaggaagttctcttctattcctagtttaccaagtctttatcatgamtaggtgttgaattttgtcaagtgccctttctttattgatatgatcctgagaattttctttagcctgttgacgggatgaattatattaattaaattttgaatgctgaaccagccttgcacacccaggataaatcccatttggtcatggtgtatagttgtttctacacactgttggaatccatttgctagtattttgttaaaattttttacgcctattatatgaaattttttggtgtgtagttttcttttcttgcaatgtctttgtctggttttggtattaggatggtggcctcacagaatgaattaaaatggattctctctgcttctatcttctagaaaagactgtagagaaaattggtataatttcttctttaatgtacagaattcacttatgaaccagtctgggcctggtgctttccgttttggaaagttattagttactgattcaaccgctttaatatatatgtaaggcctacttagtttgtgtattttttcttgtgtgaattttggcaggttgtatctttcaagaaattggttcatttcatctaggacatgaagttgtttatagtatttctttattacccttttaatgttcaaaatatttgtagtgatagcctctttttcaattcttttttttttttttttttttttttaagagacagagtctcactttgttgccaaggctggactgcaatggtatgatgacagctcactgcagcctccatttcccaggctcaagtgatcctcctgagtaactgtgatgtggtggcaccaggctattttttgtagaaatggggtgttactgtgttgcccagtctggattcaaacaatcctcctgcttctgcctcccatattgctgggattacagggtgagccaccacacctggccctctcttttgtttctgatgttagtaacgtgtgtcttctctctctttttttggaggcttattgattttattgatgttttcaaagaaccagcttttgagatcattgattttctgtgatttcctgtttcctatttcattaatatatacactaattcttaaatttctttacttctgcttactttgaatttgatttgcttgtctttttcttcttttctaaggtagaagcttagattactgattttagatctttcttcttctgtaacctctgcattcaatgctttaaatttccttctaaacactgttttcgttgcatcccacaaattctgataggctgtgtttttgttttcattgtttaaaatattttaaaatctctcttggtatttcttctttgacccatgtgtttataataatgttgtcaaatctccaagtattttgagattttcagctatctttctgttactaatttctagtttaactccattgtggtcgcacagcatttttaaaattagttaaggtgtgttttatgatccagaatgcagtttaccttggtgaatgtttcatgtgagcttaagaagaatgtgctttgtggtggtggtgtataatgtagtaaacggatttcaattatattcaactgactgatgattctgttgaggtcaactatgtcctcactaattttctgcctgctggatcactttctgatagagggggtcctgaagtctctaactatttaatagccaaatcatctatttctctttatagttctgtaagtttttgtcctacatattttgatatgctgttgttatgcacatacacrttaaggattgctacgtcttcttgaagtattgacccgtttaccattatgtaatgcccctcttcatctctgacaactttccttgctgtgaagtcttctatttgtgaaattaatataggtactcccactttctttggattagtgttagcatagtatatctttccccagtaacttatctttactctacatgtgttttaatatttaaagtaggattcttatagacaacataaagttgagtcttgcttctcatccatgctgacaatctcttgacatttaatttgtatatttaggccactgctattcaaactgatcattcaaatatagtttaattattatctattgatttgttacaattttctatttgttgcccttgttctttgttcctattttttactttcactccttttctgccttttgtggttttgagcattttatataattccattttctctcttagattatcagttatacttttttttaggttggagagcagtggcatcatcttgcctcactgcaacctatgcctcccaggtgcaaatcaccttcctgcctctgcctcccaaatagctggaactacaggcacatacaatgacacctggctaatttttttttttttttttttttggtagagatggggtttcaacatgttgcccaggctggtcttgaacccctgggctcaagcaatctgcccatgtcagcctccccaaagtgctggaattacaggcatgagccaccctgcctggccatacttctttaactttttgaaaaatgattctcctagggtttgcaaaatacctttaaaactaatcgaagcctactttcaaataaatatatttcaaatatataccagttcacaggtaacacaagtacttaataacaaaataatactaattcttccatctcatccctggtaccattgttgttatttctttctacttttagataagtatatatatatgtgtgtgtgtatacgcacacaatatattgttgctattattttgtacagattgatctgtccattaaaaataggaaaaataaaaaatttaaaattttacctgtacttatcccttctgtgatgttcttccttttttaatggagatcccagtttttgacctatgtcattttccttctctctgaagaacttcttttaacatttattgcaaagcagatctgctggcaacaaattctctcaatttttgtttagctagaaagtcttacctcttcttcacttttgaagaataactttgcagggtatggaatttttggctggaagtttttttctctcaacactaattatttcacttcactctcttattgtgtgcatggtttctgaggaaatgttggatataattctctaagtcaggtctccctgcacaccccatcaggcttcattccagatttttaatcactgattttctgtaatttgaatatgatatgactatgtgtagcttttttttttttttttgcatttatcctaatgctttctgagcttcctgaatctgtggtttagtgtgggacattaatttgcaggaaaatttctgytgttcctgcttcaaatatttaatctgttcctttccttttttacttcgtttggtattctyatcatgcatatratacacctattgttgttccacagttcttggatattctgttcagtttatttcagtcttttttccctttacttttctatcttggaagtttctactgacatatactcaaggttttagattctttcctcagctgtgtcaagtctaccaatgaactcatttaaaacattcttcatttttatttcactgtttttcacctttggcatttctttttgattctttcttagaattccacctctctgcttacattgcccatctgctcttccatggcatctactttatccctagagcccttagtattttaatgatagttgttttaaattcctgatatgataatttcaagagccctgccatatctgaatctggttctgttgcttgttctgtctcttcgaagtgtattatttgccttctagtacacttgtaatttttttcttgagagctggacatggtgaattgggtaaaaggaactgcagaaaatagggctaagaaagtgggggtaagaaagcgggggagggtagagcattctatagtcctatgattaggtctcatgactcgtcacccctaaagtttttcactctcaagcttgtatatcctgagccccagcaatttatcaattgcagttcaggttttcctactgtgatgctgattcctgcagaggcttctgctcctgttctctgtatttgcctgtctcttcaatctgggggtggtgggagtggtttaccctgtaaccttgcttctataacagatctaagaagaactgttaatttttcagtttgttcagctttttaacctgtttattttttgacgtaatgacttctaagctccttacatgctagtctggaaactagaagtctaattttttaaattaacaaatttcagagacagatgggattttaaagaaaatttagttgagcttccccctttaaaagacaagagagcaggaagagaagaaagttaaatgatttgtccaactatctaggatctatttaatgtcatcagaactgggttagaccccagcaattcctaccctacttcttatctgcaactaaaaagtagctgttttaatggcattatagttatgctaaaagaaattagtccttatggacttactcaaggatacatactgaaatatttataaggaaaggattgacacttggaatttgctttaaaatctgaggcaagatatgtttggtgggggtatagttaaaacacgattccctgtgcattgataaatgtgatttaaagtctttattatactaattttctactttgtatataatttaagttttccaaactcaaatgtttaaaacatggtaaagtagaaaaggatgaaacaattgcttattttgactctaattatccataaatgttaccaccagatataaccaatttaagataaaaccaatttaaaaattatttggcttagtacctctgccaaatcactgaagtaaaataaacgctaccagttataaaaaatcaaactactttatttatataaaattcagctatcatacttctttaaatgtttctattattttaacatctcatagctatcagagtaccttagctccagctgaaatcaaactgacatcattttatgtatttaactacaaacctcttacacaatacattagctcaatttgctttttcattcttaaatgaaacmttatgcctggagcagaggacctttcattagtgctacaatttgtacaagattctaaaaatatgttcattaatccaagcagaattaaattttctacattttatccttagcaagccaaagaaaaagccatcaaattcagtatcacttaaagcaaatacagaaaaaaaaaaaaacaaaggtgtttaagtcagttaatatgtgctctcctcccagaaaggctacctgctcccctacaagagtagataccccagctagctgcttctttagttactgatcatagacaaatgaattcatttaggaaatcatctgtaccttaacatggtaactgcaagtctctgctgtattttcattaatattatactgcagattatgtagcttttcttttatttcttagatttatctggttcaacatagaaaaaaaagttccttaaacatttatatcttattcaattgggtattttctgaagggtttgagagaataaataactgtggaatttagtaagattatcaaacattacttacctttccaaattagggaacaaaagcttgaagagaaaaccttaaaagtatccactcactctcagcactctcaaaattctcagtaatgtcctttcattactcaagaggtcaaccaccagactcagtaactaaactaggcaaaataagtctccctgaggatcatgaattgaaggagggtgtgaaggaggagaggcagagatacagttttcagtactccactgctaagggagggccctcattcttctgataggtagcaccaggtcacactactactgatcggagatttaggaagagatgtagggtttattatcatattctcattaaaaacattcatgagtatcataataaagactccatacattttgaaaaaatgtaattgcttatattccagtataggtatttttaagcacctagtacctattacaatcactgatctagaaataaatacaygcactggacatgcaagcattatatagattatggcattagtgtgttataaagtaattaaagcagttataagtaaaattagaccaagagttcttatcaaggatggcaatatattaactctcatcctgataagaaataaacaattgttaaccattaaaacaagggttatgagagaaacagacatacttctatattaactcttgacaaaaagttatgtatactgagtaaagaaaaatgaaatagcagagatctatttcttatctttagtatcaagataaataataaagtgtaagataatcccactcaaggacttttgaaaaatatatctttacttcacttcactttgctaatgtattagatctccaagacagctgcaaagttagaactcgaacacaactagctttagttaaagcactagctatcaaaccgttttatgcgcagttgggagaataaaacaattatagcttcagagactctaaaagctttaatttcaagttttgtgactgcttaacatgcaaaggacattttaatcaagaactgcaaaccaatgaacctaacatgcaaaggacatcttaaacaagaactgtaaaccaatgaaccttcattatgtaagcagacacacrgaaaaaccaagcctttaagaaactgactttacatactgactttcctagtatgggaaggtgataactcagctgtgaacatgaaggtgaagatatggagaagagctgaacagggatctagatcttggtgattcaagaatttcaagataaaaaggaacttgaaatgtcatcttacctagacccttccctagacacttttgacaactcatcatccactattagcttgaacaccactttccaggaacagaagaatttccaagcaaacatcctattctatttctagtctgctctaattgttaagtgtttccttgagtgaaaatctgcctgtctctgttctgccttctggaaatagaacaagtcaaatctgtcttccacctgataacccacaagtatttaaagcagctctctggtttcttcaaagcctttttctttgttccaacatagggctgaggactcagaagacagcatcacccaggtcacaaactgacagaaaagataatctattcttcagatatgcttgtttayctgctcagtttaaaaattttcataaagaaacatggaatcttggtttctcttgaaaaatagtagtcctggcracactggactggtgacagtaagctgcagctgggaagcagcagagtagattcttccttcagatggggcattctgctccagttgaccactttctctaccattcaagtgtygtctctcaggaagaacttaacctgcccatgttatctaaaatagccaacttacctcctactctctatccccgtatttattattaatgctcctktaaagtacctaagaaaattgtttctcttaaaagattctctcttaacctacttctttggtgtagtctgttcaataytaagtaccaacttctacttctatttggaatataaatatttataattaaaaaaattattaattacttcattcaatacaacaaaacagctcattagaggatattttggcagccccattaatgttgtgactcactgaccaactaatttcctggttgctggccaacactggtaaacaaatctgctaccattataccacatttccctcattcaataactgtgctattatttgggaaagctaaacatggtgttttgcataaccatcacccgaatagtgaagactgtacccattagataatttcttatctctcacctccctcgcacctgagtctctaatgactcttattccatgccctctggccatgtgtacatattatttagctcccacttagaattgagaacatgtggtgtttgactttctgtttctgttatttcacttaagacaatggcctccaggccaggtatggtggctcacgtctgtaatcccagcactttgagaggccgaggtgggcgggtcatgaggtcaggagttcgagaccagcctggccaacatggtgaaaccccatctctactaaaaatacaaaaaattagctaggagtggtggcaggtgcctgtaatctcagctactcgggaggctgggacaggagaattgtttgcaccctggaggcagaggttgcagtgagctgagatccagttctatccatgttgctgcaacagasatgatttcattcttttttatggctgaatagtattccatgttacatacatacaccacattttctttatccaatcatccattgatggaaacctaggttaattccatatttttgtgactgtgaatagtgctgcaagaataagacttgcctcctaagccagttgtgctagactgtaacagayaccagccatcacctaattatgtagagtttaatgcctactgcaaagatgcactaaaatatttgttaaattcaattacagattctcagatgatatatttagctgaccttcaagctgaaagagaaactccctgcacaacaatccttacaagatgcctaagcactactagtgcacacagtagaaagtagatcatgtcccttccaaagagttctacctttcagaaacattctccctattattaagtcaaatcttccctcctataactttcgtttttatgatttgagagtaaaaggaataaagatattgtctcttctacatgattcacattaccttattttacatgtctgaaaacagttcttcatatctttactctgttcttaacccataggcaatatctagttaggggttttgtgggcctaaatacagtaacagaaagatatacatgtaaagatcagtcctttcctggagagaagtgaactattaggtaaaggcttcctgaaagaggcaggacttaaaagaaaccttaaacaatatattgcaaaaaaaacatatcatgattcaactcttagtaaatattcttgcctctttacaagtggttctggtgtaggtgaagaatactgtaaagaaatcaaagccttgtcttagaagttacaactatgaacagcatttgtccttacagtacagatacaagaaacagtcactgacattatctagcattgttaattagaagtacttaattcctgccttattctctattgcttccaactgctttaagcttcatttctaacacctatatttaaaaagcctgaataatatgtcattcaaactatgaaactgcccattaaaattatttttctaaatcacaggatcataaaaattgagcaataaagggaacttcttttagactttctgatccagttccctcattttattaaagaagatattcaatcattatttatagagttccttctgggcaatctgatccatatataccctcattaagcatttactgggctcttacaatatgcaatgcactgtgtcagatgctatgatggctacaagtatgaatagacatagatactgccgtcaaagagcttacatttagcagataactgaaacaataataattcaggttagaaaactgtaggttttatagtagatgagggctacttgttcaaatttttcatgatagactctctctcttaggcatctgtatccattcaaacgcctaaatatatattgtgtttattcttgtatgtacatgcctagtcttagcagcccaccagtagtaggcattttgtcccacacccaacagtagtaactgctggttttgaaatttaattgaagggagaggcagaagacccttggacttctgcagacctgagcaagagagaggaaagggagagcttccccattctatgtggtatcatgcaatttatgtcaactaaccaggttcctcaagagaagcaaatgtcattgaaaccaaagactcattcattcatttaacaaaaatttattcagtgcctaatatctgtcagaaggtatacgagacacaaaggccataattttgagggaaaggagtatgtccctgctctcagggagctcacaatctagtttggcttttttcaaaactatgcacggcaggcaagtggaaataatctctgcaagaacactgcataacaaaagcacagattctcaagcaacatccacaacttattaaaagcttcccaggtaattctggtgggtcacttctctgtgttatttgaagtcctttgtggcttccaggctaggcactgttgtgttgtatcttagggagatctggtaaagaaagtgtactacatgttgacaactcatcactgtataggtagaacaataccaaagagtacacattgagggtgtgggggtggtaactgcttcccatattagaaccatcagcatagccagagacagcaaagcttagggggttattacaagttaattagaaaactaatgtttgtgggctagatatggtggctcacacctgtaatctcagcattttgggatgtcaaggcaggataactgcttgaggccaggaggaagcttaagaccagcctggacaacacagcaaaacctcacatctacaaaataaaamataaaaataaaaaaattagctagatgtggtagtacacacctatagtcttagctactcaggaagctgaagcaggaggttcccttgggcccaggagattgaggctgcagggagtcatgatcatgccacagcagtcaagcctggccaacagagcaagaccctgactcaaaaaaaaaaaaaaagtaacatttgtgaaagaaaaatcagaaagactggaacaggtgggaagtcatttaatctaacatccttactgccaagggtattttaaccatatttaagtatcacttgcaaagtaacagcataacttaaataccactaaatctgatgctcagagtcattactgctgtaatcatcacatcacatcttctttcttcactgttgttctgaagagtcacagygtctaaatattatcatgacagatctatcataacagtgatttttaacatctccagaaaatagtctattattgatggaatgcccagcttaagatgtacttttcaacaaacaaaacatctctggttactatcttggctgacaactctatacaagaataatgtaaccggaggtgaggagttcgagaacagcctggccaacatggtaaaaccccgtcttyactaaaaatacaaaaattagagcctggcttgaagatggccraatagaacagctctggggtgcaggtcccagcaagatcaacacggaaggtgggtgatttctgcatttccaactaaggtaccctactcatcttactgggactggttacacagcggatccagcccatggagggtggggcattgcgttacccaggaagcacatggagtccaggaactcgctcccctagccaaggtaagccgtgaggaactgtgccatgaggaacggtgcactctggccctgatactacgcttttcccacggtctctgcaacctgcagaccaggagattccctcgggtgcctacgccaccagggccgtgggtttcaagtacaaaactggacggccatttgtgcagacaccaagctagctgcaggattttttttcataccccagtggtgcctgcaacgccagcaagacagaaccgttcactcccctggaaaaggggctgaagcaagggagccaagtggtttagctcagcggatcccacccccacggagcccagcaagctaagatccactggcttgaaattctcactgccagcacagcagtctgaagtcgacctgggatgctggaccttgggcasgggagggacacccgccattattgaggctttagtaggtggtttttcccctcacagtgtaaacaaaatcgmcagaagttcaaactgggtagggcccaccacagcttgcaaagcgccgctgtagccacactgtctctcaagattcctcctttctggggcagggcatctctgaaagaaaggcagcagccctagtcaggggtttatagataaaacccccatctccctgggacagagcactaggaggaaggggaggctgtgggtgcagcttcagcagacttaaatgttcctgcctgccggctctgcagagagcagtggatctcccagcacagccctcgagctctgctaagggacagaccgcctcctcaagtgggtccctgacccaacccccatgcctcctgactgggagacacctcctagcagtggttgacagacacctcatacagaagagctctggctggcatctggcaggtgcccctctgggatgaagcttccagaggaaggaacaggcagcaatctttgctgttctgcagcctccgctgatgatacccaggcaaacagggtctggagtggacctccagcaaactccagcagacctgcagcagaggggcctgttagaaggaaaatgaacaaacagaaaggaatagcatcaacatcaacgaaaaggacgtccacacagaaaccccatctgaaggtcaccaacatcaaagaacaaaggtaggtaaatccacgaagatgaggaaaaaccagcacaaaaaggctgagaattccaaaaaccagaaagcctcttctcctctaaaagatcacaactcctcgccagcaagggaacaaaactggacggagaatgagttagatgaactgacagaagtaggcttcagaaggtgggtaaaacaaattcctccgagctaaaggagcatgttctaacccaatgcaaggaagctaagaaccttgaaaaaaggttagaggaattgctaactagaataaccagtttagagaagaacataaatgacctgatggagctgaaaaacacagcacaagaacttcgtggagcatacacaagtatcaatagccgaattgatcaagcagaagaaaagatatcagagactgctgatcaactcaatgaaataaagcgtgaagacaagattagagaaaaaagaataaaaaggaaggaacaaagcctccaagaaatatgggactatgtgaaaagaccaaaccaacgtttggttggtgtacctgaaagtgacggggagaatggaaccaagttggaaaacactgcaggatattatccaggagaacttccccaaactagcaagacaggccaacattcaaattcaagaaatacagagaacaccacaaagatactcctcaagaagagcaaccccaagatacataatcgtcagattcaccaaggttgaaatgaagaaaaaaatgttaagggcagccagagagaaacgtcaggttacccacaaagggaagcccatcagactaacagcagatctcttggcagaaaccctacaagccagaggagcgtgagcgccagtatccaacattcttaaaaaaaggaattttcaacccagaatttcacatccagccaaactaacattcataagcaaaggagaaataaaatcctttacagacaagcaaatgctgagagattttgtcaccaccaggattatgaatcattctactataagacacatgcacacgtatgtttactgcagcactgttcacaatagcaaagacttggaactaacccaaatgccaatcaatgttagactggataaagaaaatgtggcacatatacaccatggaatactatgcagccataaaaaaggatgagttcacgtcctttgtagggacatggatgaagccggaaaccatcaktctcatcaaagtaacatggggacagaaaaccaaacaccacatgttgtcactcataagtgggagttgaacaatgagaacacatggacacagggaggggaacatcacacactggggcctctcgggggctgggaggctaggggagggatagcattaggagaaatacctaatgtagatgatgggttgatgggtgcagcaaaccaccatggcacgtgtacacctatgtaacaaacctgcacgttctgcacatgtatccyggaacttaaagtataataataataaaaaagaagaatataatttcagaaatatggaaaagggttttatttactgatatgacctacaaaaagtcagcaaattccaaaccattataatcctagaattggctaaatttttagatgtacatcacctgtaatctactttaaaaactaactgctgatttcaarcatttttctccacgacccacagtaagaaatgcattttacagcactacacaatgatgtgtacatgtataacaggaaggaaaggttcaaaaaacaatttwttacatgtaatgtactccagcctcattccatacccttcccatcctatactatggtagcaaaggatgttggtctcgctaatttgattttacaasccactgatggatcagagttgcaatttgaagaaaaatactgatacagacataggatgtatctctgtgtgcaaggtatcactggaaggacctagttaggatttatcactccaggaatggctagttagtatgtgaaggactttaatcaggatttttaactccagaggaatccagtgtttttacctgcatctaatatctttacctgcattaccaaggaaaagttcatctatacgcataaaaaaagttagaaataaattttatcagtggaagtaaaggacattcaaaatgtgtgacacccagaaatatcttacaagttccccaaccttgtatggaaggagaactatctagcaagtccagtagcttcacacctcttgagttgcacacaaaatcatgaaagtcttcatgtcttgttctcacaccaaacactctaactccatttcggctgctacaccttagactgggtactttataaacaacagaaatttatttttcacagttctgaaggttaggtagtccaagatcaagacatgagcagattctgtatgtggtgaggcctgttcctcacagatggcaccttacgtgttctcatatggtggaagagacaaacaagcttcctcagcctcttttataagggcactaatcccacttatcacagctccactttcatgacctaatcactttgtaaaggcctcacctcttaatattattgcgctggggatgagatttcaacrtaagaattttgaggagacacatatcatagcatcctcctccaaattagcagaagatcctgatgactgatcacactagaaagttacctgatcctaccaytgsaatgtgatatagtttgaatctgtgtccccacccaaatctcatgttcaactgtaatccccattgttggaggtggggcctggtaggyggtgactcgattgtggaggtggatccttcatgaacggtttaccaccatccctgtttctgaaagctcaaatgagggaagggaagcaattcttatttatttaccacttacagtataccaagcactatgtcaggacctttaacaagtgtgcaccagctcacatagacagatgaagatattttcactcactggaaacagagtaaggtagattgaatgtctccagccagtggggtctctcttgacaactggaaaaaatggaccaatatggttctctgtaaggttaattacaggatttataaaaccaagtctcagatttaaaaggttcttttatactgtaacaatgtcattaacatggaatttctcatgctgaattgttgtacattgggataatctaccrtttgggtcctgtttattccctttcaagacacagataaatgggatgaggcagatgtattaagagttcctaaggaagggatgcagtgagttataaaggattttattctccaaacatacaaaagaaggaacaaatgtaaaaaccaagatatacagatatatagtaataacgataaatatatgcattcatactgatctcttgaatgcttagttgctagttacgtagtggaatgattcctcatttgttcaactcatcaggtatgcactggatgcctgacatgtaccaggtgcagtgctggtagcctgggagcatccctgaccttatagagcttaccgtgtattagggcctagagaacaaaatacaggcaattactctctagtggatgacgttaggaaagaggaagcataagggtctgtgggaacacagagaaggtaagggaaatttacttcaagaaagtgatgtctaagctaaaacctaaagaatgagcttgccaaggggaagagtggggccaaggagtggttccaggcagagagaggagaatcttttacaccaaaagtgaagaaaaaacattagaagctgaaggaaataaagtacagactggctggggcactgcagggaaaggcagggacaaggccaaaagattaaggctgagctgatcttaatgatgatggttgtaacttgaaatttaatactttcaatctctcccctgaagacttataaagtatcatttgggaaaaaaaggtcaaagtatattagctctactgctgcagaaaacaaatgtggtatgtatttcayattagtgacttcaaaagggaaattttacctagtgttaaccatacgatgtgctaaagtttaaattaacttttttttctcagattttttttttaattttattattaytatactttaagttttagggtacatgtgcacaatgtgcaggcttgttacatatgtatacatgtgccatgttggtgtgctgcacccattaactcctcatttagcattaggtatatctcctaatgctattcctcccccmtccccccaccccaaaactgtccccggagtgtgatgttccccttcctgtgtctttcaataagcatcttggttccccatctatgacacaatacttctttaggttgtcagttttttcttgaaatttgccttaaattgggtaagggccaacaattataaaaaggaatgataatgctttagctgcatcrgattcaccaggaaggcttgttaaacacaaggttctggctccccactcaaagttgttaattctgtaaatgtggggtgaggcctgaggatttacattcctaacaagttcccaggcaatggtgatgctggggtccttaaaccataccttgaraaccactgcactaaagtatgttgtcagtgtacttgaataaargcatgaggaaagaagagttgtttctgaactcttaactaaggtaataataatcaggtgtccaaatttaatttaagtcctgtktctgagttgaactgcattttccaaacatcttgaagaactggcattccaacctgtttgaatttactgttctactaaccagtaggaattctactagcagcctacctctaacttcacaaagagtggctcaatagttttagctcttcaaaaatgcttagcaggaaacatcaactgcaaagagcgctgcacctttgaaagtgctctgaaaccaatttagtcttgctgctgtcactactacgaaayttaactttacctttccaaaatgatctagtatacaaacaaggtccttcataaggcaaaataatttttaacaaggacaactatcttttctttaaaaacacaaatacgttttaagacagtgaaaatgaaaattacaaataattacaatgcatttcatcgactatggtctacatttacatacattaattattacatcctatttaaatatgggattataactggtaactaattctgcaccatcttggggggagctttctacttttccttgtactcagttggctagatatggggtccayactgtcatctaagtgttgcttgcacaagaatcttaattatcagagcagctaattttatgaccagtcagtatgcaattaactctacttctctctacacttayatacattgtagacaagcaactgtgatttcrtttgtactgcaattagaactattaattttaataactcatggttaataaatatgtgtcaaagatcttcataaactgaccaaatcatcacacataataattataacaatagctaacaatcactgaacccttagaaggtagtatgtactacactaagtacttaattttcacagactctcaatctcaacgttctagttgaaggaaatgagccaatgagaatttaggtagcttgcctaagatgatattgctatccagtagacaactagggcatttttatcatgcttttgacatacaattatagacgaagaaattattggagtattttaaagttgtaatattgagaaatttaaaatgtttaatttagcacatataaatttgacctcaacccccaaaacctcctcgctcctctcaggaggtcctcaataacccaagatagacaggtgaggtctcgaattatcctgagatctctaagagaaagaagaggagtggagtttcattttacttgtcatcaggcaagaggcaaaggaccatcagagtaaaggagaaggcttgcttttctccccaaagtctagaagcctgaaacaaagaccagcagatgtggaggcatcatctagagcacaggtctctagacccctacagggtccaatcttcccaaccgcaagtgactcccaatcatcagccaaactgcttctgactttgctgaccctgacttttatcaacagttcaggagcagagagggctcaacccacagcctcaactgaggcggaagagcrtgctgcctgaatcctgcttttccttaggcctggaacagacattgtcttgccctttcctaatgtttttgttctgtgatgtgaaatatttgcacctgatcttccagagcacattatagtattctgcagttatcattctctttttttaatttgttcaatgaactttaaaaaatttacaaactataccctagtttgaggagggagaggaggggatgagaaaaaaagggaaaaagtaaggagaaagtctgtcgcttctttaagtgtttttcaagcgttttgcttctttttctgtcatcttctcccatgcccatttgctatcaaaacaccttacagacacttctgctgttatattacatcagacagaattgcttgttaacttgtctgcaccctgcattcagttataaatgtcttgagagtaggggacatttgatgttttctgcttttaccttatttacatatatctccactttgtacactggacaggattcatactacttctacatacacttgtttttccatcttttaagggcagataatacatattctaatttcrcagggttatttcgggaataaaattagtagaaaagatgaaggtactacatacacactttataataacattattcaaccctaatcctcataataaactgcaaggcttattagaacattcataaaaacatgcctcgttactttatatgtatgctaaatagggtttacagctaagttctctctcactctatctttactctcaacacatgagagtatgtgctctaaggcttgaaatctatctcaagtatgcgagcaatgaaaaatttaaaagaggaaaatcaagaaaagatagcctaaaggttaaaactgttgtttaaatgctgcagaggaagagaaactaagcaaataaaatattctacacaaagtggaatcatccctcacttaacaagagttcccattatattttcagataattgacagacacttttaaattctgtgattaacaggttaatagtattataccaaaaccataactccaaatctacactgaaaacttatcctcctgcttacccatgaccatggcctctatactgggttgaactgtgtccctcaaaaagatatgttcaagtcttaacccccagaactcacaaatgtgatcttatttgaaaacaggtaattaaggtataattaagatgaggtcacagtaaatcacagtgggctctacatccagtaactggtgactgtataagagaaaagatgacagtatttggaatcagagacacacagcacagggaaaaaggctgtgtgatgacagagacagagattggagtaacaccaatacaagctaaaaaactctaaggacttctagcagccaccagaagacaggaagaggcaagaaaggatttttccacagagctttctgagggacccattgatggccctgttgataccttgatttcagacttctagcctctggaactgcaagagaataaatttcttttgttttaagccacctattttgtgtaatttgttacagcaggcctgggaaattaatacagattcttaaggaagaacacacatcagtaatagtacaaagaatgcaaaatacagaagtaattacaacatccattttctcagttgccttttataattacaggggaaatatatggggtatacatttcactggaaggagaaaccacacattgtcttctcctactcagtaagagcatgataatcaggcagtagtcatgaggttacatctagaagtttctacccaaagggttcctatgttctttgtacatcatattaatacttgattattttgtgtgtacctgaaaatacgctgactttggtttggcattacatcacagccatggaacgttttctttctgtgacccaaatacctgttttctaagagctaactgtgtaacactctgctttttctgctttagtgatgttgtgttgaatttttaaaaactgatcttttcacagttgtctatctacattcatcccaaggcacatggcagaaaggaatggcaacacaatccacattctattattcctgagaaagtaaagccaatggtcaggaatgtagcccaacaatgccatcagaatcatcctctttaattatgaagtatgatgagaaccacccttgtcatggtgtaataatcattaataatctgctttggatactgtgggtactcatatttaataacatcccacagaagtaggaattaagcattattcaaatacaagggctcttctttgagtcacataaaactcaaaggctaatacaaccctgtgcatttgctcatgtttgatactaaatcaaggtaaggcaaaagaacaaaaactgacaaatgataaaccaatactccaagtaacaagtatactcccaaaagaaacaaaaattaaactacagtactggaaaaactctgctagttttttgtgaatcgtgacacttatggatagcctatgagggccagctcagagctgctccagggagcagcagcttttaccatcttcactagtctaatttccaactctggtgttaaattgccaaaagttcacttcaaattcaggtcctatatatcttagcaagaagatttatgacctccaggagccagtcatcagagtcatatactttaacagatgtaaagctttaacctagggttggcacacttaccagctttaagctaattcctcattctctactgagaaaaactgctgcaggaccaaagttgcagsatgtattttaatttaaaggtttagatgcccagtgtgatccagatttaaagattttctagataaattatatcaaattttaaacaaataaattatcaaacccaagtcaatactaaaatgaatgtcctttggaaacatttcattagcacaaaaaaaaggagaaaagtcttatttctttacagacactgtaagagactaacaactttatcttgaggccataaatatacctaactctaaataagtgaacttattcttttctaaaaaacctgtgtaaagcatgtatttaatatctaaatggctttggcttactaaatacagaattagacacagcttacttttcttctacaaaaacactatcatgatgtgctagtgtattttttaataaattcttcattaaaagttttatttacttcagtgacattgtattttttaataaaagcccatctcccccgcccccaccagaagcacaattacacataaaggtaagtayctgtatttcatttcagaaggttccaatacccactaatttctataaacttcaaattaagaattactgaaacaggactattacagaatcagaaatctttgggaaacagaattttttatatttcctatattattggtaactatttcccagaagggtaagcagaggcagaggtaacagacctcaaagttttaggttttatttgagatgtacagaggtttaggagtaaaacggcataaagcctgggattttctctgaaatactacacacacacacacacacacacacacacacacacacacacacatgcacgcaygcacacacaaacacacacacatgcactcctcccaaaacaaacatacaaaccataaaaagtagagggaggggcgcagaggagataaaggatgtagcaaatgttgacggtagtgaaagaagagggatgagtacgggagcaggggatcaattctttacatttgtgtatgtttgaacattttcagaattaaaagtttaaaatatttcagaaaaaaccctccaattaatcaagatgtcaagatgtcaatatatcatttacatttgtggacactgggatcttagctaaggtcacagaaccagaactaagcagctgtgtagcagctagactagggctgtttataccaggttgtmtcagatgtcatctgaatctttttattctttccagaaaaaaaatggggaaaaaaatgtgtaaagcttgatgctcacctgcacagtggtcaagaccttttttttttccaggccattctgaaagtcagggttctcaagagaaaaagggagactataccttcttgatgacatctttggagaatatcttcaacatgtgaagctgaagaaaaatttgtctccaaaatacttggggaactggggaagggaataatccaatgaattaaaagtatcaccaaatatgattgctttacaatttggaatgggctttcctgtggacccttccacaccccagcccctgccctcctcatgggggacactgacttcataaagaagctgtgccaagagagctaagtgaattaagttgaatactctgtggcacagtttagcaagcaattcatcaatagggaggtatcaagtgttgctggctgaattttaaagcactttctccaacacggctggatatgcatgcctctgggcatacagattttctttatgttggcaggagaattgtttcctcattccatcttccttacagtcaattgtcatggtcacagaacacaaggttaagagggataacctcaaagataatcttttagaaaacccattttaactattagtttcaatcttctctttaaccaaaatctttccacctaggaacccataaatcactacatttacttatttaagttttactatgtcttatttctctctacagtttcaagcggatacataacaacaatattaaaaactactacttactaactagatgagttctttaaatctgttttctcatttttcccaataacctcattagggtaggtattagtcttgcgattttacagactggcaaatggaggtttggtcaaagagttaaacatatcagttcgaggtcatacaagtagtatgtgaaagccagattctgaacctaggctgtcctgacctgccctttccagtatgctgcattatttgtggaaataaaaaagaaagagaaaaagagaatcagaaaaggaaggcagcaagagaaagaaacaggaagggaactgggagatccattaacaaatctttacaaactggagagccttggaaakattgtctaacactgtcttttactttataattctgcsttccaggcagtcaatgtaaaactacaagtacttttaagtaacccagttttatactcaggctattgttttaatttttcatttactttttaacaaacacatattcttcacaactgagaagatcttcatggagaaaaatgtcattagaaaaggctgagattttaacttggccctagttatgggaaactcaatggaaaagtcaattcttcttagtgaccaattcatggcatcagagatagcactgcatggaatttctatcaytttgatccagacttgcactggagataaaagggtatctccaaaaggagaattatgcaaatttgggaatgccttaaaataaatcattattaatattaacctttattatccataaataaaggttaaaactaaacaaaatgttaaagagtgtggtaaatgaacttgccatctcactagaactgcttctcttcctcctgtgcttcagatttcagtggatggccccattatcttcaatcacccagtcaaaagcctggacacctctatactcctcccctcacttttcacctgactttgagtgactttttagaattcttgaggaaaatccctaataaaattytatggggaaaaattacctgaaaaaagtcatagctctgcataaccatctgccagtactcatactccctactaaccaaaaataatagacagtgtgccatggttgagaaagtacttctgtgtgtcagaagagctggcttttcaggctctgccactaacaagctctgggacttcaagactaaatgaaagcattaggcactgtgttagttgttttacataacctcatttcattcttacaatcagtgaggcaggtgtatcactggcattttttaaaaaatgatacaaaggctcagaggcataaatgctttgaccaagtgtaaaaagctaagagacatatttggaattcaaacctacaatggtctaccacattatactgtttcgcatgacttcccatgtgtaaaaatcttaaaatgaaagcaaacccaaaaatattgtacagcaaactgttgctgtatttttcaaaaattcactgattacagcagcagcaactgtcaattaaattccagctttgttccacacatttcagtatcagaaaaacaccttcgcatctgagtcaaagtatataagccaaatttcagaatgctaacgaagtggctgaactgaacagagtagtgggaaatagaatgtgttaactacttgtatctcagatttccctgtattcaatatacttgtaactgcataatataatttgacagtgcagaaaagtgatggaaatttctaggcaaattctctctgcctgttgccataggagtattaagtacagacagacatacattggcaaatatttaaacgctacagttagcgattattttaaatatgaagcataaaaatcatgctttttaaaattgcaaaaaatgctgatgaacaaaaagctatgcaaaaagaaggtactttgtgttgctataaacaaactcataaaacagaatttttaaaaaggaaatcagtacacagtcttaacctgttacttatacaattccaaatgctacattcctaatagtcagccaagtgatatattcatcaaataacaacaaaaatgaactcagagctctcaatttctactaatgtagggtcaactgggttatctgagaaagaatgataagagtttatgggctatgagtaacaagtytaaggtgactaatatctgttacagaaacactccattgacttggacatttatttttgatgaatgaatgtcatgttaaacagctaagcatggaggcagagagggagcaacagttaaaaatactagcatcaaatcttattgcagtcatataaaaagccaatgttcaataaataccaatatagctatttattatatgatattccaacaagcagaatctcattgcaactgagttgataaatacatttattactatgaatgtgtacatatgtgtgtgtgtgtgagtgtgtaatccaaaacccttctcttagaaagcaatgtcaaataagagtcaagaaaatggggtcaacaagttctgtttcaggaatacagtcttttgtactttgcatacagttcctgctcatggctgcagagaaaatgagayggcaatggggagaagacaggaagaagaaggcaaaatgagaaacaataatgacagatgctgcaatggtccaccttttcgttactgacatggttaattcttcatcttggattgaagtagaaagtactttttgtttgtcctctatgtttttaaaattactactatcctacaatggcttttttttttttttttttggagacggaatctcactttgtcgcccakgcaatctcggctcactgcaacctccacctcccgggttcaagcaattctcaarcctcagcctcctgagtagctggaactacaggcgtgcaccaccacatccagctaatttttgcatttttgaaaatagagaccgggtttcaccatgttgaccaggctggtcttgaactcctgaccttgggtgatccactcgccttggcctccctaagtgctgggattacaggcatgagccactgtgcccagcccctacaatgacatttaatgcatataatcactcaggatttaaaacactgatgacagagttctgttatgtggctgcagcattattccatgaaaagccaagtatgtatattcagaaccaacaaagaactttccaatagagtgttgtatcgtttgacgtaggcaatttacaaacagctaaacacaacacaaggtttgattttaaaaataaggtagtgactattaatggagaagtgaaactgaaaatgttgggaagatgtgaaattttcatgtttttgacagtcactgcagtgtccataaaattctgcccacaggggtggtgtttgaatgcttagatcaagtattgcaaagtactagtggtaactgtgcaaaaataattatatttgttcaagaagtcaaataatttcaatttcacwagtcttttttatcttttgttaatttgattctgaatgtatacaaaccatttacatagcaagatccaatatattctaggcagatcagcctgtccctcagtttctaaaagcagcactcaatctgcccctgaggctgccatgtactcccctcctcaagcagcctttggcccataaagcttaaggtatgtcaaaggatgtcaagggtggttgagctgtggttaaactctggttgggactcaaccacatctctggtttgatgcccaaacaggcatcagatcaaagccatagacttttcctaagtattcaagtgagtgtcacaaactaagggtcttgagctagatcagatggcaacattctgaaaagttactgaaataaaaatgagactttgtactactgctatatattcctatttaaaacatataactagagtatttattgtattgtaaccctgatgacatcacaaccatatacctagagacaaatgtcagatgaagttattttttctaaatacctaataaaaggtgatcatatgttatttgcaaataatttccaaaccaaagatggttgaaaatcttcaggacatgtgggctagcaactaaatatcagctgaattaaagttcttaaaacaatttctaaactttaatcaacyctgacactcatctagtactagtttttgggaaatgtccactagtttttaatggaactaaaaactttgaaaccattctggccaaaatggttttttagtaaattgttgatatacttcctccggcaaacttatctcctgaagtactagtgactatcaygtaagatcacttgataataacttgtcctggtgtgacattacgtggaagttgtttcataatgttctagtcttgttctaagtttatattcttttcaaacaaagatagtgtaattaacttatcaactaagggatttagagagacaaatgggagaaataaaaccaaatataagattggggtcgggcrcggtggctcacgcctgtaatcccagcactttgggaggctgaggcaggtggatcacctgtcaggagttctakaccagcctggccaacatggtgaaacctcatttctactaaaaatacacaaattagccgggcgtggtagtgcacgcctgtaatcccagctattcgggaggctgagacaggagaattgcttgaacccaggaggtagaggttgcagagagctgagatgccccactgcactccagcctgggtgacacagcgagactccatctcacaaaaaaaaaaaaaaaaaaaaaaaaagtagccaggcatggtggtgcatgcctgtagtcccaagctactcgggaggctgagataggagaactgcttgaacccaggaggcagaggttgcagtgagccaaaatagggccactggactacagcctaggcgacagagcaagactccacctaaaaatatatatttatacatatgtatatataatgaagttctctggctatgtcccaggaccaatataattgaagaagatattaattaagggaagaatgggacaggaggagaaagttagaacgatatagcttctttacagcatagtaagttgggagcacaggttttgaaggccatcagacaagagcgcaaataaaatcccacgtttttaccttttcacatacaaggtgatcttgagcaaacggattctgagttttggttttctcacctgaatcgtgggggtgacaacactaacctaagcaaatgtgagaattaaagattgtaaggtaatgtgcttatagtatttggcataaagtgagtcaataaccagtagctgctacattattcttgttttcttttcatccataattcttagcctccaaagtgttttgtattctaactcctgctcatttctctagacttaccttttcaccatactctactagcktcttgatctttctcctgttacctggtgggcaaagtgggttcctgccttctgcactagctggttccttagcctagaatgttcttcccagagacagtaacatgatgattccttctaagacactcaagcccatagcttaaatataaccatctgagaaaggccttccctagtcaaccattctaaaggaacataccagtcattctttagcagaattccattttaattatctacagagcacatcttcacatctgattattttcttatttatttgtttgattacagcctgtctcttcaaactcaaacataaactcattgaaaactaacttgttcacagctgtatccctagtacccagaatagccttaagtacccaataaatactggtagaagaaggaaagaaggagggaaggaaggagaaaggaggagaggatgaaaaaagggagggaaggaagtctggcctattaaaaagtgaatttgaagctttaaaggctactgtaatttgatagggaatgtggctttctatttaagtggataataaatgaattcctgtacttaattatagtactgaaaggcctgagatgtgtgtgtgtgtgtgtgtgtgtgtgtgtgtgtgtttcatttattctcctctctgtccacctgtagatcttaggatgaactttgagaagtaactgctgaccatatgctcctattcacagaatgcacaaactcatccactactatttttcctcatcaatacattaaatgggcagagctgggcacagtggcatgcacctgtagtcccagctactcaggaggctgaggcaagaggatcacttgagcccaggagttcaagagcagcctgaccaacatagaaagaccccaactcaaaacagaaaataaaataaaaggctagcttcattcctttttatccgttttccgttatgacagaatgtggttaattagacaaagaaattggtaagaattckagyctgtaggaatgtttatgttttctataacaggaacatgattttccaagcttggtattttgacaatcctttttattttgtaagctataagctaagaatccctgtgaaactacattaatggagtttcataagactttatcygcagcaattttttttagacttgtatatgacggtaatatttctttcagcattttatcagtggagtagtaatagttcacatagagatagtttgcttttttcatgctctaaagtattgtaatgttcaagagaagggagcagttaaaagtggcctcctgcgtagtagtaaggagcacaattctcaactcaaatgccaaataaagatgcaatcccttcagcaaaagtgaggaagagtctgacatcaactgttttcttcttccatttccacactagcaatatattaatgtgaataaaaatgtttcatgatgcaaatgataaacagtacattataatgtaargtattgttgagcaggaaaagaaaactgagttgtccatacgattttgtaaatatttaaattggttacatgctaaatgtttaaatttcattttatagtagtccttcycttatccacaatttccctttctgaggttttagttgcctgaggtcaactgtagcccaaaaatattaaatgaaaaattccagaaataaacagttcatatactaatttagtgcaaaagtaattgtgatttttgtcattaaaatggcaaaaccacaattacttttgtaccaacctaactgcacaccattttgagtagcatgatgaaacctcctaccaccctactccagcccatacaggacgtaaatcatccccttgcccagtgcatctacrttgtgtacactatctgccctttagtcacttaggcagccatctcagttaccagatctcagttatcaggatatctcagtgttgtgttcaagtaactcttattttatttaataatagccccaaagtgcaaatgatgctggcaatttaaatatgccaaagagaaggcataaactgctttctttaagtgaaaagatraacgttcttaacttgaacaggaaaggaaaaatcctacgctgaggttactatggtaagaaaygatgttctatctatgaaattataaagaaggaaaaagaaacgtgataaatgcctattagttaagatggaaaaggcattaaatacatgagtggaagacatgagaaatgtgtttcaaccgacagcaatgaagtttggtactatctgaggtttcaggcatccactggggtcttggaacatatccccacgtataaagggcgactaatttcaaattcaacacacacagtttttatttttatctaagaaaaagttcttattctaccagttttctgacaattacattaatatttataataagtatttgattcataaagtttgtgtttctgggacttgatttcaaggtttaaacccagatcattataaagaaataagatgcatcccccatgtgaaggcactgctataaaaccctgtcttccgaatttcttgaaatttccaggcagagaaacaatttctaacagtttcagaatacttacactactggtaacaaagtaaaaactacctaagtaaagtatcattttgacatcaacatggagttaagatgaaatgttcacttaagacacacattcctttaatatacatacctataatgtatactcagttctccacaagtattcatggaaaacatctgtcttctaacttttcccaccacaagttatcactatgatatttcccttaaaatcagaattcttaggctcttcatgataagccagccattcccaaagctgggcagagcaaaaagaccaagatgatgagattagacattccaaaacatagtgattactttggaaaaatccaaaggtgttaaggaatcccactttccaagtttttttttkttttttttttttttgagatggagtcttgctctgctgtccagaatggagtgcagtggtgccatctcagctcactgaaacctctgcctcccaggttcaagtgattctcttgcctcaccctcctgagtagctgggatcgcaggcgcccaccaccaaacctggctaaattttgtatttttagtagagacagggtttcaccatgttggccaggctggtctcgaactcctgacctcaggtgatccaccagccttggcctcccaaagtgctgggattacaggtgtgagccaccgcrcctggccccaagtttctttygagttcaactgaacaatagaaatcaacattgtaagaagtggctatataacagaccgaggagaaaaatgatagtatttatcattctagaaagaattagggagaaattagttttcactctacacaagggaataggtatgtgtgacatctkcaactgaacgaaagtaacaatgtctgagaatgaaaaaagaaacaggcatctcctggagtctggagcttaaaaaaaccattatattaaaatgttcaccaacagtgaaatagataaatgtgctatagttataaatggaatactacttcaaagaaaatgaacaaattacagttccctacaacatggataaatcttaaaaacttaatgtccaacaaagaagccagacaccaaaatgtagayggtatatgatcccatgtattgagatggtaaaactataaagaaaatccaggaagtgattataacaaacagtggttacctatgggagaaaagaagtggttatgattgggaaagggaatgtgggagatttcttggaggggggaagctggcaatgtcctattttacaacctgggtggcagttaatggatgttcactttataataactcattatgcagtacatttattcatctccatttttctaagtgttattgttcacaattttcaaaattgttcaaaagtttaccagtaattacttattagtagttatctgtagtcactatcttgtcatacaatctgaattgacttttttatttagccatcccatatctgtaagcttcttgatgacaactaggtcttccaattcctctgtattctcccacaaaaagtgagaaaatgctttaaatgcttagtaagtgctcaaaaagctgtttattttacctggcattcattcactatagaactgtagcacgatcgatcatatatgacaagattaggggtctgaggactgatgtttcaattataaccctctctggatctgtaaatgggcataatcatacactggaaaagtgtcaggaagaggaaatgatgtaatgggagttagccacttctcacaagagccagcacattgcacaagtctctacttaaagcaggtatcacactctattgttcacctttctagctcccacttgtccacccacattggtttgtgaccacatcccccctgtcctgcataatgcttggctacagcagggatgaagtaataaaaatcatattttttttgttcttaagaagaataacaacatttattgagtgctcactatgagtcaaacgttgttgtattttatgttatttatccctgtattatgttatttactcctatgaagaagttactattattatctccattttataaagaaacagagagacagaaaggttaagtaacttgcctgaggccatacagattgaaagtggcagatttgggactctaactcaggtctactgatctactggattcctacgaccatgctctttctactaaatcatgattttctactgtgtcatgagacctcagggggtttagtaaagcctgtttggaaattatatatatatgtgtgtgtctgtatatgtatatgtatgtatgtgtatatacatgtatgtatacgacgtatacagtgtaygtacacgtatatatactatacacatatacatacatatataattttttattttatatagataaaataaaatgctatatatatatayacgtatatatatacatatatatatatataaaaaataaatgcttgaaactatgaggtcaagaactttgatcctggcccaaatcccaaattttaaatccattcttaagatattctatcttctggaaatgtttacaaattcataggcaaaattaagttctgccatatactagaagaaattattataattatagccattatactaatttgtgaaataactaaatatagaaaatgcattaaaaagtcttaaagagcacaacaatcaaaagaactattcttcaatacacagaagagatgattaatttgaagacgcatttgttgttaaagtaacaatgtaagaaaatatttcaaattaataaaattwggataattaatatggtggtaaagaagctaatttaattgagttgcatgaaattccatttcattatattcacttgtatatttagtgaagctataatcaaattgaatacatacatacaaattttactaagtctttccttttgctctgaaataatcatcacacacctgcttatgctacgaagcatgtgagctgacagaacagagagcacttatacccmgattctccttcctagttttgcagttcagaataaagtaaacagaaaacttaagactatgcccttgttagcattagaaattaaagaagattctggattcacccttaaaaactaacaataaaaaaagaggtatgacttccaaaatatgaattcgatagagaaccaggtgaggagtcaacaaaccagaaggatgaactcagctcaaaagtctactagagaagtcaattatattctaattcacccaaatacacagtgactactgttgaatgcttctcggataggttggataacttatagacagcttatattaatgttccataatctacttgcatgtttcaaacaaattaagtacatgtaactaccctggaacaaaaaggaaaaaacagaatgactccaattgcctgtttctctcatcttacccttcactgcaaagcaggggatttttaggtgctgaaactccacctcaaagcgacctagttggtatccggaaatgactttactagaatccagacctggatggattttctgttgtttggctgctttttaagaggaaagctgtgagggataaaggtagttctaaatacattttaagatggaagctgtgagggataaaggtggttctcaacacgttcatctatacaaagagccgctcctccttctgaccaagtctcaggcttcttatgggcttcccacctttaacctccatgacacaagaagtagaaaatgatctttctcttcctgttctgctatttcagaagaggagggcttttcctccccactggtttgattattattcctagggtccacacagaggacttaattattgggctcaatagctttgctgatttagaggctrgtgtaacaatagcaaaatcaaagcaatactctggcagatcaccttattccaatcaagaattgagtggactgaaagctggctattcaaaggtagaacaccttctgagtgctgttctaccttttggggatcgaaatgaaaacctggctgtttacctggaccactccttcttagcaatctctggattccaatttttaacctctggctccagaacagtaccagagttctgctcagattcttagctactgctgagaattagcgaatgactgaggattaacggtagggacagagttgagtctctccctctgtacttccttctctagaatcctgatacctcaagtcctcactgccatcaaacagattttgtcttcctcagtttttctagttgttcttggcaggaagcacggtctataacaagctcatccaccattaccaaaagcaagaatttccaaagttcacttttttcccatgataaggctgaacgttacccagcaaactgtaaagtcatactcatggtgaacatgcttgaggacctcagcagaccatttacacaatttcgtaaaaatatacaatatttttacacaacgtactttcaacactgttgataaaacatcactgtataaaataaatattgatccattttcataaaaactctctctccaaaacttgttacaaaaagaaccaggtaaattactatcttaggcaaaattgcgtgttctgggactgcaggcccacatacggcagaaaacaaggaccatgctgtttgcacgcatctttccaaaccaagcaagcttagacatctgtccattatgcacacagtccatcctctgcctacagaccagagtattaaactccccatgctgcttttttctgttttcatcagtcaacaaatacagtaatgctctaaggcaggtgttagcaatatttttctataaagggctagatagaattttcagccttgtgtactttttgtcagaactattcaactcttgcattgtagtacaaaagcagatgtaggcaatatgtaagtgagtaagtgcaaatgtgtcccgatacaactttatgaatattaaaatgtgaatttcatatcattttcatgtgtcatataatagtcatttgatttttttaaccattaaaaaaactgtaaaagccatttttagcttgtggactgtccaaaaacaggtagtcggccagatgtggcccactggctacagtttgctgacccctatgtgaaagcattattgtttcataaaattaagtccttggcttgactctaacattcatttgtccctcttcctcaacttttccaccgtgcctctaaaacagtggttctcaaactttactgtgcattcaaatcacatgcaaacttgttaaaacacagattagggagacatcacacccagggtttctgactctataaatccagggcaggacctgataatttacaagtctaacaagcacccaggtgatactgatgctgctggtccagcgaccacatcttgagaatcactgctctaaacttcttatcagcaaactctcatatatcctgagcatcttcttaggacattccctcactttcctgacttatctgtaatctatttgtcatctatctgatacttttgggagtcttcacagacagttcctctccctcatacttcttatccaataaatcattaagtcatgtctattttatcccctaaatataatttgatttatccacttctatctgtttcccaccttagtccaagctatcatcttttaccttcaacagccatctggttgtgctccccacatacattttgcagaacgcatgtagagggatctctgtaagatgagaatctgattgtgtcactttcttgcttttaygataatcttccttcacaggcttcccaaggctctgtaagatttggcctccatcgccacttctgccgcatcctcacttagcacttgtggcctatacttgtcctcagccactctgacttgccccttcctggccttcagacttgctgttctcagcctgggattttcttactctactcctctctcttctcaatctgtcaatattattcatctttcacttctcagacccatatcatatctcaaggaaagtcattcttgacccttctggactaagcccagaacctcttaacgtgcagtttttctaagcatctgtctccacattaaaataataaaaagagctaacattttactaggcaatattctgctctaaaacttcttcatatatttgtttatttaattaactaggtaatattctgctctaattagaccatgcaatattctgttctaaaactctccatacatttgtttattaacatcataaaactccataaggtagatgctcttaatatcatccccctccctcytcttcttcctgttttgtttttttttaaactataagaggaaactgagaaataaagaggttcaacagttcacccaaggctaagcagctagtaagtagaagagccagaatgcaaacccaagctacttgtttccagactacaaatactatctcttgaatagtagaaaactcaactggattttaatctccaggggccaggcaccaagcagatacagtttacacagtctcatgcatatcaggcactcaatttgttgagtgaatgagtaaacaaattggttgagtgtgctagcataatgttatatattattcgctaggccatactataaaagctgattttaaaagagggctttccattctgccatctgtctaagcataatgcataacagactccactttttcaagactatacactcttgttatgtagataatctttcaattcttctaatacccaatacttgggtattaaaacatgataaaccattttacttacatatatgtaagccagcacaaacagaacattaagatgtatacaaaattcagttattaaattactgtgacaattatttttggagaggaatagatattcctgaggaatatctttatattcaatgggtacataatagaacaatggtggaggggtaataacgtcttaaatcaccctttcgttctatttattattgatatactattttaagacatgatatacacatccctcacaatccaaactctccctaactgaactcacactacccaaactcaagaataaactctctgagatgaggctgttttctctggctcttcaagctttcactgctactggctcttcaaatttcagaagccaaaaatatgcggttaatgcagtatctctcagtatataagcttaggaaacaaaagaaaatcagatggcaagaaatacctgaatktaatttatttattaatttatttagtttattttaatgagtcaactaaaaatccaaatgcataatagtgcaaacacttcattaactgggttcataacaagattttaagcctcctgtgacagtggccatatttttaaatgtttgcatcatgcctgtatccagcatatagtagatgcccaacaaaaattttgatgacaagtgaatgtgctaatacacaggcatactgtggccacattcctgaactatggtttgcatatacattctaagtctattgcaaacctactattattacagaactgagatttaaaaatgtatagtttaagtagcagttaatataactggcaacttaggctgacttctaggaattacctaatcattaacttataatgtagataagaactccaactatgaagtgtgacaaaatgctactggctggctgtatgactttgggtaagtaaacaaccatcctgaaaccaaggattcagatttatcatctgcaaaatagtgataatatacctaaccacatagaattattttaaggattaaatgtttccaatgtatgtaaaacaaatagcatttcataaacaaacaataagcattgaagaagtattagttgttatataaccattattatatatacagatataaacttgtatatctacattattacttatttattcaaattgaatgattacaattgtggtctacatataggtaagcatgaacgccaaaagcaaagatataatgatgtttcttgtcatgttcatatacaacaagataacaagatgggagagttcccttgacccctttgtgggacttgcaacaggggtatggctcgcttacctggccaccactgagctcaaaccccttgygggagagggagcacacaggcaagcaggtgcagaagtgcttttgggctctggccccacagcactgtctaagggtatgttacaattaatgctcttttagcagctgccatctgcagacagctgttaaccagctcagtggagagtcaggaagacagccttttacactctgccctcttggtacctgggttcgtgttcagcatctaggaaggatcaggtcacatgaaggtctgaaaggtgatgaatgcagaggattttattaagcagtggaagtggctctcagcaaaaggggagctggaaaggggatggtgcaggaagaaggtgatccttccctgaagccatgttgtctcaacttaagccacatctatctgtagtctccgacaatcagtgctgcgactcctcttgatgttcagctgctttgcgtctctaccagctgaggtttggggttaatatgggtacaggataagtggggagggaggcagggcagaccaaaaatgtaacatttgggagggaaaacagggataactgttctcattcagggcctcggtttccaggcttaggggtggggcctttgctggggaactgcccacttctacccagtatttcccttcctcttatccacatcaatactagttcaggctcctggaagaaagatcaaccagcccagaatggtggctgagtggggaccacaactttgtttcctcaagcatctaggagccctcttgtcttgcctgagatgagatcaatgaggaactggggttgcctggtgcagcagttccaggttgcaatgaactgcctccatttgatttgcatctttttctccagctggaatcgaagaagcagctgttcaggcacctgcaggtgttgaactgggaactgcaactgaggcactgggtggtcaggactgtgacagaccaagggttgattttgccacatcacctcaagaagtgggtatccagtgcacctaccaacattactctatcggggaagaagcacagaaaacccctctagtggatctgacttgcccagaaagagaaggcagcgatggaagtgaaatccccctcaaagccagccacgactagtgaaccacagctcaaagggcaaaataagacaaaagccccccaggatgtagacatgaaggaacttgaagatgagagctaaagttcttacctcttccatcagaagattttcaaagactcagtggttgcttcggagaactttggagaaagcactgcacctttcactctctccagatttccttttccctaatgtcctccccggagagatgtcttgggagggaagacggtacagaaaaaagtttggaggggcctctctagcagtcaactccattcgtaataaagccctagagctctgactgagatgtgtgtgattaaatgtaggaatggggatgcaccatgaaaagagatccatgacaataaggaagcacaactcacagagcttgcttgagcaaatacaggaagccagcctctgccaggtggtgctccgcaggattgcttgaggctgtgatctcatctgctccctagtaagtgatactctttttatttatgacaaaaaaatatagattattgtagggatggcagaggaggtaagcgtcttcatatcagtcctgccactgcccctgtgggaccagggtaggcaagtcattgtttacctcttgtgtattgcttcttttgctgaattatgtttttttctttttctttttcttttttttttttttttggaaatggagtcttgctctgtcgcccaggctggagtgcagtggcacgatcttggctcactgcaacctccacctcccaggttcaagtgattctcctgcctcagtctcctgagtagctgggattacaggcatgtgccccacccagctaatttttgtatttttagtagagacggggtttcaccatgttggtcaggctggtcttgaactcctgacctcatgatccgcctgccttggcctcctaaagtactgggattacaggcgtgagccactgtgcctggcctgaattatgtttttaataaaacaaagaccaaatattttttttaaaaaatactatttaaataaatggaatggaagctgatgtcaaagaaattgttttctaatgcataaaataatctgaaatatttcattagcattagagtattaacatgtagctttgcaataaaatgaaaaaatgctacatatattttaaggtgctaataaaagctttaaaacctctcggacattctttaaaattatatttccacaaaaatgcacttgtaaatagatatcataaggttctcaagtgagataacttctctatgtctaacagagagctgtctcattatgaacagagatgtaagagaacaaacaatattaattagcagagagaatatccccaaatgccaatattttaaggcaaaccagcagtgagaattccacctgcaaaaggtgctacatatttcactgtctatgataaaatgtaattacaatataattatagaagcaggcaaatattgcttaagcagtccttatttactaatagtcttagaatatttactccctaatgtgattatgagccaatactgcaaagaacagtattgcagcacagaccttaatttctttgaaaaaggtttggtaatttttcttaggtagctgagaattatcaggtgttttggaaaaagcagcataaggcccaattccatttgcttgaaactaagtttcagtttttcaggaatttttttgtcctctttaatggctattcctctcagtcatttggttgttttcatccaaatgtctcttctgtaattttgcagtatgttatttttagatcacattgaaagacaattctagatgtgaccccactagcagcattagagaaaaagtctaattctgttaagcaatttgacaagccactttaaaggtctacaggaattcgccagagacaatgagggtatcatatcaagaataacaaggactgaaacctctgctacaactgtaatttatcttcgtttattttcaatggcctgtcaggcacttcatacctacacttcaacggttgagtgcttaaaacaatacctaacagcaaaaacacacacacaaataattaaagatggtaaagaaagagagaaacatgagccattgataacagggactaattttatacaaaattgccagactattttggggcctcatcatgatcttttctgatatgtcatttcacttaaaaaaggccatgacaagaaaagacaaacatgagaaaactgtgtcctatagataaaaaagggaatcacaatcatagcacttaagggacacaattcatgcaaggttggtttttacagacacaataaaagagtagcaaatttgcagaggttgaaagtaggggatttacctgagatagaagcaaaatctaatccaattcaccttttgaaaagaactaaagaataaatacaaagaaagaaatagtacttagtgctttatgtgaagaaaatctcatagcctctattacaacgtctgccctgtaaccacagaaatctataaccagtctatttaaaccatcaggaataggaatactacatttagtcttcccagaaacaagtactgctaatagcatctgcatatgtgcgtcttaaactttgcttcattttgaactctactcctaccctgaaatcagaaagtctttgtagatattagcctcaaatagagttctttttcataatcctttataggtacttttcaaatagcaggtactttaaaatgctttctaattcagcaacttgggtaaactgtaactgatcagaaggtcaggcagcagggaccactattaacaggaattgtattttctgatccaagtatgaagatatgggttctgacaacaggtcacaatgtatgaaaactgaatggccagcaaatctaaaatataagccatatgtattgacagaggaaaacagtcattctacttcaaattcaaaattctactccctactctgagtatataaaatacttgacaaaaatgaactgattagcttactttcaaaagcagtatctgtcaaacaataatgtgacgatggctcttaatatgtaaaaattcacttcaatatgcttgtctcatattaaaaactcattatacatttaaataaatccatgaaaataaatataatagctgaattgttctggtttggtaataccaattagacaaacagttttattattcatctacagaataaactcacgccttttaagaaccgaactacctgtaatcattcttattcctttacggatactttctgctatggtccgaatgttcgtgtccccgctaaattcatatgttgagatcttaacccccaacctgattgcattcggaggtggggcctttgggaggtaatgaggtcaggatcccttagaaaagaagcttgaggcagcttggttgccccttccaccctgtgaggagccacggagagggtgctgttctataaacaaggaaggggaccctcactagacaccaaatctgccagtgcctcaatcttggacttcccagcctccagaaaaatgagaaagaaatttctgttgtttataagccacccagtttatggtattttgttacggcattccaaacaggctaagacattctacaattattaaagacaactacttatatgaaatagtgttaaagagataaatagcctgagcattcagacatgatccacactaataaatgtttgtaattctattcgattttagaactagctttgcatcaaataagttgaaaaaatttagtttgttttactttccttcccaatttatccagttctcacaatcataataataaaaacaaaatgatgacaataatagcagctaccacttatgtatcaggctaagctgttacctatttttggaatgtcctcctttattgaaaaacttcctattcatccagcatacagatgtaatgtgctcaagtgcaacaatctgtgagaagccagtacaagaagctgatggtttttctaaattactacgacttttgtctctaccacacaatcttgcattccatgatgtaggactttgaggactctgccctcaagaagctgatcaaaacagaacttaaacccacatatggaaatgagatttggctctgctaaagatcatatctgatttctttaagcagtttcatcagcatcagctgtgagatacacctgacattaacagacaaggcaggattacagagcaagccctggagtctagccaatttaccatccttgaaaccatgcgggatgctatatgacactattgaaaataggtgacagaaggctatccaagcagctgtggcatggtgatctaaaatagaaagatcacaaaacaggcagatggaaatgttttaggagcacagtgaatcacagcatcaaatgataaaacacagttcaaggaagacaagaaacaatcatttttgtaaatgcaataatcagaaatgaagtgattcctttacagcaaaaccactgaaaagaacatgatcctaaaacaatcgcttgcaaacagggaaagaaggtgtaaataacagttgcaactcaaatcaaaggacaatgtaatacaaacatcataaaaagtattaaattatttctttaaagcagttaacaaccatcattagaagtatttttcattggccaggtgtggtagtgtgcgcccgtggtcccagctacttgggaggctgaggcaggagaatcacttgaacctgggggatggaggttgcagtgagctgagatcatgccaccgcaatcagactgggcaacaaagtgagactctatctcaaaaagaaaaaaaaagaagaaatatttttcattattgtcaagacacaaaaatctaaattacactaagacagaatttgaaatgagtctggttttaaaaattacatccaggggccaggtgtggtggctcacgcctgtaatcccagcacttttggacgccgaggtgggcggatcacgaggtcaggagttcaagaccagcctggccaatatggtgaaaccccgtctctaataaaaatacaaaaattagccaggcgtgctggcatgtgcctgtagtcccagctactcgggaggctgaagcaagagaattgcttgaaccccagaggtggaggttgcagtgagccaagatcgcaccactgcactccagcctgggtgacagagtgagagtccatctcaaaaataaataaataagaataaaaattacatcaaatgtccaaagagcaaattttccagggtagaaatgttgctcccttttttagtgtaagacttcaaggtcaggcgcagtggctcacacctgtaatcccagcacttttgaaggctggggtggcaagactgcttgagaccaggagttggagaccagcctgggaaacatggagaaaccccaactctacagaaaatacaaaaattagctgggtgtggcagaacatgccttgtagtcccagctactcgggaggctgaggcaggaggactggttgagcccaggaggtcgaggctgtagtgagccatgctcgtgacactatactccagtctgggtgacacagtgagaccctgtctccaaaaacaaacaaaaaacttagctgggtgtggtggtgcatgcctgtagttctaaccactttggtggctaaggtggaaggattgcttgagcccaggagtttaaggttacagtgagctatggttgcatcactgtaccccagcccaggacacagagcaatctccaaaaatacaaaacaaaacaaaacacaaaccatcactttgagcacgttaagggcttagataaattgtgaggttaatttattaatagttttatatggcatgaaactgaaatttttccttttttttttttaaagaaataatgcatttcattgatggatatactatttccctattcagcagcctaaaaaaaaatcatattggtacaataacaaagaataacttagtttaaaagttctacagcattaagtatatatcatcaagcttcagagaaagggaaaaactgagctaagcagggctctagaagaaaatatattttcagatattgccaggctccaaatttacaagcaagttacaccccaacacttgtaaaacaaaacaaaacaaaaaaaacctcagtatcttttccaaataaataaataataattaggtttacagag

SEQ ID NO: 96357 - DNA, 43862 bp, Homo sapiens
  misc_feature (1)...(43862): n = A,T,C or G
agatgtcaaagggctgggagactgggatggagaggaaaggagtgggacattcagtacctaggactagaatcagcagaaattgttcattcattgaggggtagggaggtgggtatgtttggtgtggcgctcaaattgccaaattgagatcttgggggattgtgtaagacacagtgaagattaaccagtgatacacactgaagaacaggcctgcaatgctgggccaaggcttgttcatctgcattctccttcgacttaagtgccgtgagcaatcccatgatacaatagaaatgtgatttggccatggcagcaccccatttaccatcacagacaattcagccaaaaaaattaacaaacaaataaatagtagctaacatttactgaccacttgcaacgtacaaacactgtgccaggcacttcgcatgcatctgtttaatcctcacaactgccctctgaggcatgatcgtcttcattttacaaaccttatgttgagccatgctatatcatgtgccattccctaaaaaatgctgtacactgtcaaacttcaatatccgtattcatttctgattcctaaggcaatagtgtccttctgtcattttactgtgtacattcaattctactcatcctccagggccccttccaatgtcatccatcctaccaagtgctccaagcccatctcacccagaacggtcatttcctcttcaggtctcacttagcatttagtctcttaagaagatgtcttcagagtaatgtctccctgatatatgtgggctccttgagaacagaagccagtttttcttagtctttgaatttctaactacaaagtgcctttcattcaaaatcactctcagaatgttgacttcctgtaaatggatgaattgagctttaaaaaggacaggaggctgaagagggaagatcgcttgagcccaggagttaaagactgtggcaagctgtgtgagctgtgaacacgccactgcagtctagcctgggcaacagagcaagaccctatctcttgaaaaaaaaaatgaggttatagggaacctcatttgtacctcctgagcagaacccagacctgcttagtctccatccagttctctttctgtgttaccctagtgtcttctgtctttccagctctgcaaataaatttgcattctaaaatcaactatagtccagaggttgggcagagtggctcacgcctataatcccagcactttgagaggccaaggcagcggatcatctgaggtcaggagttcaagaccagcctgcccaacatgatgaaaccgcatctctactaaaaatrcaaaattagctgggagtagtggtgcatgattgtaatcccagctatttgggaggctgaggcaggaagatcgcttgaacccaggaggtggagattgcagtgagccgagattgagccattgcactccagcctggggaacaagagtgaaactccatctaactaactaactaactaactaaataaataaataaaatcaactatagtccataaaagggagcatcttaatttttttgccacgttaaaaattcacagccagaaatattggaagtctcaagcctttcttccattcaggtcctctctgatgtcctcactagaccatcaggtgcacaaaggataggactggttcttttttaattttttgctgtatacctggtttccagcagagtgcctacgacatagcaggtacctagtaaatgttgaatgaggaatgaacccaccacttcttacttaaaagacctaaggctaccaggaggaattagcagaccatgctggctcatttgttaagctaaggctagtccctctctaacagccagttgaatcccctaccccacatctactaggctccttgacatttatgccacattccccttctcttgtacctctctgataaaaacctcctgtgttgggagctggggggccggtattaagctaagcctgacttcccttgcagacctaaagaactcctttactctctgccagaccttttcttgatccttgcccaaaaggagattatctcggtaattcctgtcacaaattatgattctccttttcctcatttttctccttcccacccattcctagccaagcactgcctcattttctaatcctgttaagtgtctctcaggattccgtgacacaattgcaatgctgtcaagccctgaaactgggcatcaaaggaataaggcctgaaaatgattgattctgccatagacatatttaatatcccgtgtcctaagtttgggcccatgtgtatgtgtgtgaactgcttcaccttcagccagaggtacagagcccatgttgaaaaaatatgaatcatcataagtgttcttgtctacatttaaaaaaaaatatattattagcgtgaataaacaagtattagaatcagttctattagaattgtatccacttgtttattttaatggagttgagtttgtgagcaaaatgagagaatctgaacatgtgctggagagaagcaggtggacaggtaagaagagaagcaagtgggaatggctggatactaatcttgaggaagagctggatattaatctcatatccagctgcctaccttatcctatagtgaactcacagcatttcctctctggcacaactttttgctggaatttacacagatgtagacaattatgcctttgaaacctgaaatttggcttccaaagcagtttatcccattgtctacacagatgccacttgagtgagaatttagaaaattcaagagtctagaaaatggtatcctccatccctgccagaggccttttgagctcataacatttaaaaacaaaacaaggcactccaataggctttggtgcatatccacaggcagatttggcagacttgtcactcagtgttcctggcttgggtatgtttttttctcccccacatcctccttttccaggagcagagctgctccacatgtgagttcaaatgccagccgacataggagagtaagcttctcccctgggacccactggccatgaacctgcaagcagctgctttttcttcccaaatgtgttcagagctcctggactcaagtagagagaaaaatagtgccttgaagttgtcttcagtataaactgatactggttctctaagaagagtgtgtctgtgagttaaatggcccaagaatgaaaagaaaggcctgctcagagttctgtcaggtagctttcaggttatagacagctttagaaaaccaacacgctgcactcagataaggagatcaaataggagatttacagagtgtgccaggctcaagacagcaatagcaaaatctacctttgaccttctgggtgtttctatttcactagagaaactccatcacacatcaggaaattgattttacaaaacgtgtattttaagcttggcttcacaaattctagagagaagttcctccctggtacttatttcaaggaaggtgtagtaaaggtaaaagaaatgagagcaaatcaggtgccttctgacaaccagccaagttcattccctgtctttctagatctcctacactgagagaaggaatgcaactagttcccaaggggtcagggcaggcattttccctaattcagggttcaaatctggagtcgatgggttccaggaaaaccaacttgaaagtgcttggacatatccacttatagttttgtttgtttgtttcaaaaatgtccaccactttccttggattctcagagaaatctgtaggcaaaaccaggttaagaactgttcccctgtactctgcattatttcacattaccttgtcatcagggacagagatcctgaaagcagagccccagcagtagcagatgaagccaacctgttgcctaagtccctattgaataaggagattagtacccaccacattgattccctcctgactggcatccccaacctctactcctagaataaatgaaatatgaactactctttccaccaccaccattctgtcccagcattatttattcctttcatgatactccgtatatttcataaaaacctcctctctgcctcattgcccaccccagcaggaacaggcccaggtgggtattcttctgttgcagagactcctttccttatctactcatccaggcaaaagaaccttggttaaatcatcagttgggcccatcctggttttgtttccattcttataaggacctgaaggtattatcataatccaggactatataagggcttaaaaaggattaagatcattgactttctgtaagcatacacacctaaatagcaaactatcaagaatatccatctctgctacaggctgtgcttctgacactatcaggaagattggcgaaaccttcaagcaggaagatatgatggaagggccaggcgtggtggctcacacctgtaatcccaacactttgggaggccgaggcaggtggatcaagtgaggtcgggagttcaagaccagcctggccaacatggtgaaaccccatctctataaaaataccaaaattagcttggcgtggtggcacacgcctgtaatcccagctattcaggaggctgaggtaggataattgcttgaacctgggaggtggaggttgcagtgagccgagattgcgccactgcactccagcctgggtgacagagtgaaacttggtctcaaaaaaaaaaacaagatatgacaaaaggacatgtctctgcccagactctacttctgttgctgtttcagcttttgacactttttatcaccactcttttcccacctctaagtattgagttccttatatcagtgctaacataattgtaaagaattatccttttttccactctgcaaattttcaaaggtcaggctttatgtagagaatctttatccattacagtatttcagcaataacactgtctttcctattttgctaatactctagagtgacatttaatttatcatccaaaagcaatgctaaactatgacaataggtgtagaccaagaccattgtagccaaactgaagccaaaggtcaccatgttccgcacagaaccatgcagggctaagtggttcactcgcctccatcacatcctataactgcaacatccgcctcatattggatctctctcccactagcatgatagtggtagaaggtgctttgaagcaggaagataataaattccaaattaagcactatctgaaaagaaaagtctcccattttactgaagtcataaactctaggctactgcctatgttgcattatcaacacattctttgccccaaccagctgcagtttggctgtttaaccatcccatgttctttagcatgtcgagtagaccatgttttaaccataataggcctgttgcctgatgtgtacagcaagtcaatacaccaagatatgaggttgcagcagagaaagagtttaattatagggccgctaaatgaggagacgggaggaaacctcaaatctgtctccccaaggagtttggggctaggatttttaagggttttggagtaggctgaagttaggaaatcattgattggtcacagagagcagcataaggtcatgggacagggagatgaagaaacaatattctcatgttgatccatttcctctgtgagggtctttaaactggctgcagtcagctgttccactggaattcaatatctgcttaagcaattcttaagcaaaaaccttatgattctaacatcagaaatcctatgtataggaacaatggagatgcaaatagtcagtgtctagtgctacagactttcagttacaaggaagtgggtcaaagtacagactgattaatattgaattataactatatttctttccagaattcttgttaagcctgtgaagatggcttcaatgttacatttaattccttgatttttctccataaattgcatacaaattcaaggtctcattcaatatgcatgtaaccaaaaagataatctatgtcttacttaatctacaccatggttgttaggagccaatgataaaatacgacatagccccacactcaaaattctttcttctttccacagatccgaaatgtggcagcaaatctctgtgtggacagcaagcatggagccaccggaacagagctgaggctggacatctgtgtcaaggatggttctgaaagaacatggtctcatgaacaggtgagtcacctcccagaagccagggcagtgggarccagtcgggggctgatgcagacacagagggatgcagctggaacaaatctccgaatggtgcagatggtacttgtgggacctggagtgaggccgctgtatcaccaaccagctctgcagttcagtgaatcacttaatgtctctgtttatgtttcttctcagagcagttgtgatgatcagttcagataatgtacacaattatcctctaaatatgagaaaggatgggagaaatgtggattgcgaccctagtcttacttcttttcccagaatggtagtttaacagaggaagcctgtagagtgctttggaacacttccaactaaatttcatggttttaatgactctgctgttctgtgtttgtgatgtcatcttaamcttgcttttcccctgaccatgaacagatcactttacatgggcctcctgttgttgtagtagtttttaatcttacatgtgaaggatgtaagcaacagcaccccaacatggacttcaggaaatactttaaggctatgtattgcttttattgatttttgttttgtttgcttttttctattttkgggggcacatagtaggtgtatatatggggtacatgaaatgttttgatacagkcatgcaatgcataacaatcacatcatgtaaaatggtgtccatccyctcaagcatttatcctttgtgttacaaacaatccaattatattattttacttattttgaaatgtacaattaacttattattgactatagtcaccgtgttgtgctatcaaatactaggtctttttcattctttctattttttgtacccatttagcatccccacctcccactccccacctcacaccctcccactacccttgccagcctctggtaaccatccttctactatcatctccatgggttcaattgttttgatttttagatcccacaaataagtgaaaatatgcaatgtttgtctttccatacctggcttatttcacttaacataatgacctccagttccatccatgttgttgcaaatgacaggatctcgttcttctttatggctgaatagtactccattatgcataggtaccacattttctttattcattcatctattgatggacacttaggttgcctccaaattttggccattgtgaacagtgctgcatcaaacatgggagtgcaggtgtctcctcgatatactgatttcctttcttttgggtatacacccagcagtggtattgctggatcacatgatagctcaatttttagtgtgttttttttgttgttttttttgttttgttttgttttgtttttaaacggagtctcgctctgtcaccaggctggagtgcagtggcgcaatctcggctcactacaacctccgactccctggttcaaacgattctccttcctcagcctcccgagaagctgggattacaggcacacaccaccatgcccagctaatttttgtatttttttttttttttttagtagagacaggggttcaccatgttggccagaatggtctcgatctcctgacctcatgatctgcccaccttggcctcccaaagtgctgggattacaggcataagccaccacgcccagccaatttttagttttttgaggaacctccaaactgttctccatagtacctgtactaagttacattcctgccaacaatgtaaaagttttcccatttctccgtatcctcaacagcatttgttattgcctatcttttggataaaagccatttcaactggggtgagatgataactcattgtagttttgatctgcatttctttgatgatcgataatcttgggcatcttttcatatgccagtttgccatttgtatgtcttcttttgagaaatatctattaaaatcttctgccaatttttaatcaaattattaggttttttacatagagttgtttgagctccttatctattacagttattaatcccttgtcagatgggtattttgcaaatattttctcccattctgtgggttgtctcttcactgtgttgattgtttcctttgccgtgcagaagctttttagtttgatgtgatccaatttgtctatttttgctttggctgcctgtgcttggggggtattactcaagacattttgcccagaccaatgtcctggagagtttcctcaatgttttcttgtagtagttgtatagtttgaggtcttagatttaagtctttaatccattttaatttgatttttgtacatgacaagagatggggtcaatctactctccagagtagctgggattacaggcttctgcatgtggatatccagttttcccagcaccatttattaaagagactgtcttttccccagtgtacgttcttggtacctttgtcaaaaatgagttgactgtaggtgtgtggatttgtttttgggttctctattctgttctgtgtaagacttaattgcttttaattgaaaaacatttcattgcaactcagtttaagtgagatgtgatttctaaccctcttagaaatttgaaagtccttgcaagcagcttccctgatactgtgtcacctgtgaaagggaaaagatagtgggcaaaattgcctttgctctcttttagcgttttcgtttcttgtattttagagatggggtcttgctctgtcacccaggctggagtgcagtgatgtgatcaaagctcactgcagcctcaaactcctgggctcaagcgatcctcttgcctcagcagcctgagtagctcagaccacaggtgcataccaccaagctcacctaacccttttcactgttttaattttaaattaagaaatatttcaatagaaagctatagaaaatatcatagcagatatttatgtactcatcacactcatctcttatgaaaagcaaaaaagcaagcaagcagttcccagtaaggcgttactgcctcctatagccagattcctctggtgcccatcttgtacattaaactagaaaaggtccaccatgcccagcgcaggatgttaaagagttgtccagatgtgttgagattcacctccctcgccccacctcactgcccctccctgccctctaccacgcattacaatgcagagcatcatgatgcgaggaaaacagccacagaacaagtccacaatacaatccagagatgttcagtccatcaacagtgcctctcccctaaccactgatccaatctttgaaccctctccccacagcctcatggtattctaggaggactgtgggccttgtagccaggccaacctggattttagtttaaaccatgtggccttgtgaagttgtgaaatctttctaggccatagttcttccatcttggacagggtggttaggagaataaatcttggggcagcatcttgcacatgcagcaggtgcagagtaatatcctctccctcctgccttccttctctcaaacactcacaaatccctttatgctaataccaaattagaaacctctctcaggtccaaggcagctgggactttggcttcatttatctgttcccagcatagtcagcaaatactagttattattcactcaaatgcgccctgcatggctgggcacggtgactcgcgcctataatcccagcactttgggaggctgaggcgggtggctcacttgaggtcaggagttcgagaccagcctggctaacattttgaaaccccgtctctactaaaaatacaaaaatcagccaggcgtggtggctgattatatacatatatccagaggggtttatagaaggctctgtgactcccagatttattgataggaatcaaatatcagtgaaaagttatttgcctcctccttcctctgtctgtttctataagctccatggggatgttactggggacctgaggaatggtgttggactgttaactccaacaagcaattctgacttcagcctgggagcaagagagaaggctttagaagctatcggtaaggctggcatctagagtggaaaagaacttttttaaaaagaaaaaggaggaaaccataaggaaaagcttcatttcttgggctaaattcctctctaccatctctattcaacccaactaagaaacacacatggccagctggtgaatataaagcaggccttaatgtctgaactgggcttagtatttctatccagtaatgctctagaatgaaatcttctctggcctgcagattttatttgacagcggaacatggatataaacaaaggcaacgatattgcatacactttaaaaattgctggttcactccccgcaccccccacgtcccccaactccccacctcccacccccaggctaaaatgcaaaaatctatggcccgtaattcaagaaatggtcaccagagggcagcactagacaagcagaaaactacataggcagaacagaaagaccagttaatacagctctttaaaaagatttcctgtctctagagatcctaaaaatgaagctacagtaggattaaataaggttgataagtggtggaaaatgcatcatgtttgaaatattgccatatattgacttggaggttaaaacattacaagctgtttcattcaccagtaattaactgtaagctttattcaatatatcactcagtgacttacaagaattaggaagcactcttctacatttagattaaaattcctgcatgaggaaggcatatcggaacatgacaattatggattttctttttaattcaaaaacattcaaaaaacacaaaaggagacttattagagttgaaataatccgtttttttccaaaaaaaaaagtggcaaaaattaaaaaaaggaaaaaacaaaattgttacatgggaaataaaaaagagtccattgaaggacctgtataagaaaatgccttctgctgcagaacactggtggtgactaacgtggtttctgtgaaggaagcaaatgtatgattcattttgccagggcaatctgcatagctgtttgatatcatggtagcattatgcttcctttagggatcaagaaagaaaaacaaaaatagatcctaataagactataaggtctggaaagaacattccccagctcccattgagtccaagggagaggagtggcggggaggaacccccttggtctagtttggctgttcccactctgcaggcccagcagcaggctctgatgtcatgctggggagcaagtgttgcagcccagctttcgtcctcccgaggaagcaaacactggctccctctccagggcctaggggaaggttcacaaagacagaagcaagcaaatgtgtgcatccaggggacagatttttttcctttcttttttctctctttgggaaaaaagagtctcattatcaagacagagcgaactgatgggtgcaaactgcaaggagaaacatgctgtatctcaggtttctgcaaacctcataacaatgaaataaaacatcacaatccagacagagaaaaatattttctgctgtctcaagtcaggtagcaagagcaagagataagtgtattggcagtaccaaatccagtgaccttattcatataatacaaacggacycaggcaacatgacacatatcacattaatattaaagcaaagaaataagagttaacattgtgatatggtttggctgtgtccccaaatctcatcttgaattgtagttcgcataatccccatgtgtcatgggagggacccagtgggaggtaatttaatcatgagggcagttaccttcatgctgttttcctgatagtgactgagttctcataagatctgatggttctataaggcgcttttcccccttttgtttggcactgctccttgctgccgccatgtgacgatggatgtgtttgcttcctcttctgccatgattgtaagtttcctgaggccttcccagccatgctgaaatgtgaatgaattaaacatctctcatttataatttactcagtctcaggtatgtctttattagcagcatgagaacagactaatacagtaaattgatactggtagggtagggtgctgctataaggatacctgaaaatgtggcagcaactgtggaactgggtaacagacagaggttggaacagtttggagggctcagaagaagaaaggaaaatgtgagaaagtttggaacttgctagagatttggagggctcagaagacaggaaaatgcaggaaagtttggaacttcctagagacttgttaaattactttgaccaaaatgctgataatgataaggacaatgaagtccaggctgaggtggtctcagatggagatgaagaacttgttgggaactggagtaaaagtcactcttgttatgcaaagagactggtggcattttgcccctgccctagagatctgtggaactttgaacttgagagtgatgatttagggtatgtggcagaagaaatctctaagtagcaaagcattcaggaggaagcagagcacaaaatttggaaaatttgcagcctaacgatgagatagaaaaaaaaatttctggagataaattccagcctgctacagaaatttgcataattaatgagcagccaaatgttaatcaccaagacaatagggaatatgtctccagagcaaatcacagaccttcacagcagcccctcccatcacagacccagaggtctaggagtcaaaaatggtttcttgggccaggcccagggccccctgctctgtgtggcctcaggacacggtgccgtgtcccagctgcttcagctccagcatggctaaaaggtgccaaggtacagctcaggccattgattcagagggtgcaagccccaagccttagcaccttccatgtagtgttgggcctgcaggtgcacagaagtcaataattaagcttggggaacctccacctagatttcagaggatgtatggaaatgcctggctgtccgggcagaggtgtgctatagtggtgggatcctcttggagaacctctgctagggtagtgcagaagggaaatgtggggttggagcccctacacagagtccccactggggcactacctagtggatctgggagaagagggccaccatcctccagaccccagtatggtagacccactgacagcttgcaccatgcacctgaaaaagccacaggcactcaatgccagcctgcgaaagcagctgggagggggctgwaacctgtaaagccacaggggcagagctgtccaaggccatggaagcccacttcttgcatcagcataacctggatgtgagacatggagtcaaaggagatcattttggaactttaaggtttaatgactgccccactggattttggacttgcatggggcctttagtccctatgttttggccaatttctcccatatggaatggctgtgtttacccaatgcctgtacccacattgtatctaggaataaccaacttgcatttgattttacaggctcataggcggagggtacttgccttgtctcagatgagactttggacttagacttttgagttaatgttggaatgagttaagactttgggggactattggaagggcatgattgtgttttgaaatgtgaggacatgagatttggaaggggccaggggcagaatgatatggtttggctgtgtctccacccaaatctcatcttgaattgtagttcccataatccccacatgttgtgggagggacccagtgggaggtaatttgatcatgggggtggttaccctcatgttgttctcatgacagtgagtgagttctcatgagatctgatggctttataaggggcttttcccccttttgcttggcactgctccttgctgtcaccatgtgaaggaggatgtgtttgctttatcttctaccatgattgtaagtttcctgaggcctccccagccatgctgagctgtgagtcaattaaacctctttcttttataaattacccagtcttgggtatgtctttattagcagcatgagaatggactaatatacattgtaaatctatgttttaaaggatcattcaaaagaagaaagcagagaaattaacatcaacttactttaacactgaggaatttaaggttgaaaagaaatcaagggttattgtacaggaaacctgaagaaaatctacattcttctgtcaataagagcaggccaagggtgaagacaaactataaatgtcacaatgacattacccaaagcaaacaatgaatataattcaatgaatataatttcataatgtctgtttctgctttgacaagcttgcagacaggaaaatgtgccaatgaaaagactcaatgcctgattggtttgacatggccactgagataagataaatggcaataagaagtatttcaaagacctaagagagaaaaaaatgagctaatcgtaggtgtagaagaataaagtaattgatayaatctgaagatgtatcaccttggatgcaggaaagtaatcaacaggtaataataataatacataaaacactgtgaaaatgacaagctaaccatcaggctacaaatgtaagcatgatcatggcactacaatacgcagaaacaagaaacagaggtcacctaaggatgccctcagatataattgtgacaataggtgaataaagttgcccaacagacagatttgccagtgtttgctgtaacacaggtattcttttggacttaactgatgcatttagtaaaatgtatgaaaaggccatctaccaaagaagggaggacttttgaggtgtgacagaagcaagacactcattttctgcaggcctgattttccctaactgactcatgagggactgtactaggtagtgattacattccctttaagctctggccttctgagtgtataaaaaccaaagacagagagatggagacagagagggaaataaatcaatcaagaccacttgttcctgcattggttggactgcctatagtacaagggaaatgtgctatttaaataaaataaagatttaatcaaagccaatggcaggtttattcgccaggaaatttctattaatttctattccaatgataggtaactgaatccagagtcatcaaagttgaaaattcaaaatataagcattatcatttgctattgttgtaattaaacagcacaaactcatttgagagactaaaaagagattcattaattttgatagttaacatataataacagataattgtgggttttatttattcaatagaaatttaattgaggatctattgtgtgtcataaattgttctgggtgctggaaacacaaaggtaaaaatgctccaagccctgcaactaaggatctcactgtctagggagggatagagaaacataagtggacaatcatgatgaaataggtaagggatggaaaggagtaagcagttcaaagaggatggcttcctggatgagtggacacttgaactgaatcttacatgacagatgagcattacctaggttggctagtgaatgtctgttttccaaccagagggatttacgtgaacacggcacagaaggaaatacacagcctggtttgtgtgagaactacagaggttttagcattgctggaacataaacttgaaggaaaggaatgtaggtggaaagaacagcaaaggccagattgtggagmgttcctaagaggtcaaagagtttgaactttattctctaggggttatgtgaaaaggttgtgagattttagattgagagggaacaaggccacacaggcctttccaacagacttccttggaggctgaggaaggcagatgtgtggtaaccaaaaaagccagtttggagatcattgcaagagctattgagagcaatggttgtgggcatagaagggaatgaacaaattccagaaatgtttataaaacaaaaatggtaagacttggtcattgattagatgaggatggtaagggagacaaaggagttaaagactccaaggttgataaagtgcatgacatgaccaccaattaaaccaaaataraggggcaggaacaaggcagaagagaagaaaatcaattgcatttagaayatgctggatctgagatgtccatgggacatgcagctgggaaattctgcaaggaactggacataagatggatgatgagtgaccggcatactggtgagagttgaaatgagagtgtaaaagaccaaccaggggaggtgcaaggacagggtccaagagagaaccctgagcaacacctgcagtggagagatgcatgaaagagagggtggtgagacagttataggacaacagaggtgcacagtgcttcaaaatccaagagagcagtgagttctgaatagaagagagtgatcaaaatctgaatagacatttccttgagaagccattcttctctgcaggatttaaatgaatctaaaaatgtctcagtccacaattatactttaaaaactctaggaaaaaagactacacaattcatcttcatgaatttatttcaaatgtctattctaaaaaccccttgttcttctatatgaaatcttctcttttatcctgtcttccagggtaacagagtacgcagtggccatgattgagaaggtcgctgttcacatgctcgtttaggtcatttcttgagaccacttaacccagttctttgtatttgtcttcagattcctcaccacttaactatctttgttagccatccctggaattttgccaggttctctacatttcctttcctaggtggaacctaacagctgaaatatactgagggcctggtcagtgcatagtgtattatctgcatacagctcagcattgtgctttcttttatatccacagggtttccctgacagctcttttttattttgcaattcacagtttggcttcacacagccagcctgccgtaagtcctattgtaagaattacataaccttcctgggattttagaattgggagcaatcacagggctcatctagtccattttcacacttaaggatttctcctactgtacctttcaaatacccttatttgttgtacagttcaaataactcaagcaaatgctcttcccctacaggtgtgtggcttgtttgcttgttaatacattgtaaagccaacttagtgcataagtcacatttttaatataatagaatgggatggatataatagaatggtataatatgatagaatgggataatataatagaatgggatacataatagaattggagaggctggactaggataggaatgtgttggatggaatatcagagtcaattaaactcagtaaaggtaaatatcatttcatgaaacttctgtttctattggaatcaagggaggtctctgtgtgtgtgtgcatgagctgcatttcttactgtgagttacagtctaaaactttctacattgccctgcagaattactcttaccaaccctagggaaattaattggcccattcttcacttcatcaagcttagctttcctttacattaggtttttcaaggtgctagcatcaattcggctcatctctactcyttgtctctttagctaatctgcaaatttgggcaaactgtgtaggatttgttccagtaacattttagctaaataaagaccgtagagtgttattaaggactttctggccaggcacagtggctcatgcctgtaatcccagcactttgggaagccaaggcgggcaaatcacctgaggtcaggagtttgagactagcctagccaacatggtgaaaccccgtctctactaaaaatacaaaaattagccaggcgtggtggcgtgcgcctgtaatcccagctactcgggaggctgaggcaggagaatcgcttgaacctgggaggtggaggatgcagtgagccgagatcgcaccactgcactccagcctgggagacagggtgagactctgtctgaaaacaaacaaacaaaaaaagactttatttctctctctgaccctcatccctctcccctctgtctttcctccctctgtcctcttactcgttctccttcaatctccttcttccatgcccctccctgcatctctttttctaccatcctctgtattttctctggtacctgattggaaactcttcatttgtgttttttggcagcctggaccaaaagtgcagctgttactgctacagcactttatgacacgtgccttttccaacacctctgttaggctgagacttagctctttttggcagatcacaaagcaggagttctacattgctaaaagacataccttcccccgcccttgcatcttctctccaaaacaaactcactgcagcttttctgctactgttgctttgctagctttttacctttggatggagagaagatattcgacccggtgagccactgcatacccggaaattctgctttgatgcgatctcacacaacagccccgttacactctatgactgtcatggcatgaaggggaaccagctctggggataccggaaggtaagagtcagtccactgtggtcattctcaaattactgtggtttaagttattcttactcagttttctttgaaaacacaccgttttaggcctggcgcagtcactcacacctgtaatcctggcactctgggaggtcgaggtgggcagatcacctgaggttggagtttgagaccagcctgaccaacatagcgaaaccccatctctactgaaaatacaaaaaaaagtcaggcgtagtgatgggtgcctgtaatcccagctactcaggaggctgaggcaggagaatcactttgagcatgggagggggagattgcagtgagccaagatcgtgccwctacactccagcctgggtgacagggcaagactctgttaagaaaagaaagagagagagagaaaaggaaggaaggaaagaaggaaggaaggaaggaaggaaggaaggaaggaaggaaggaaggaaagaaggaaggaaggaaagaaggaaggaaggaaagaaggaaggaaggaaggaaggaaagaaggaaggaaggaaggaaagaaggaaggaaaagagagagagaaggcaggaaggcaggaagggagagagggagggagggaggaaggaaggaaggaaggaaggaaggaaggaaggaagttttgaaagttttacctagtcatacatacacatatttggctcacacatctggagatcaccagcaaaggtgaagggaaaaatcgtgtgtgtagaaaggggcaagcttttggcttcgcttgttatatgtgtggccatcacaatcagttatgattgaaaaatggctttgagccagaacaagggatgggtctaggtttaactcagaacactcccaaaaggaggaaccacatatccaataagcaaaaccacgcatacataatttttaacatcaccattcacaacacacatacacacagattgtggcatccattcattttttatgtatctcaggctcacttgcttgggacctgtctgggttaagacaatgatgtttacacaaatatttatacatctatgtagatataattgctgcaatccttatacaaaaagtgacccatttacattttcaccaaaatcctgcccaaatgtagcaaagaagaatttacttggggaatttaaaagtttcaaaaattataaagttaacagtgaatggtaggaaaaattcaaaaacatatataaagtcacattttattgagttaataaaataaagagcaattaagttattgtttgaaratatttttattgtttccttttgacaactttttagaatactttacaaaattgcttttcaaattctttgcttttggggatagaacttggctgtcaattagcaattactccataagctccattctgccctctcaaatccatggacctgctggggccttctcagccagggataagatgccttctgtttgctttttcacactctgaggccagccttgcctcaggctataaggaaaatggaatatcccccactttattcatgaacttggccatcctgtggctgaggcaaggtcagtgtccccccaaattacagaaagctaaaggagagaagtggtggagagtcagtgtggggagagggaggactggttatgttacttgttgccttacttaataagcattctggtttccacctcttagagatgagctcctaaaactatactcatccaaaggtggacttgtttgtataagtttattctgcatcccacccccacccaaacacctggcaggttgtggctgtgtctagcaaaattacaaaacatcagttgagccgagcacagtagctcacgcttgtcatcccaacactttgggaggagaggcgggcagatcacctgaggtcaggagttcaagacaagcctggccaacatggtgaaaccccatctggactaaaaaatacaaaattagccaggcatgttggtgcatgcctatagtcccagctactcgggaggctgaggcaggagaattgcctgatcctgggaggcagaagttgcagtgagccaagatcacaccattgcactgcactccagcctgggcgacaagagcgaaactccatcccaaaaaaagcaaaaaaaaatcagttgttatatccttctacaaaacaatctagaatgaaaggagctcagaagatggtatctgattaaaaatgaagctgggggaatatcactgcaatagtaaaacctcgccgttttctttatgaaatgtataataaatgattcatcttatcaaactattttgctattcaacatgatacagcctgtgtgtggtgcaataaagtaaggttttttttaatgattatattctgacatctaaagagttactttctgcgcacatcgataaaatagctgactggccatttgcttagtatgttagtggttcctaatgaacagaacatttcttattactgtacatttatagcatgacacaccaaccactcaataatatgcaattaagccaagaaaatgcaattgtttttattagggagcttacaaaagtttacagatggataagaacaactaatacacagagctcctggggagaaaaaaaactggctgcagtggtttcaaggggaaactcttatgagctttaatattaaacctttccaggatcctaagggatttgtgaaaggaaaccactagattcaattgtgctgtggctctcttctcagctttttgtagctgttggtattgcattacttagcaaaaggttacactccatgtgtatttatatagcaagcaaggtatttatacttaatcaggaacatgcaaaggctcaaaatggaaagtttctgaaatatcacatcttggtggatgactcaggcctattcagacacacctgttttagaaaattcctcttgttttttccaagggctatgcctaaggcataaagagaaaaagcacaaagagaaatctctctggtgtgttaccttatctatttggatgcagtacttggctctgggggcttctggcagttttagatgtttttgtttgttttttgagacggagttttgctcttgttgcccaggctggggtcaatggcgtgatctcggctcactgcaacctcctttcccaggttcaggcgattctcctgcctcagcctcccaagtagccaggaccacaggcatgaccaccatgcccagataattttgtatttttagtagagacagggtttcaccatgttgaccacgctggtctcgaactcctgacctcaggggatccgcccaccttagccacccaaaatgctgggattacaggcacaagccaccgtgcccagcctggaactcccactttttataagtgccatgctcttaaggaataagatcaatatttcctaggagagttccccaatgccttggattcagtgtcactgataccagccaacccctccctcccagctacatggagatatcttggagagagaaggtggccagaagccaccttgcttgggtggatgaaagttgttttcggaccttgcttcctggtttcagcaactctcattccgcttttagttatttttagatgtggctctttgccaccacaaaaggagaaaagcatccttattctatgatgctggggctatgttcagttgaacagctgtttcctacaataacaggcacccaggaagaggaatcctgttcctggttttcttttaccaccagggggacccctgttacaagaacagtgaattgttgaggcaacctcagtaaaaatatttgtcctcacccagcatcaaacaggaaactgtctttcctcttcttcaatccccattggtcactaagatttgtcacccacttccatccccagtcattggtcactaagacttgtcacctgcccccatcagccaataactctgaaatccacccgctctttgccatttctatagccagcccctgcctggttcagtcttcacatcttacccctgggttattgcaatggcttcctaaagggctgccctgcttcctgtctttccccttccccttccccatcttccaccctgaagccagagggagatttcacaaaacctggtcatggtattcctctgtttcatgacttcatttggtttctcattgagtagaagatagagtgctttagcctctcaatactcatctggatccttcacaacctggccaacataacagccgaccatcagcccttagagttattcaggcwtaatacaccccaattcatcctgaaattgtaaggggatcttgaatagttgttttgcttttatgactttcaagtgcttcaccaacataataatgataataactgagtgagataaactatggaaaacttctagcacagtttctgatcataagatttccatctgtgttggtgacaatgcactttttacactgatcatcatggcaaggtatatcctaatataccacatcattaaagcaatctctcctaggcaatattgacagttgttatccctccaaaattgagcgctatctcccatgcccttttcattttaagtaaacattttattagattatagcatatgtcttaatttgggtttccccatatatacaacctaaagtaagaattttaatgcacatggtttatttgggatatagccccaaaaattcttgacagggagtgaggaagtgaaatggaggagatatcagagccaataaagggtgcattatcaagcaagtaccaccgcaggcaattagaactcaatcctactgaagatctctggaaatggtatatagaacacacatcagggagtcaattttttggtcaggttcctgaccaaagattgactggaatggtgtataaataccccaactcccttgatacctctggcctgctgctcttacagacagaaccattcttaaggccggagaaagtccttaagcagagagatgcagtgacatccgggccagcatgcactgaaatggaaaggcctgaagggccatgctcagggtacaggcactgccaagaatccaggtgctctgcatcctcaccaacacttggtattgtcagtttctttttcttttttattctgtgattgtaaagtgatatgtttgttagccattttggatatcttatttgtgcagcacctacttgagtcttttgcccattttcaaaacatgggctgtctggctttttcacacagatttttagggattttttctatatataagtgcctcattggatgtatgcattgcaatatcttattcttgttggtgtcttgtcttttttctgtttagtggagtgtcttaatgaaagctattatttatgattcgtgggttttgtgttctgtttaggaaatcctggccttcatgtagttagtcttccaagtcatctttggaaattttattgcttaatgttctacatttcggtttataattccctgatatatctgtatatctatatagatatatataattttttgagacggactttcgctctgtcagccaagctggagtgcagtggtgtgatcttggctcccagcaatctccacctcccgggttcaagcgagactccttcctcagcctccccaagtagctaggattacaggcacatgccacccagctactttttgtatttttagtagagacggggtttcaccacgttggccaggctggtctcgaactcctgacctcatgatcccgcccacctctacctcccaatgtgctgggattacaggcgtgagccaccgcgcccagccctccctgaaatatttttatgtgtataatgtaagataagggttgattcatatacagagatagaaatagatatagatatatattgatagagacatgctattgatcaatcaccatttatttaaaagaccattttttcccactgcactgaagtgacgcttttattgtaagtcaagaggtcttatatacactggtccattgttaaatcctcaagtttttaccatgtaactaaatagtcttagccatacagaaagtaagctaataaaataaactaaattaatctaataggaagtatagccaaaaacccacaactaccatcactcttagtggtgaaatgttaaagctctcctccagagatggggaataaaatagaatgttgactataatcatgtttttcaaccttttataggatatctaatcagtgtaatcaggcaagatatagacctttaaaggaataagaattggaaaggaagaaataaaacagtccattcgtagatgtcatgttagggtatttagaaaatccaaaagattatgcagctgaagtattttaaaaatgaatagatacaattagcataggcccaagatgaaaatgaattgtttatatactagcaacaaaaaatagaaaatgaagtttaaaagtgattccatttggtcactgtgaaaagcacaaaataggaataaatcacggcaaagatrtgaaagacttttatgcagaaaactacaaagcatcactaagaaaaatcttaaaaactatagagggatccatcatgttcaaggattatgtctcaatattgtgaagatgtcagtttttaaatgatccaaacatttaatgcaaaaccaaacaaatctcaggaggcttatttgtggaaattgataacctgattccaaaatttacatggaaaatgtaagggacaagaatagctaagaaaatcttgaagaaggaaaaaaaagtactaaaacattataaaagcaccaggtatcaaaacattacaaaggtgtattattaaggcaatgtactcgcctgaggatagactgactgaggctctctagaaggtgaagcctgggtattgatattctttgaaaggtcccgagagattctaatagacagtcagatggagaatcacttttgtagctctaatttttactttctttctttaatctactcctcccttttgctctagttggaatttccccctctttctgtactcctatagcattttgtttccttctttctacttaaaacactgtatattatacatacttagccccctcacccccgccaactacctgagggcaagaactttttaaaaaatgtctatatggcctgcctaatacctaatatatgaagttcctaaataagcattcattgactggcttaaagaaccactagttcaattattgatatgagccctgccttcataaaccccaacctgtgctggataaaacttaacacatttatttgtctcaaaactacatatgcaacctcccaacgaccaaaaataaaagatttaaaattactttctttagttgctctctgggggttcttataatttaactttcataataaaggacttgcaaatagcatcaaacaggaagtacaggtaagaaggcacctgccaggctaaattgataacagtgtaaccattccattcatttaaaaagtgagtgggtggaatttttggcatctgcctacatttgactatttgttgttaacttatgatatatgccaggttttggcctctcagttcataaaatgaggatgtaccagtccacaaagatgccagatagaagggctcgaggttgttattttaaatcattctggacaggtattgatttgggaccaaaaaataaggaaagtgtatataacaagtttaacttaaaagtcatgtaattcaactctggttctgataaatgaagtcactaaaaaatcctggacatgtggtcagaggttgggcagtcacactctcccaggtcagtcctaattgccagaaagctcttccctggcctttgattaccacacagattatatttaattcattttactcaagacagatcccaaatatttgaacaaatacctgcctggtttttaatccaattaaatggcccaatttcctgccactgctctccatatgacttaatttgaacccacctccatctcctggacactcacccctaaagtactgcagatagtcttagagagtaacatgattcccagaacacaatattgtaagaatgttgtcaacaaagaaagtagaataagtttctagcaccttttgttatgagcttctagcatgctttkctgtgagcaatgtytctgttaatttagcctgagttgattgatttcctgccttaacttcacacactcagcttcttaatgagctttcagtactggagaaaaaaaatctcagtctttttctcttgctttgctaaacagacatatctctccaatcttatatctgtacaggtcatcttttacattatgttgctatccacttttttccattaaactctatcctattataattatcccaacctggatttaaacattttgattcaacttaatagcaattgaactataatttgtttcatccacagattggatcagcatccattcatgccttcatctaaattgttgatcccagtgcaaagtcaagcactgagccctctatcatacagcagaggtaacaaaatccattaatgagcatcatttggaggaagttactcaaccagataaaaattcatgtaaaattatcttctagaccaccgttctccagcttgcccataagaaaacaaaattggactcttcaaacatcttgctgaaaaccagatgcccaatgtctgcaacataccccttttggtaacagaggacttatnttatcctaagaagttgtgattcttatgcagaaaatttcagtgcaaattgaaaattcagttaccttttcaaagaagaattaggctaactctcaggaggactatacattcgccccagcaatgaagctgccttttcaataattaattctatcttcccatcctgtttttagctgtatgtctaacccagctgaaatcacttaggttgttatgaccttctaacttttgccatttcaacttagcaatattcctactgattacctaacatacttaactgccattctctgatcactccgaaatagaaaggctctgttacractctcctggggctcttccgtaaagagaaagtctttgtgaactgaacgcctgcccagatctagactgtcaaacagaaaagaatcttgttaataggaactatgaaaaaatcaaattagtgtttgttgatcaggacaattctttcctaccaagcaggtgcggggtgggagcaggactggtagttggctcagccaagaaaagagatgaaacataactcaaagactctgtgcccggtctgtgttcttaacctctgagttacgtttcatccctaatcctagcattttgggaggccgaggcatttgagaggccaagacagatcattagagcccaggagctcaagatcagcatgggcaacatggtgaaaacctgtctctaccaaaaaaaaaaaaaaaaaagctgggcatagtggcacagacctgtggtcccagctatttgggaggctgaggcaggaggatcacatgaacctggaaggactaggctacagtgagtcatgccactgcactcctgcactccagcctgggtgacccagcaagatcctgtctcaagaaaagaaaagagagagagagagagagagagagcacaggctctggctcctgcagggcctcataatagtcactggccccactgtggatgctggctttgggaccttgggcaactttcttactatgaatttctgtttcttcatttataaaatgggaataataattccctttattatctactttagtatgtgccttagcaggttattctgatgattaaaaaaaatttaagtgcacctagagcatagcacataacaagagttcaattgatgttagccgctactataccatgcattcagcaagataacttctgatttgattttcgctctccaaatagatttgcatacagaaatagatgggctaactagtcatatttctacactgtacatttctgtactattttaactatttagttatagctaaatcttagaatatcaatttcatgagagcaggaatttttctctgctttctttcgtgcactctttccggcatctaaaacactctgtggcacataataggtacttaattcaaattcactgaatgaatgaataagtgaatctagcttcctgtttgtccacattcactatctcttcaggttgcttaagtgggtttaggtagggaaaaaaaaaagagagagagagagaaactctgggtagaatacttagcactgcttgatgcctagatacacatttgacaaatagtagctattatgttcacatgacttcatgcaggtttactgaggggagctaaagagatatggatagacggaaacaaggtgcaaaacttacgggcttattctactcatggagatttcagtacagaggggaagcggacaaatactacttaaaggaagtgtacaggataatatgagaacacaaaacactgggcactatccagatcagaagggtgaagaagccttctctgacaaactaacttctaaatggagaccgaaaagatggagacttttacctttttagataggtaaagaaagtgatggagaaaaagaccacagacatcyggatcaacttgtgcaaggccctgagataagcaagatattggttttctcagaacagaaagaagccagttgaaatgcatacgtgcaacagaaaatgaactattaggttggtgcaaaagtcattgcagtttttaccattaaaagtaatacaagggctgggcgctgtggctcacgcctgtaatcccagcactttgggaggccgaggcgggtggatcacgaggtcaggagatcaagaccatcctggctaacacggtgaaaccccgtctctactaaaaatacaaaaagaattagccgggcgtggtggcggatgactgtagtcccagctactcgggaggctgaggcaggagaatggcgtgaacccgggaggcggagcttgcagtgagccgagatcgtgccactgcactccagcctcggcgacagagcgagactccgtctcaaaaaaaaaaaaaaaaagttatatacggtcagacatcccagcctgggcaacatggcaaaaccccatctctacaaaaaaatacaaaaattagctgtgtgtggtggcagcacgcatgtggtcccagctactcaggctgagagggaacgattgtttgagcctgggatgtcgaggctgcagtgagccaaggtggcgccactgtgcttcagcctgggcaacaaagtgagaccctgtctcaaaaatataaaaaaggccagacatctgtagaagcaggactacacaagaccttgtaggtcatgctaagaatttagctaagagagtgtgaagtgtttgaatggattgcagagcaggcatctaacacatcaggattgatttttttttttcatgatcccggctgctctcaggagaattgaggatagattgtgcacatcactggaccacagcccaaaaatgctggtgagaagagcagaaggagggtttgaaggtttgctgtagccagcaccgtctcagcacacacaccaaggggctctgtcagggcattaagaaacattatttcttttcttttttttttgagacggagtctcgctctgtcgcccaggctagagtgcagtggcgtgatctcagctcactgcaacctcctcctcctgggttcaagtgattctggtgcctcagcttcccaagtagctgggattacaggcatgcgccaccatgcccagctaactttagtgttttttagtagagatggggtttcactatgttggccagtctggtctcaaactcctggacctcaggagttccacccgcctcggcctcccaaggtgctgggattacaggcatgagccactgtgcccagccaagaaacattatttctgattggccaaattaaccactgatgcaggaagaccaattttctcctccagtgaggaattctagctgtcaaaaaaaaaaaaaatggaaaagggtagacaaaaagactgctttgtcccttttatgcctatcaaggtgttatttgcgttctctcagatgccaacagtaaaaataggcagaaaaagcctccttgatttgtccttcttccagatggctcaaaggatagtcaaatatcaaccttgttcttctgcacaaccctaagaggtgggaaagcagatcttttaattccctgtctcatcccactcccctcctgcccactccattcactttacagatggaaaccctgaatcactgacaaactaagtgaccacaaaaggttattgtcagagataaaactaggattaaaaytggtttcttaattccaagccttcattccctcatagccatattagacacaaaaggctttggacaggaaggagttctctcttacagaaacatcctcttccaatgtatactcttaaaatgaatctttctacttacatggaaattgataggagggggtaactcgagtctcccaacttgacacagaggagctaccctgagatccagtctatatctaactgctcactgggcatctaaactttgatgtctcgtaagcatctccaactcgtcatacctaaaactgaactcattatcattcccacaccaatcctgtttctctttctgcatttcttgcctgaatacagcttttcctctagacatccacctcmtccctctacctcaacctccacatctcattaatcagaatgcccaatgcatttcacttctcagatcactccctgggtcacccccaactcatccccattggtctcgtttttgcatcagctgaaatctgaatcattgcggtagcctctggtggttctctcttactgtagtccaatgcctttccatccctcctccatcttcctcactgccaccctaactatagaccctgtgactcttgttcaaatctcccaatgaccattccgagatactttcatgagaagtcaatccttagcactgtaccaccatctcatcatgatgtagcccctgcctacctcttggatatcctcgtctggactttttccccttgctccagctataccatatgacttgctggtctgtggcacaagacccaacctccatcacctctgacaacatctcctcactctggcttcctcattgttctctaaccaccagggtgcatagctgcttagggcccagaccctggccattccctctrggtgggaaggtctgagactctttgcatggttaattagcttaccttctttgagactcctcagatgttaccttctcagtgagattttccctggccactcaattcaatgttcacactggccccacccctggcactccaggtccttctgaccgccttgatttttttcatgtcacctctgaacaggctatgtgtttacatactatgttcattgctcattgtctgtgcccccactgccccaacctcacccctacctctggaaaagaagctccaggagggcagggatttttgtctctttaagtttatattccaagcacctaaaatagtgcctggcaaatagcaggtgcccaatatattttttgttgaataagttgaatgcataagtatatatattattttatatattttttcatatgttcttccttaaatctagaacaacctaattcatatcctactcaccctcatctacaatctcattgacacttttttactacaaacatttctttttttttttattatactttaagttctagggtacatgtgcacaacatgcaggtttgttacatatgtatacatgtgccatgctctttttttttttttttgagttgcagtttcgctcttgttgcctgggctggagtgcaatggcgcaatctcggctcaccgcaacctccgcctcccaggttcaagcaattgtcctgcttcagcctcccgagtagttgggattacaggcatgtaccaccaggcccagctaattttgtatttttagtacagacgggatttccccatgttgctcagctggtctcgaacttctgacctcaggtgatccgcccgccttggcctcccaaagtgctgggattacaggcatgagccaccgcgcctggcctactacaaacatttcttgtttacctattggtctcccctatgtcgtgggtcagttggtgcctcttaggttatctttccatgctctctcctcatacacaccagaaaataaaagtcacttcataaatatttgtcaaactcaactgatgtgattaatgttatcttctaggcaaaggacctaaacacatagatcagatacaagatctgatcataattgcacagaagagctcatttcagagccatagataccttctctccataaatcctttcggttaaaatgggaggtactattgcatcaatttagataaccagttgaggcagaggctaacttttgaaaattctattttgccaggacttcagaaaacacaatttggtgtcgaatagctggtctcagaccagatggttggtacattctgatttttagaactagggatgctccctgactgaaaacaaagtagtggaaagggagggaggaatcactattacttagttatttacttataggcaggacactatgccagtgattttatatctattaactctttttatcctcaaaataaatatgtgaggcatactgtcatttacatgttacagataagtaacctgaggttcagaaaattaaacaagttgtccaagattacatagcaggactgaaatttgatgaatcccctacgccacaaatccaagcactttccccatgactgttgtctctccgccccctatgtggtagtttcattcttggaatcaccttcctatatataatggactcatatacctattttactatctttgcatctttagcatttggttcttttatgaccagtgtggaatcttttctgtaactcacacattcttttagagttcagagcctacaggactatggaacctaataaagtctagcacaaacccatgagtgccacaaagtgtcacacacatgccaatcaagtccacgggcctgctacaaagaagtgcccctttcaatgagctacctggaaaggcacacctacacttgccaagggtggaccgatcgactggcattgagcattgattaggaagtagtcctggattcaaacttttgcatttcctctcaaggatttctaattttctcaggcaaaacaaaacaaaaccaaaacaaacagaaaaacacaaaaatagatggagtaggcatccaggaaaagtgggaggagtaaagggaaatgcactgctggattacactgtgaatagccagagcacaggccatgccatcctccaggactggacaaagaacaacctagttaaaagcacagaaaggacatcttctatcgtcctttagggagggttgttttagaacagcagacttgccgaaacactcagaagtctattccacaaaaaaaactgtgttcagttctgttacagccatcaatgctgtgaccactgaggtgaagggcagaggagggaaaggctgtcatagaaccaaagaccacattcaaaagacaattacttgatccactgacttaagtccaaccaggaaaagcaccaggaaagacaattagtgattcacaagctcagctgagtagaaacgtaaagatggcaatgatgtagcttagccccaaggtcaaaagtggaaaatgcttgctatgggcaaggcagagggtgctttgagaagcttcacctccgggacttgctgagcactcccaagacaagggtgagcagagctctgtctccaaccagggaacaattagtctgtggatctactgatcactgtggatggtctctagtttgacacctcgtcatttgtctctgtcactagtgacctttggaataaaatgctcattcaattttatgactaggagaggctccagagatttatctaatcccccccacctcattttactgatgaagcttctcagacatagacagatgaagggaatccaatttttcaacttttatgagaacatgaagtacaagaacagaaaacattctggatggttcagggtagtggtatatttgcatactcgacttggttcagcccaggagtacacctgtatttctcagagcatgtgttccaatatgggatttggaaaaatatgatcagttgatggttcagaaaataatgtttgaaaaaataaaatgttcagaaagtctggtttggcatttgcatgcatactgaggtacacaagctagggaagaaaagagaatagaaacatgtcctactccttttctcatttcttaactctcatgaagttatgtgttttgagggggaaattgtgctcatctggagggtccacatgagcatttttttttttttgagacagagtcttgctctgtctcccaggctggagtgcagtggcctgatctcggctcactgcaacctccgcctcctgggttcaagcgattctcctgcctccgcctcccacgtagctggatttacagatgtgcaccaccacgcctggctaatttttatatttttattagagacggggtttcaccatgttggccagactggtctcgaattcctggcctcatgtgatctgcccgccatggcctcccaaagtgctggaatcacaggcgtcagccacggtacccagccccacatgagctattgataaaggtaacaacaggaaaaaatacagatagtgaagagggggcaagaagtgcatgtgtatagaacaaagtgaattagaatgtagcaggtcacctagaatttttatgactataacagcttaagagtgctctttgaaaaactgacctaaatgtattagatccgtgtagcttcactattggttggggctgggagaatgagcatgagagatgctggggaagaagagagaagacagcgaaggagactgctgcctgaggagccacagcagcggctgggagagggcatctgggacagcaaatatctaggaccctcagaaagaagggctggcggagtgagctgcagcctgcattctccttcctcctggaagctgcttcctccaccccagaggagagggaggagagagtttctcagagtctttccctggggtcagacacgggtggaattaatgaagcaagatggaaagaaaatggcaaggagatctcaggagccctctttgtgtaaggaaagtaaaatccacaataaactcaggaaactcataaagagagcagaagagaatagcaagcctttgtattaggcacagctctttgtttacactgaaaatagaaacaggcaaactaaattgcctgcaggttgcctttctccttccttattctttcttccttcatgcagtgcttaactatgcaaacatccggatcctaaaaggacattaaatattggttgatggagtcttaaaatccaggagcaacccagaaatgtttacaaagggtgcctgagaaactcctaattctaaaagcattgcaagtttagtattcctcagataaaggtaaccagagcctgtaaaccttccctaaactaaataataaaacattacttgatcttaaaatataagcagggatttggggatgttttcttgtattattggcattatagacaacattagaggtaaaatttattactagttaggaaatttttcttttagcattaccttttccccacttaacacaattaaaagagggtgtgtgttaacagagcttgttcagataatgagcttgctcactacttaaactttctgtcctcgtggtatattttcattcactgagctgttatctgcatcatgtacctgggggcttttttaaaatgaatgttgcctcctccattttgcagaaagcaatgagaacggcagcactggaacacctgcattatatcaataaagggattgagaggagactgaagctcaagaactagcaaatttgaatttgtacattcagctattgcctgtgtgtcccttgtcccaaactcatattcatcttctgaaaagggcagctgagaacccggcacttttgactgctgcttttttttttcttttgtatttctctttcccattagagattcaatgtgagggaattatgactcttctagtcattgtgtgtgcgtgtgagcagggggtattatttactgcggactaaaatacaattttttgtgtatgtgtttcttcccagatagctacattattggttacttgccaagcaaccccatatacttactattttcaaaatytaagcagatagcaaaaagctcaccacagagcagaaaatgaatggattgcttttttaaaagaagtggatgattgawtgaataaatacatttattgtctctaattgaacctgcttgtaggccctacatagtgccaatacagcctacaaattcacattccacatgggcaactccacctgctattgtttgatttgggagctgttctatttacacaataaatatatactgaaatataaacagaaatatcttacttctgtatattttgggttgtaaccattcaccacgtattacaacagtcttttcttttcttcctcactcctccaggacagaacattattccatcctgtgagcaacagctgcatggattgcaaccccgcagagaagaagattttcatggccagatgtgaccctctctctgagactcagcagtggatttttgaacacattaatatgactgttttagaaaaatttaaccaccatgccaactcctagaaagaagaaaggaagaaagagtgattacctacaggttataaattaaattttagccagcatctgggtcgaaggagtcaggaataacatttcctcgatccaggaaggctggtttaaaaatttgcaaatgccatgtcaaagtaggttgttttgaagaacttcctgcatctgaagaacttggctgagaatctcaccagctgcttctgagaactcgagactagcagttcccttgctggccaagggcaaagataatttagggacttttcaaaacaactgctgagctaataaatcctagcatttctcaggtcaaatcctgcagtagtgagtagctatgaatggatcctattaactgggtgggaggggggtgaaaatggagtgcatgactgctctgacaacctgaggatatcacaggtttagaactagccaagcttaaggggtgagctgtactctttggtgccattctctgactaagaatgggttcagcaggtttaacccttaaaagtgctgcagatgatttcagagtgctcacactattctgttttttttatttttatttttaaatgagggtgcaatatctaatgtaagacttaaattacataatgaaatggacatccagtgttcccattctttcgtttatatttgccatttttttttcagagcaaagtttcttttttatgaaagttcatgctccatgaatccactgaatttctaattcagtgcccttctatgaatccagttaaaaacaaaagcaaaagcaaaaatctatgctatcaagttactccaaagaaagatttcacagaagcagcaaaaccatataagatttaggagagggacttccctgggaaatctatttttacttttctattatttttaaaatcttaaaagtctgatatttgtccagtcataatttttattaagcaaggaaatggagtgagtttgatgtaatttgtttaggagattcttaaacccaaataaatctacactccaagtgatatgtgaaaatggcttagttcacttcaattctgtttagtcagtggtgggagcttagaagtggttttatttgttcgtttgtttgggttttgcttttgttttttatttttttcttgttttttttttgtagtgttgaattaatgatgttcttttatttggaagctcataaaaggaattaccattaatgaagtgtttctgacaccattttctgttaatgggacaatatttcggggatgaagaaaggaatgctccgaaaactaaatggaacacttaatccttaaagcaattttttactgttcaataatatcacattgggggaagaaaacacaggtatcaaggtggttcttgggaaaaaagaatcatgtttattatatatctctcaagtttttttggtataaaaatgttttaactttgctttctttttggtttttgtttgaagttggttttcctgttaataaaaatttatataacatcttggatctagagcattaaattttagaactgggaggactcctaggatccagtccctttacttcttcagatgaatcacaaaagcccagaaaggcccaactcctggcaaggctgatgtcttctgagccctattcctgtgttttttatcttgtactgtgttgcctcactcttacccaagctggttctggatattactgtgatttaacttgagattttcagtcactagatgagaatactatgcctccctggggatgcccactaaagtaatattcacactcagaaactttaatacagtacatgaagcctcttcttatacatgttcgtgattttttatctccctgaaacttaatgaaaatgtctagttaaacaaccaggctatagttggggaagagttatttcattatctttactgatttttcaagcattcttttgaagagctatttttttttctttttctttttgattatactttaagttctgggatacatgtggagaatgtgcaggtttgttacataagtatgcacatgccatggtagttcgctgcacccatcaacccctcatctacattaggtacttctcctaatgctttccttcccctagtcccccacccactgacagaccccagtgtgtgatgttccccagtgtatgatgttcccctccctgtgtccatgtgttctcattgttcagctcccacttatgagtgagaatatgtggtgtttggttttctgttcctgtgttagtttgctgagaatgatggtttccagcttcatccatgtccctgcaaaggacatgaactcatccttttttatggctgcatagtattccatggtgtatatgtgccacattttctttatccagtctatcattgatgggcatttggattggttccaagtctgtgctattgcgaacagtgctgcaataaaagtatgtgtgcatgtgtctttatagtagaatgatttctaatcctttgggtatatacccagtaatggaattgctgggtcaaatggtatttccagttctagatccttggggaaatgccacactgtcttccacaatggttgaactaatttacactcccaccaccagtgtaaaattgttcctatttctccacatcctctccagcatctgttgtttcctgactttttaatgatcgccattctaactggtgtgagatgttatctcattgtggttttgatttgcatttctctaatgaccagtgatgatgagctttttttcatatgtttgttggctgcataaatgtctccttttgagagttgtctgttcatatcctttgcccactttttgatggggtcatttttttgttgtaaatttgtttaagttctttgtagattctggatattagccctttgtcagatagatagattgcaaaaatgttctcccattctgtaggttgcctgttcactctgatgatagttcattttgctgtgcagaagctctttagtttaattagatcccatttgtcaattttggcttttgttgccattgctttaatgttttagtcatgaagtctttgcccatgcctatgtcctgaatggtatttcttaggttttcttctaaggtttttatggttttgggtcttatgtttaagtctttaatacatcttgagttaatttttgtacaaggtgtaatgaaggagtccagtttcagttttctgcatatggctagccagttttcccaacaccatttattaaatagggaatcttttctccattgcttgtttttgtcaggtttgtcaaagatcagatggttgtagatgtgtggctttatttctgaggcctctattctcttccattggtctatatatctgttttggtaccagtaccatgctgttttggttactgtagccttgtagcatagtttgaagtcaggtagcatgaagtccttcacatccctttgtaagttgtattcctaggcattttattctctttgtagtaattgtgaatgggagttcactcatgatttggctctctattagtgatgtataggaatgcctgtgatttttgcacattgattttgtatcctgagactttgctgaagttgcttatcagcttaaggagtttttgggctgagacaatggggttttctgaatatacaatcatgtcatctgcaaacagagataatttgactccctgtcttcctatttgaataccctttatttctttctcttgcctgattgccctggccagaacttccaataataatttgaataggagtggtgagaggacatccttgtcttgtgccagttttcaaagggaatgcttccagcttttgcccattgagtatgatattggctgtgggtttgtcataaatttgaagagctatttttttaaccttctgtcacagagatattttgtataggtcaagagatctcgaagcattcaagaagcatactggagaaaatcaatagtgagaaattaacctgtgtgttgagcaattccagagagtgaatgaagatttatctcaagtgttcagacagcaatcttgttgtagaattagatgatcctataaaaattcacattatgtcattaaacagctgactgctatttacagttctatgaaagagacaaccctgggttctgtaccctgcaaagctcagattcgcaatgatcttgtaggatgctataatcatggaaagctagccataacatgtttggctctgtcctttgagaaagcctgaatatattgcattattttggtgtgacacacagaggtcaaccaagattggtctcttgatctctgaataaaataatgtaatattttggggcctatttgagggtggaaggtgagaagagggagaggatcaagaaaaataacttactggtactgggcttaatacctgggtgatgaaataatctgtacaacaaatcgccatgacacaagtttactaatataacaaacctgcacatgcactcctgaacttaaaagttttaaaaaattaaattaaattttttaaatgtaatataaaaaattaatttttaaatgtaatataaaaaattaattttttaaatgtaatataaaaaattaattttttaaatgtaatataaaaaattaattttttaaatgtaatataaaaaattaattttttaaattaaggaatgcttgagacattgaggccaaaattaaaactctaaactgtsaagcaactgttaaatgtgtgcaaataggaaacaaatagaatgaaatgaagcctcgagaacctacccctaagccaaagggcacaacattgctaataagcacatctgaggaggcatttccactccactgaaggttaagactctgtctacccaaagcaccgctactaccatgctgaaaagtagaaaactatgtatgttggtatgtttatttaacaaaggggactgaacaatcctcagaaagactctctttcctggaaataacatgatttgaaaattggacagtaggccaggcacatgggtcacacttgtaatctcagcactttgggaggccgaggcgggcggatcacgaggtcaagagatcgaggccatcctggccaacatggtgaaaccccgtctctactaaaaatacaaaaattagctgggcatggtggtgtgcacctgtagtcccagctactagggaggctgaagcaggagaatcatttgaacccaggaggcagaggttgcagtgagccgagatcgtgccactgcattccagcctggcgacagagcaagactctgtctcaaaaaaataataataataaataaaaataaattggacagtagagtactgacctacccttttatcagaatgggaggaaaaatcataatctggccttggaaattgctacttctccatcataagacatggttttgccagaataattaatttttaaaatcttttttatgtatttacaaagaaaaagctgtgctttaaagcaatcatgaactaaacataggacttacacttttttcaaggctggattaataccctggcaatagcaatgtattggcttctatgtccactggtatttacttaaaaacattaatatgatcacataactgtttttaaaagtattcactatatcagaagcttcagggagtaatgcaagttccagaattgctttatgaattgataacctaaaactttatgcaataaatgaataacagaaaatgaaaatggacctacaagcaatgaaagagtgtgttaggcccgttcttctcatgtttcttggaaaacatgaaacccatgccaacacttgacatcatttcctttaggagcaatgttttaaaagaagccaaatataaataagtaaatacctattaatattttgtgcttcttcctctcagatgaaaaacttttatttctatctttttataaatatctccataaggaaatagtaaaaaagaatgctttcttggaaaaataagctctatgaagtttatggctgacctatcaaaagagttagcgccccaggcgcagtggctcacacctataatcccagcactgtgggaagccaaggtgggaggatcacttgagcccaggagttcaagatcagcctgggcaacataatgaaacctcgcctctacaaaaaataaaaaaaattagctgggtgtcataacacatgcctataatcccagctactggggaggctgaggcgggaggatcacttgagcccaggaggttgaggctgcagtgagccatgatcgcaccactgcactccagcctaggtgacagagtgagatcctgtctttaaaaaaaaaaaaaaaaattcaatcacactttgattacaaagctggctatccagcagtcatagagggccacacctgccactgtgggacattcttggcccaggatatcacacacctaaggactcagaagaaagttgatgataaggctatgccagatgtgcctttgacttcttgtcttactgcagaatctcccccagaactaggcagttcacctgaccctcccctgaagaagagtgctaggttatattttttcagaatttagaatcatcctaacaatatgacattgtgaacattgatttatccctaaaaactcatttagtaaaatgtctttaggcttgttaccctggcaggattatgaggctgcaacgcgcttccataaacacatgctggagatatgctggaaataaagcatttcttataaatcatgagaaagaatgcctcaaagggaaaatatttttaagtgattccctatgattctgggagtacatataaatggagataagtaaattgtatctctcaacatggggcatgcttcattctctcccttcacctcatcgaccagtcctgctcctgccatcattcctctcagatgacaccaccaactgtaattactctccatgtgtgaaacggtggccgaggacactgaagcgtgacaagtggccagtctttcccacactgccgacattggaagattgctctttgatttatgtctatagcctttgcttgcagaact

SEQ ID NO: 96358 - DNA, 250899 bp, Homo sapiens
agttattctaggcacataatttcaccaaatcatgtaaattgcacattttcacttcttatgaatctgtcccctcatatcatccctatagtagagtgtttgtccatgccctcatcatctctttgggctaatgaaatgtccttctaatcatccatcagtcattctactactctgcctaatggctccatgtcatcagctgacaaagtagaacatcataaaactggccataaaaggtccataagatcctacataatttggcccctgtctgcttctttcatctgattttttttccagcctctaactttgaacactaactgcagccatttcaaatgtcatagtttcctaatcacagcagtctggttcctgactcttttctctctctctctcttttttttttttttttttgagactgagtcttgctctgtcaccaggctggagtacagtggcccgatctcggctcactgcaacctccacctcccgggttcaagctattctcctgcctcagcctcccaagtagctgggattacaggcacccactaccacgcccagctaatttttgtattttttagtagagacggggtttcaccatgttggccaggatggtctcgatctcttgacctcgtgatctgcacacctcggactcccaaagtgcctctgttcatgttgttctttgccgaaagttatctctactccccaccttccttcacaatgcccgtctctggctgggagacacatacagtcaacatttgtcaacattcagctcaaatggataaaactgaccattctttcttatgcatcttgtgtacatacagtctttcctcagcagctgtagcactttactgcatatgcctttctagttgtctatttttccaggttgaaatgaaagcctttcaagtgtagatcctctgttttattcatttttgtcatcttcaaaatttgcaaagttttagaaaaatagtagatgcgttaaaaacgcttactgaattgatggataaagtaacaaaagtcaatacctgggttttcaataggtatttcaggtggaagtcatattttctgatgagtgttaagagacattgtctggaaaataaaaaatagaaactttgtttaaaattgggtgggaaaacttatattacctttagcacaaacatttatcacaaattgttttgcccatgatactatcgtaggcatggtataaaaaggattattgttgacataattttaaaaacatctcagaagggtgccttataaagtttgtataacttgatagactacaaacatatctgaaagtcttagaactccaaagaattcatgataaattaaccaaacctctcaaaggctgatcattatataaaactactcttaattcaaaccgtaagttgcaaagggattcataagcagataatggcatatattaacatcaagaaatattaagtatggcatatcttgtagagaattgcatttggaattaatggcttatatttataatagatggggttgtctctgacaccaaacctctgcatttttctttcctaagcttctcttactgctccagctttatctatgcttagggagaagacatgcaatttgagcagaaattcttctgagcttcgctgttcaaaaattattttcccaaacattattgactttaccttcttatttgtcttgaaaactcctgacttaaattgaatcataagtcacacaactcagaaacgcaacattaaaacaaacaccattatttttacagtagctgcattctcatttttctacattatcactttagttggagtccctctgtcagttcaaagacaaaatgcatagaatatgtaaaagtcagtgaaaggggaggaaaataataactaaagatttgggcaatggcagtggttttttttttttgagacggagtgtcgctgtcgcccaggctggagtgcagtggcgcgatctccgctcactgcaggctccgccccccggggttcacgtcattctcctgcctcagcatccggagtagctgggactacaggcgcccgccaccacgcccggctaatgttttgtatttttagtagagacggggtttcaccgtgttagccaggatggtctcgatctcctgacctcatgatccgcccacctcggcgtcccaaagtgctgggattacaggcgtgagccaccgcgcccggccaatggcagtgtctttatataaaacctgaaactattagtaccaccaagaatgcacccacttcagcactttgtttttggatattgtatctattttatagaaaaaaccactgggaagtagtgaaggtgagtgatttgctcaacttctaagaggaagttgagtcataaaagagaagggctgaaatcaaagcccttgccatccagtgcttgatttttttgatgatccaatacggtgttctgaggagggcaggcagggaagcattgtatccccaaaagtaaagttctacagtggcctttatgaggctgagaatgtctctgtgatccaatacggtgttctgaggagggcaggcagggaagcattgtatccccaaaagtaaagttctacagtggcctttatgaagctgagaatgtctctgtgttagataccctttgagaaaaataaggggtgaagggtcagaacataatggaagtggaataagcactgattcagagttagatacttggttttagtcatggctatgggattaaatatttgtgtgatggttgccaagtgtttgaacttctgtttttagtttccttaccacagacaaaatagcactgggagatggcatcaccccagactgtaatccactgccctgggattggagggagggatggaggagtaaagtctgaagctaggctgtcccagacatgtttcctctacccttgctacagcagaacttttgctttgccctgaattaaccctctggacccctgcaactgcacactggccatcaaatatctgctagggggcaggcaatggcaggggtaagacaagaacagaatgaaagcctccttctctcactctcttctcacagccttggcttgcctctctgtgccccaggtagcagtgacttaaaaggtgcaacaaccctccaccaacccagcaaagtcctttgtgtcccaaggatatcctgctttttgaaaaacttcccatatttgaggtgtatgtgtgtttctctccctttctctctgttccccccacccctgggtagatttattttggagaaaggaaactacagaccttgtttgtatgttatacaacagaaatctatagtggaatcatgtaattacctataaaacgaaaatttgtattagattatgtctaaaatcctttctagtcctagccattctatgattttatggagtgaagatggatgtttttagggggaagggtggcagagaagggcaatggaaaaacacaatagttaatgaaagaaaatgtcctttgtaaatttcaggcagacctgattttagtcctgccactgatgactagaatggccttaggtgaattatttagcctctcagaacttcagtttctttagttttgaaacaggataatatatactatcacagagttttagaaagaattagatgagataatatatgtaaatatataataacttcacaaaatcattacccaacatagtcactaaaaacaattttagctcacatttttatttatttttaaacttaattttattttattattatttttaaattaattattatttttttttttgagatgaggtctcactctgttacccaagctggagtacagtggcgtgatctcagcttactgcaacctccacatcctgggttcaagtgattctcctgcctcagcctcccaagtagctgagactacaggcacatgccaccatgcccggctaatttttgtatttttaatagagatgggtttcactgtgttggccaggctggtcttgaactcctgaccttgtgatccgcccgcctaggcctcctaaagtgctgggattacaagcgtgagccaccgcacttggccaattttattttattttaagttctgggaaacgtgtgcaggatgtgcaggtttgttacataggtaaacgtgcgcaatggtggtttgctgcacctatcaacccatcacctaggtattgagccctgcatgcattagctatttatcctgatgctctccctccccaactctgatgggccccagtgtgtgttgttcccctccctgtgtccatgtgttctcattgttcagctcccacttataagtgagaatgtgtggtattttgttttctgtttctatgttagtttgttgaggataatggcttctagctccatctctgtcccgcaagagacatgatctcattcctttatatggctgcatggtgtatatgtgccatttctttatccagtcaatcactgatgggcatatgggttgatcccatgtctttgctatcgtaaatttagctgatatgttatatcagcctttactttagagatttatgacctgtacctcccacactacattttctactggttcagctcacaacaaccttaactgcagatacacccaaactcccagtttagctacgcaataagtctgttcttccaaataatacatgcatacatttagatataagaatgaagtaggatatgttcatttgttgtcaatcaagttttccaatttgaatttacactcctgtatttatgatataccatttattttcagggagtttcagaaacaagtaggagatggttaccttcgaagtattaaaattgttttacaaagagcttaagtgacatatgcaaacccaaaatcacaaaatgaatcgggaaaacaagtccttgaaaatgtaataaccagcagcagagatttttttaaatgaatgttagaatgttctggaaagtgttagcagctcttcaaatatgtctgaataactttgaagaatggataattattaacagaatttgcctgttaaaagtacaatagcttccacagtcccagtgaatggacagtttttacaatcaactgaaaaatactgagatttgacatttgagaactcaatcagaaagtagtcttggaacaaatataaaatatcttacctggatactttccaaatatgcataaattctagaagttgattcagataaaactgactgtggtcctcttcatgctgtagacagcagaatatattaatatttattgagtgaataggaatgagtaccagataaaaataggtccgtaacttcctgctgtcattttattcacctattttgataaacctcattcatcgcttttatattctgtctgaaagaccttaaaaggctctccttaactatataagccttttcaaaagtaaaacagaaagcttggcttttgttgagaataaacctgaaagatagttgaaaaacatcgtggcatcagcaaggtcaaacattaaattcttctactaagtatgaaggcagattttttgccaccagttctcccacatacatgcacattttgttttcacatttaggccatgagtgccatggcagtgtaaagcctgacattttgccagatgggcgggcagacacataatcaactccttcatttttcagcttcaccacatcttgccgccaaaatgtcagtgtaagagagttttccattccatgagcactaaattatgctaattaatgacaattactggtaggtataaatgttaggagttggcattttgttttcttcctacataagcatgaactacttatcttaaaatatcatgcctatggcccatatgtgtgtgctcacacacacacgcacacacacacgcataccttaacttcttgaccagctctcctgcaacagggcattcatgaaaaccctttgcaagtatgcagagaatgcagtatgtctcaacataattgcactatttcaccacacggtggcattaaggttgagatctgagtgggtcccttaatgcctagggtgtatgtaatcttgtgtgtcagtacacacacaatctatttttaaaactgactattagaaattcggacagaaaacatcagaaggaaaaccttcatatggcccaatgtcaaaggtaaattaatttttatattggtttgttttgtgaagaggaagaaggaagctaagttaggtggaaagaataaggtcactgttataaaacaatattttgactacatgctgtgaaaaagaaacactatgtagaatgactgagaaacgaagatgtgagtcttactttctagaaatttacatatagagtcactgggacagctaaaataaaaagtgtgatggtgacaagacaatttttttctgcgacagagaaagctaaactgtagtcatgaaaagtacagtaaaagaagagggaaaataggaaagtgaaaaacagtaaaaataagtaagatttgaactgtaatatttggcacttgtcttctttcagaagttaaaaccaaagcaagaatataaagaatatacttagttacatctttctatgaagcataatcatattcatttaaaaaccaatttatttggtttccagaaatattttcggtattagtcatagtaccttttgctagaaaaawtttttaatttaaataccttcataggctggaggaaaaataactttgtaagatacatgtattggaaactttttttgtcacaattattaacagatcttgaaaaaaaacaaaagctggaggaaaattcctgtaattgtccatgaaagatagtgtgcacttaacttttccttaaagctgaggccataccttggccttaaggaaaaaggaaaaagttaaaatttttttttctcatacaaaaatctattgctgtaaatgttcgtgaatgttcccctgagctataagaaaatcttgattttatgattctacaacgttggcatacttttgaccaaatttgagatagacaaaaagggaaaccaatttaaaaatattaagttattcatagctaatcaaggtagcagctttaaaattttgaaaccttggatgatttctaaagatcatcaacctgctttttattatttatttatttttttttgagacagagtcttgctctgtcgctcaggctggagtgccatggtgtgatctcggctcactacaacctccacctcccgggttcaagcgattcttgtgcctcagcatcctgagtagctgggattataggtacacaacaccaggtttggctatttttgtatagatggggtttcactatgttggccaggctggtctcaaacttctgacctcaggtgatctgcccacctcggcctcccaaagtgctgggattagaggcctaagccactgctcctggcctgcttttttttttttttagaacaactttcttgttctcttgaaatgaggattaaattatactatttcagtataatattatcaagtttaaaataaaaatattatctaagatgaattgagctttgcacaattagaaagctctaaagtatctactgcgaggtaatggtatcaataaatttaatataatgatgatagtcatattcctagtattatgtgaaaaaaatactatcaagacaattttacagttttattagaaagattataattgttcataaatgttttacttacagctgaaatcctgaaaatcacagagaattttgacaccattataaaaaataaaactgagagaacatttgctatcttcttatgatgtatatataaaattaaatatacaaatcaagggttacttatgtaaaatagggcaattcagataatgaagatgagacacaagttgataaactgtttcagttatattaagttaatcaataaatcatatacatcttagaaagaaaattttataaagcttacctcaaaaccaaaccagtttacttttactttcttgttacatatagaaatttcaattaagactaaaatttatcctgctctatgagtatgaaagcttacaagaaaaattgtgatatattaaaattgttgatatatcaacaaaagtcatgatactgcagtgtatatactgttttgacataacacacaaatgtccatctctctcaatatttccaacacagtgagtaaatttctaaatgttttaatgcaaattaatgttaataatgttttagaatttttaattgtaaagggccaaaatagcacacagtgaaacatccaattttatgacgtcaatagctactgcttaggtagtcatactaagtgcaggcactgacttaagctcttcatttatatttctcagttgagttctcataataaccacattaagtaagaactgttattattcacattttttgatgaagaaattaaacagagatttaacaatttgcctaaaagtgaacatttgaaatacagcaatatgaaaccagaatttttgcttttttatagaaggccaaatgaacaaatttaatattcctcgtttctaacgatcagagctaggcctatgtgctccaggatttagacagaaaaacaagcactatcactagcccctcttacccatctgcattaggtggttctctcaacttttagagctggccatattttctttcagagtacatatctccataggacttcattatatatatttgtttattgtctgtctctcaactaggatgtgaactctacattttagaaaaggcaagtactatgaayggcatgtaacaagttttatttgttaaattaatcaattgttactagattgtatatactgtataaagtacttatcccagttcctggaagtaaatccttaaagttttaataaaatgtaatatcttcccctttgaaatgtaatgcgaaaaaaaaaatcctgaaactatcaagacttggaccaggcacagtggctcatgcctgtaatcccagcactttgtggggctgaggcaggtggatcacgaggtcaggagtttgagaccagcctaaccaacatggtgaaacccgtctctactaaaaatacaaaaattagccaggcatggtggcacgtgcctgcaatcccagctactcaggaggctgaggcaggagaatcacttgaacccgggaggcggaggttgcagtgagccaagatcacgccactgcactccagcctgggcaacagagcgagactccgtctcaaaaaaaaaaaaaaaaaaaagaatcaagacttagagagatggggatacggaatgcctttttcatattctgcatggaagttacccctgctttttaattggaaatcagtgtcagttgcatcccctgaatccctgagggctgagatcttattgctattgctcactactctacgcattagtgtagggcctaatacacagcagttacatagcaaatacttattgcataaatggaggatatacaaatatacaaatacatttgccatcaggtgtattatccattattttattattattattattattttgagacagagtctcgctctgtcacccaggctggagtgcagtagcgcgatctcagctcactgcaaccgctgcctctcgggttcaagtattatccattttaaacaacagcatcaatattagcaaaagttgtggatgagaaaaggcatttatactctttgcctatgagttgctgaattatccaagaattggtgatatttactgtaggatggataagcttgtaagttgaaccatgaagcatcaaaaagaactatgtaacttaattcccactgtgattcaaatggcatattaaaaaactggcatttstgatgagaactacacattatacacccagagataacaatatgcttgtccctggacatgacaacaacggtgatgacagcaatatgattatctcacctttttttctcaacattgagggtaatttgaagaatcttaagtttaatattgacggagtcagctacactatgtaactgcgcttgctgacattaccatatagtgtgatctgtagccacatagttttgctctgatctcatcacccttatttactagctgtgcaactttggatgatttaaataatctcttaacttttcagttcttttatttttataggatagaaaaatagttgtatttattacttctttgctcttgggttactgtcaattaattcatttaaagsactaagaacatcacttggcacctaatatayaccatcataatataatatataaccatatataatatggttagttattaatcacckatcatgccccagactttgagctacatggatattgctgtggaaaaaaattacacacacacayacacacacacacacacacgtggatgcatgaagctagaatttttgaccaattaccttgaaacacacatccaaaacctttgagaatatactgcaaattctgagtatatttcccatttaagttggtaggaatgcatgggctctgaagacccactgactgtgctcaaatctgtacttctctgctcgtcagtttcatgattttaatcttgggaaagtcttgatacctccctgtgattccgtttccttatttttaatagtgtttaccttatagaattattgaaaagattaaatgtgatagaaatgttaaagtctcagacatgtatgtatgccctatatcagaataatagmgttacaagagtttttaaacagaccttaatttacatgagtctgaaatgttagtgatttgttaattactaccgataagttattattttagcagcatccaaattagaatcatacattttatcttcttcccccatgctccaatgaactatgatgatttcagctttttttttctcaacattgagggcaatttgaagaatcttaagtttaatattgacagggtcagttgcactttataacattttttttcctggagatttcagatgtatagccttggagctgtcaacagcagctaagttgagcacaagatccaaaagatatttctaaacaactgtcttttggcctcattatgttatgttccacattgatatgttgcaacctaatgtactacctgaaattttcttatgatgaaacacttcatactagaaaaaaaagaaaacatccactggaaatctgttacttaatataaatgacagggtgagaggatttttgcttaaagcaagtaatttgaagattctacagataaaaactgccataataccaaagttcactgcatactgtgcagtttgaattggaagtaactcacaacatgacacagggaataaaattcgcatctaacagcatgaaactgtatcgtcaaagcacagtcatccttttctaggtagctttattatatatattatgaaagtttatctgtcctaatttaagctgtgttgacataaacagtcttcacagaaaacaagttatttttttgccttcagtgattcccctttacattttctatttcatttacttctaagaagatatgtgaaaagtataaatacgataaccttaataagtgtctcacagatgatttttgaaagaaaccaacagatttgttatactcagygtattagtcagcctgggctgctataacaaaataccagagaccgggtggcttaaacaacatacatttatttctcttcgttctataggctgcaaagtttataatcagggtcagagcccttttcctgtgtgcagacagcttccttcttgctgtgtcctaacctagtgagaggaaagagaaagagagagtgatagaaagagagggagagggagggagaaagaagaagacagagagaacgctctaaacactttttataagggcacttaccacctcatcataagggctctgcttttatgacctcatctaaacctaaatacctcccaaagacctcacttcctaatactatcacccagggcctcaacttatgaattttggggggacacagacattcagtccataacactaagattgcagtaatgtgttcatgttattgcatcagttcaaatcattaacaggtatttatatttagataagatatttcatcatgtttcaatgaatatatttaaataaacatgtattaattaagctatataattccaagttggcaatagttcaaaaattagaaatattgtccttaaaactgtcagtttgccaattgaaaccaatgctaagaaartcttacctttcgagatagctttcctggagcttccctacttttctgcaggtggagctgaataacagatttatctttttgaaacattttgtggctccccaaacagtggtcgctgaaggaggaaaaaatgaacacaatcatatcctcccataatattcccaaatacatgttttcctctctgacttcattttcttttatttttggaacttagtttggtaaaaactgagtgtgtgcgtgtgtgtgcgtgtgtgtgtgtgtgtgtgtgtgtgaatatatatgcattacatatttttgtgtataaatgaataatatgacaggaaatatagatatatagatataaatgatgaaatgtgaaatttttatgtgcattaataagttagaaaatgattaaatgattagacacctttagaattatcacaataaattttaacaaataagactttgcatattctaagttagttttacccagccatctcagggttcaaagctgatgacagcatgcttctgggtggtctaactgatgccattatgtctgtgtggagaccttgtctcaagaaagcattgggatgtggtgaaaatgtcacgagctttagagacagatttactagctcgatgaccttaggaaggccaattaaactaaaactatctgaaacccaatattttctcttttagagttggaatagtaatgtctacatcaaagggttagcaagcagaataaacaaaagaattatacctatttcagaaatttctactggcactgttatatttctttgtcttccttcctttctctttctttttttgcctataaatatttatcaagcacaaattaactgaagagcacaatgaattactattttgcaacatttttcttataaatacaatttgattcttctgtgaaatgaagggcttctactatataagtccctttacagctttaaattttggtatctctggtgacttttagtcattgagaaaaggatgagttatgttaatgcacattgtttaaaggaccttaaatatgaaggatttcaggaggaaaaaagtatattagatacttgtaatccttaagatgataattttacttatatggaaaattcagtaaatagttggcatagcttgttgccaacaatgccagacaaatagaccattaatctgtaaaatgaattaacaaaaatgtatagaattatgtagaataattatatagaatttactatactatatagtaaattctttttaaatgtttctattttaacgttgtttttaatacttaaaaaacttagtacctatctgctagccaaaatggtgaatgttagtatgttcatgacatatgttcagtgcctattcctatcccaactgttagtctaatctagattcttgtccctggggtatccatagggctcttacactgttcgctgagttgttttcacagccaatctagacaaaagtcatggccactgcttttcttcacttgttcttggaactactgatttctccttcctccttcccaaaggtttgcttcaagggccagcctcacaatctatcacatgtaatcaagttcctgtcctttcatctccctctactcaactcttttttccatgctaagagctctgtttccctgttcctgctatgggaggtgacttaagaatagtgacccatcttgctttcaaagattccttttctctgtatgttgaagtcttgatactgcactctggacaccagtgcaatgacttcagcctcatacatggctactgcgtgcttacttaaactgacyttctttattttatccacctgygtgtatacttcttcctagaattgccagataatatacttgatgtctagtgtgttggttaatattgagtgtcaacttgattggatcggaggatgcaaagcattgttcctgggtgtgtttgtgagtgtgttgccaaatgattaacatttgagtctgtggattgggcaaggcagactcatccttaatctgggtgggcacaatctaaacagctgccagcatggctagaataaaagcaggcagagaaacgtggaaggactagactggcttagcctcgcagcctacatctttctcccatgctggatgcttcctgctctcaaacatcagattccaagttcttcagctttgggactcttggactttcatccacagactgaaggctgcattgtcggcttccctacttttgaggtttttgggactcggactggctttcttgctctttagcttgcagatggcctattgtgagatctcaccttgtgacagtgtaagtcaatactccttaataaactcccctttatatatacacatctgtcctattagttctgtctctctagagaaccctgactaatacatctagtatctataaattacagagaaacaatgagtgaatatttttagtatatatttcatgtagtatttgatacatatttacactaaacgtgtgtgtatacatgtatgtacacatatactgtagtattaaaatttattttcacctgtttctttgtgtattttcatgcacacacacacacacacacmcccctttataccatataggtgtatatatgtgtgtgtctatctatatagatagagatatatagatatagatagatacatagatataataccttaatactgtttaggtgtgtgtgtatatgagtgtgtatatatatacacctttcatataactacatataaaatactacatgaaacatatactaaaaatatttatgactttgaaataaaactggatattctatatttttatttgctacatctgccaattttactgctttcaaaaactaggtcttagttctttccttacctttgcttcattgtgtatgtcctcgtgtgtgtgtgtgtgtctgtatgtgtgtgtatatggtggaatctggcaccataattatcagatttggggtaataacagatgttgaaacagtctttttcctctatgatttttttcaaattacattataggaatatattctcatgggatacatccaaattttactcaactctacaaaataaaagagataagaaaaattcttccctttccctttttctggaaaaacaattaccaagagcttattatactttctttgagggctgaaataaataggtaacacacgtatttctgttatgaatgagactatcttattttagtcatgtctctagcctataaattccttttaattcatttttgagtctttgacttttaatcagagaagtctcagctatccaagttatagtaaygccttctgctatattatttttggtttatattaactatattgtttcttttagaattatttcctttcatttgttgggtttatttgagccatttttgagtctcttctttctctatttatctttagagccttgacattcataaacatatttttactttctggtggtcaccttttttaaagaaaaggaaacatatcttaaagcttttctattgcaatctcaatttaattactatgtgacagacactcaaataaaatttagagctttatatgacttcaattcagttctctcttagaaccttacaacygctcaagtagagatcacttcaaatattagctccagattcttttatcacttacttgatgaaatataaaaagtagtagattagttgattaaaaaagttaaagttgggaattataaagaagacagatttcttaaaaatagtttatttttaaactaaacgtaactacgtagcctctcactagccaaagttctgatattagcatcaagtctttgctattggatgaagggtcagttgataacaattttgtgtcatctttctgatataaaacaaatctataagtaattatctttaattgcctattgtactttcttaaatgtgtagcaaattcttagagtcaaagaaaaacttgaatggaaaatcattttagatttttataattatttttctagtctaagttgtttcctctacattgaattcagcaacaatagattttaatggctctcctttattaattatcttttaaaaatttyaacttcattttcatagaaacactgactttctttcttcactcatacttcatcactctgtaaatacttcatttacttacctaaataaaataacaatagaactggcataaaaaggttcaggaataaacacaactgactctaggtacgtttacaactcaacttacagaagcaaaagtgcgtgggcataatatactttatagtaaactattatgctagagaagtagttatcaaaatgttgtctacaaaaccctggagctacaagagacacttccagggtgtacatgcacttgtaggaaataaaaatcagtgtcacttaaaaatatccttgataaaatggtaaaaattattaattttgttaratctaaatccttaaatacatgtgtctttaattttctatatgaacatataggaaaaacagttaaagcacttctgcatactataatatagaagttgtcttcaggaaaagccctcttgtacttgcttgagtggcaaaataaagaagtaacttttttcatgaaacaattttattacatgagagaattacaggcaaactgtggttattcagacaggtgtttggcagtcaaaaatgaacaagctaagcttgtcactttaaggaaaacaacttcagaaataaggattttgtaaaatttatattttccactatgagcttgctggctaaccaatacttatagacttttctcatgagaaaaatgctaatattaaaaaatgaactttttgatattttatggtaaagtatggcaacatttggaagatctgcagaatccaatggacatatttgtctaaatgacaatccatgatgcttcaaatcttgcatgggtaaaaaaagatttatcaatagggcaagacagaccaatggactctaaatagcctagtgtgaaaagtattgatttttttttatattccacattgtatctaaattttaaaagactattacttgttgattttggtgtagtatcaaagaaagatgttcacaattatctgaaaagactactaagatatttatcttttccacaaaccatatttgtgtgaggccaaattttctttatatacttccactcaatcatcatagtgcaacagactgaatggaagagcagtcaatggtcttaattaaaccagacatttaaaagatttctaaacacataacagtgctacattcctcacaaattatttttgttttgcaatatatagtatttataataaaaatattttatgtgtatttacgtgtaataagtttatcatttttaattcaaataataaatgcatatttaaaaaatttctcaattataatttccaacatggtaaatattgatagacaaagtccacacaaattctttttggggtactcaacaatttgtgagtttaaaggattctgagaccaaaatgtttgataactactcttctagaacaaacaatgaattctgggccttaatcattctgttttgtaaaggaaataaagagtgttaatacagcaagtcaagcaagcagagatagataaaggagcctctactaatttattttcttttttttttactatattttagagctttttaagtaattatgttaaccattgatctatattccatagggcttcattgtttattttgttgaagtacatcttcacataattttttagagagataatttatggacataaaatgtttttatttctgagaatgtctatttttacattgtccttgaatgctggcttattgttagttccagaattctaggtcaaattattttcataatataatattgtagtagaattatcagttaagattaaatctctgctgttttttaaaggacgttagagtttctaataaccgtcacactttctaagagctgtgaactactcgttttaccattatacgtggcaagaccacaattttgatcagtttgtgtttaatgatatagagctatgctgtctagtatagcggttagtgaatacaagcagctactaatcacttgcaatgaggctacttttaattaagatatgctataaatgtaaaatacacactagattttcaagacttgtcatattaaataatgtgaaacatctcaatgattttctttattttgattacatgttaaaatgataatatttgaggtatattgagttaaagaaactgtagtattagaatttatttccatgkgtttctttgcatattttcttagtgtggctagtagaaaatttaaaactcttctgtggcctacgtgataaatttgttaaatggtgctatgtagagaaaatgaaaaagaaaagagagaaaaagcattaaataatagaaagaagggtgggaatttaataagtaagtgcagtaaaaaatgaatttttatttgagagttctagatatcaaaaagggtaagaagaaaggttaccataccaagagaaagagaaatgaaaggcacggaccataaggtgggtagtgtggagagaagggttgtgctctaagaaaaggccacactgggaattacaatgcttataacatgagcacaggaattatccatttaaggttgtacacaccaggtgtttttctcagtctggtaacattccaaatatgagcactacctatgttttatttaataatcatctataaaacttcagctgttaaatgaactgaatgtctgtgatacaataaaaagtttaggctttttcttcccatatcctaggaaatcaaactttctgtatattaattatttattctctctacacatatttgattctatctatctgctagttactatcttaggaactattatgagtatacttgtcatttaagatgaacactaagaggctgaattctagcaccataattacccttatttcctattcctaaatagctcatgttattttaaagtatttctgaggcaatatgtttatataaagagagattaatgaccttaacaccaaaaagtgataagtactcaaatttgtcttatgagcaagtaagcatcctagataacattcaaactatgaatattgattctcattgccctagccgctccttggaaacccacatttaaaagcgatgctctttcattggaataaatacttacgcttgttttatataatttgaattaagctaaaatgttctttattcttacatgtaagaagtagtcacagaggtgtattgtgaaatattaaactcatgtataraaaataaacgatttctatttgattttgtaaatattgaaaaccaggattgctgacagcttctgaaggtatttctttaagaaaattcagtaactaagctggacttaaaatctttgggataactaagtcagaaatgtaaggtgaatataacaaaatattaaaataatattagtactgtagtactgttcagagtatttttcagctagttatgtgtatgtgcacacttggcacatgtacacacatttggtatgtgccccttcaaaatttctacaatgttaaatctgccatatccttaatttgagtaaactggtctttgcaactaataaaatagccctggattttgtgctcaaagtggtatttggagctgactcagcatagataaaggtcagtgatacgttgtttcactaaaccagtgcttcttgartttattgttattttgtcttcaagtgagctacsaataggaaaagtcaaactttatgacttttgaagagacaagaataggttcaatcctaaaactagggcttttaggcatgaggtggttagtagaggagagtcaagcttttgaacaaaaatcctgtatgggacataaattgataccaacagctaatactcaagagggatttggaccaaggagatctgaaactttctattcaaatgccctatttttcttaagacttcccacaagcctataaaaaggcaactatccctaatgcctcctcactcaaatatggttatttttcttcgtacatatagtacatatgcatttcttaaaattcaaaaaatggaacattctgcaaagaagtttttttttaatctggaaaaaagttttataacaactctcaagtttgcaacgctctccctactaagtaacacagtcacaaaagacaagtagtaacataactatataaatgaagttactaagaaagtcggtaaaaaaaaaaaagataacaatggtgaaactgtaactttctttctttcacaaaaaatatatactgagccccaaggagctctttttgtggggggtatggtatgtgaaatttataraatttagtaattataccaggagatcaaatatgcagacttyattctatcctaaggttttattattgttttttcccacaaaatctccagaggagaaacatcctactacagactttacaaataaaaaacaataaatgagtaatgttttgtcttattaaggtgatttcagctaatttgaagaaatatgtaattcaaaaattctctaatcactttatttaagaaaaatggagcattgggtcatttaaacttttatcaattgaaaattaggaagatwtaataattcttagctttgaaaaatagacagtgcttttgggtaacaaaaataaygtgacagctgcattttggtattatacatctacaataatattaaattatgtacctactttcacatgtaatttgccatgtcttcttggaacactcttgcaacagcttcgagattcctttgaccaagtttattagttaatgatgcttgtgcaattcagcttttaaaaaacttggggctgaaatatgctgtcatttttacaagtagcttttaatcataataaacaaactttatttagcacaaggtctttctttgggatttcactctcaagtgaaggtatatacagagtatctacatatgaggacatttgttctagcacagaattattgaattaagaccaaatgcaggtttgtatggtgtgctatttttgtggtcattagctatttactgaagatgtaaaccaaagttaattatagaatattaggtgaagcactatgaaggagattaaaaaagaaattaaagtcattcaagaaactctaattgaatgatttattaacagaacacacttttttactgtgtgtgagatagctcaaagttatgatatgttcctttctatcctcccacatggttctgtgattttataagtggaggagtagagttatgtaaaagagaaatgcactttatctatttctttgctcaaagtaagtcttaaaagttggaaggaattttaatatttgaagtcttaggctgtaacaaatttgctggaagtaatcaattygttcaggtttgctaagtgaaatccttaacttcactgagaagaaaaaagactcttcttccccagcaatatatacaatgcagttttactgctaatgaatgtaatctattacttaaaactgtatatattatgacttagcctttttctcactggtaattaatagttttatttttactctgagtacaagactatttcaatttacaatcaaatgtttaatgaacaaattaatataaattgggccgggcgaggtagctcacgcctgtaatcccagcattttgggaggccggggcgggttgatcactagaggtcaggcatttgagaccagcctggccaacatggtgaaacctcatctctactaaaaatacaaaaattagctgggcatggtggcatgcacatgttgtcccagctaatcaggaggctgaggcaggagaattgcttgaatccaggaggcagaggttgcagtgagacgagattgtgccactgcactccagcctgggtgacagagtgaagactccatctcaaaaaaaaygaacaaattaatataaattgtcatgagattagttagaacttttttaaaatatagaagttttttgaaaaggattattttagaattttaattaaaaggatttaattttgtaaaactatttttgtactctaataaaaggaatgcatcgtctctactaggagagtcccagagagaaaaacaagactctcaagtagataagaagatcattctaatcaatgtgggtgatgaaaaaagaggtaaataccaccttcttaatttgattttaaaatatataactacttccaagtaaaatttttaattactgtagaatttcttttttttttaagaatatgttttcagcactcaattctaacattccttgacaaccgtcaattaaataataaaaaaattgtttcatttaaatcaaacatataaaatttgaccatcctgtaagcaattggccgaaacagaatttttaaaaaagactagtatttactcaggaggcatttmtggtttactactgacaatgcaatgattattcagcaaaagcttttaagtacagtaaattttattgttttacatagaagctaataagaattatttttaagttaaattagacagaaagacttagagtaagatttttgagataagaaattacttaggctgggtgtggcagctcatgcctgtaatcccagcactttgagaggccaaggtgggctgatcactggagatgaggagtgaacctgaccaacatggtgaagacctgtctccactaaaaattcgaaattagataggcgtggtggtgcgtgcctgtaatcccagctackctggaggctgaggcaggagaattgattataacttgggaggctggggttgcggtgagccaagatcatgccactgcacttcagcctgggtgacagagtgagactgtgtcagaaagaaagaaagaaagagagagagagaaagagagaaaggaaagaaaggaaagagaaagaaagaaagaaaggagagagggagggagggaaggaaggaagaaggaaggaaggagagagaaagagagaaagaaggaaagaaaagagaaagaaaggaaaagaaagaaagaagagagagaaagagaaagaaagaaagagaaagaagaaagaaaagaaaagaaagaaagaaagaaagaaagaaggaaagaaagaaagagaaagaaaagaaaaagaaattacttaaatcacataggttaggcccatctaccacagcctactgcatctgtgtgtaccactggggggtctgaggacaggcctgctctggtttgcactgcccctccaccccgtgcccaagcctaacgtctgggaccctgggaatcaccctgcctcgtctgccacccagccatgcatgtgcaccaagaggaagcctgacaaaagacttagcctgcctgccacatagcacccaaacatatccgtggggctgggaatcactgcatcctgcccatcacagcttgtactcctaagtaccactggggaccctgaggacagttctgccctatctagtgctacacctctagtgcccaactacactgcccaggtccttgggaatcatgccaccctgtctatgcctgaaacacaccagcaaaacatcagatggcctgacaaaagacccaccaggacccaagcatgcgaggtggggacctggggattgagctgctctgcctgcttctactggtgcacatgaacaccatcagggagctgcaaaacaggcccaaaatgcctgtcatcagtgcccaagcaccttatccagagtcctgaggatcgccctgcccacccataacattctactcctgtgaacaccatcatagagcctgaggacaagcctgaattgcatggcaccaccaccactgctggaacccattcacacaagccactgggggacttagggattggcttgcccaccttgtcactgccactgctagcaccagtgtgagcctcctgggagcctgagtgttgcttcttctctgctactttcatcattgattgtaggygcactgccaggggccccaaaacctgcctatccactcggccctctgctgccactgctggcacccaaggaagtcacctgggagcccaagcatcagttcacctgarcctgctaaatccagtgcccacataggctacccaggagcccaaagacagccatggttggtccaccactaccacactggaagctgaggtttaattcacccagtatccttgtccctagcaaagcctcaccactgcctgaactaacaactgtagcttaagccactgaggaaattacagaaatcattgatgctgattacagctaaaggaatcacaagaaatcactgctgtatttgcctagaaagaatgctgaagttgtatacccacccacactatagatgtatctgtaggaaaaagtcttcctctatgaaagcctatccaaaaaaattggaagaagtgactattacactaatagcatatatattttgtgtaaagacataagaaatataaaaagcaaagaaatatgaatcttcaagagaacacaaaactctccagccacsaatttcattccaaagaaaagaaaatatatgagataactttttaaaataatgatatgaaaaaaactcagtgagatacaagagaacacaagcaaacagcacaaaaaatcataaaaacaattcaggatctaaataagagagtaaaaaaagagacaaaaataataaaaaaggaacaaacaaaaattctggaacaaaagaattcagtgaatgaaataagaaatataacaaagasctttaacaatagactagctcaagcagagagaatttcagaacttcataataggtcttttgaaataacccagtcagacaaaaaaaaagtaaaacaatattttcaaaataaagaaagcctatgtgacatatgggacaccataaagcaaccaaatattcacattttgggtgttctataaagagtggagatgggcaaaggcatagcagacctatataataaaacaatagctgaaaacttcccaagttttgctagggatttagaaatctatatataggaagttcaaaaatccccaaatagattcaacccaaaaaggtcttttccattgcacattgtagccaaactgtcaaaagccaaagacaaagagtattgtaaaaagagcaagggaaaagcattgagtcacatggaaggaaatcgccatcagcctaacagcaaatttatcagcagaaactttacaggccatgtaagaatgagatgatatattcaaaatgctcaaagaaagaaaaaaagaaaccactctcaaccaagaatactctacacagctaagttatacttgccaaatgaaggagatataaagttgttccttggaaagcaaaaactgagagaattcatcaccactaaaccagacttacaagaaatgcttaaggaaagcctacatctggaagtgaaaaaacaatatctatcatcatgaaagcacatgaaagtataaaacttactgttagagcagtcacaaaaatgagaaagaaaaagaactaaaatattacrcctgcagaaaaccaccaagtggcagtgctaaataatgagagagaaagaaaggaacaaaagatatacataactagaaaacaattaagaaaatgacaggaataagtcctcacctatcaattataaccttgaatataaagaaattaaattacccacttaaaagatacagattggttgaatggattttaaaaaatgacccaattatatgctgtctacaagaaatgtcacytataaagacacatatagactgaaagtgaagggatgtaaagatattctgcataaacagaaaccaaaagtaagcagaagtagctatacttatatcagataaaatagacttaagtgaaaaacaatacaaaagagacaactaaggtttgtctccaataacagtgggatcaattcagcaagagcatataactattctctttatatgtgaaatagtacatacatatttatatgtatccaataaacacatacaacttatcaagattgattcaggctgtaacagaaaacctgaacagaccaataatgagtaataaataagactgaatcagtaataaaaagtctctcagcaaggaaaaactcaggatgagatggctttattgctgaattctaccaaacttataaagaagaactaacacaaattattttcaaactagtcacaaaatttgaagagggaggattattttcctaattcattmtacaaaaccagcattaccctgatactaaaaccagacaaagccaccacaaaaaataacactacagattaatgtcctgataatgaacatcaacacaaacatcctgaagaaaatattggcaaactgaatccaattatacattaaaaaggtaatacaccatgatcaagtaagagcctagggatgcaaagatggtccaacatatgcaaatcaatatgcatgatacatcatgaccacagaatgaagaataaaaaccaaatgctcatctcaataggtacagaaaaagtatctgatgaaactaaacattcttgataataaaaacgctcaacaaactaggtataaatataacatacctcaacataataatatgacaaacccaccattaacatcaaacggaatgaagaaaagctgaaagtcttttctttaagaactagaacaagacaaggttgcctacctttagcactcttattcagcataataatggaagtcctacacacaacaattgggcaaaatrtataaataaaaagcagccagattggaaaagagaaagtcaagttgtccctctttgcagatgacaggatctcatattcagaaaaacctgaagattccaccaaaaaactctgtaaactgataaacaaattaaataaagttgcaagatatcaaatcaacacacaaaaattaataacatttttatgaacccataacaaactaactggaaaaaaattaagaaggaaatcccatttacaacagctgccacacacactgaaaaaccctaggagtaaacttaaccaaaggggtaaaagacctctgcaaggaaaactacaaatctctggtgaaagaaattgaacagcacacaaataaatggaaagacatcccatgctcgtgtatcagaagaattaacattgttttgaccatactacccaatctacagattcaaagcaattcttatcaaattaccaataatattcttcacagaaatagaaaaagaatccaaaaatttgtatggaagtaaaaaagagcccaaatagtgaatgcaatcttgagcaaaaagaacagagctgcaggcatcacactacttgccttcaaaatacattacaaagttatcgtaaccaaagcaaaatgatattgatatgaaaacaaacacataggctaatggaacagaataaaaaaaaccctaaaataaattcatttatttatagcctagtgatttttgacaaagatgttgaggacaaaccttaggggaaagacaccctctccaataaatggtgctgataaatccaagtattcatatgcagaagaatgaaactagactcctatctctcactgtgtataaaaatcaactcaaagtacattaaagacttaaacctaaatccggaaattatagaacttctagaagaaagcataagataaatgttccagaacattggtgtaggcaagttttttatggctaatacctcaaaagcacaggcaacaaaaacaaaaatacacaaataggactatattaaactaaaaagctcctgcatagcaaacaaaacaatcaacagagacaatctgttgaatgggagaaagtatttgcaaactgttaatctaacaaggactattatgcagaatataaaagaaactcaacagcaaaaaaaaaaaaagaaaaaacacacaaactaaaaatgaacaaacaaataatcccatcaaaaagtgggcaagcaatctgaatagacctttctcaaaagaagacatagaaatggccaagaagtatataaaaaatgttcaaatcactagtcatcagagcaatgcaaatcaaaacaacaatgagatattgttttacccttgttagaatggctgttataaaaataagtaaataaataacaaatgctggcaaggatgcagagaaaagggagctcttatacactgttggagagaatgtaaattactacaaccattatggaaaacagtatggagattttgcaaaagactaaaaatagaactaccatgcaattcaggaatcctacttatgggtgtttatccaaaagaaaggaaattagtataacaaagggatacctgcacctccatgtttattgaaatactattcacattagccaagatacggaatcaacctaagtattcatcaatgaatgaagaaagaaagaaaatgtggtatacatacacaatggaatactgttcaattatttaaaaaagaatgaaatgctgtcatttgcagcaacatggatggaactagaggccattacattaagtaaaacaagccaaaatattctatattcttactcatatgtgggaactaaaaatggttatctcacggagttagagtgtagcatgatagttataagagcctgggaagggtatgggatggggagaggatgaagagaggtgggttaatacatataaacatatagttagatagaatgaatcagttccagtgtttgggagcacagtagtttgactacagttaacaacaatttattgtatattcaaaaaaactagaagagaagatttgaaatgtccctactacaaagaaatgacaaatgttctaggtggtggatattctaaatatcctgacttgatcattatacattctatgtagatatccaaatatcacatgtacctcatgaatatttacaatgtatcaataagaaaatatatcacacaaagaaaccacagctgtagagaaaacaaatcactggagtggttttttggttaggattgagaaacagaaaaacctgcgctcctagtaaatatttggctagagagtaataagagaaaaaattatgaagaagcattatacttcayatattatcaatatatttatgaagaaaaatactcatgtgagacggttacaagtataggtgaasgtacaattgttactccctgtcaaaaagagagatgcagggacggtctaggaaatagtttcattttctaggatctcatatctgtgctacattcaataggaaagaaaagatataattcctgtccttgagctcactggaaaggctgactgggatcaagctattggacaagagcatggaaaatgggattatcaaggactccttgctccatggtaattaaaccgggagttaaagaacagsaacatgatgaaagattttaatattttttgaatgaagcagatgatttcttttcttctattatttmtcatattgctgacaattttgcatcaagcttccatgaacgtatgacaaaattgatagttcatgttctgattctttaatttgctctgtgttcattatatattgtattatttaaaatcagacagggagagtgagagtaagaaagtgagagagagagaaaatgaaagtgagaataagaatgagtgagtcgggatattttaattgagagaaaagcttttctgatactaaattaaaatgaatgttaaataacttgcaaaaatagtatagttgatatatgaaaagggaaattttgatttgctaggaaaatcatctttttaattttgcaatagtacaaggtaaaaatgtctttattactttgttgattagagctagtttttataccaygtactgttctggaaaakaggataatttttggagagtctaagttcttaagtcattaccattcttggcttctaatatctcactacttgaaatgtgggctgtagaccggcagcataggcatcaccagatgcttgttagaaatggacagcctcaggcctcacccagacgaactgaaatcagaattctttttctaacaacatcctcaggtgacactttaaagtttgagaacacggtgttaatatcagaataattttgaaatttctatatgcattatatgggttcatagtcatatttatttacatttcccctttttcaggattttatgtaatacttcactaaccctgagaaatatagggtcttaactaatatagcaatataacagtgctatgtttgtagtcatatgtttcatgatctatttgaccattattttgaagtattatcagaaaattagcattttccccagctgaatactccaaatgaagtgtacttctataagttttagagtctaaatttttacttattgcactgttaacttattacatgctacctgtgttctctgtataaagaagagctttatgaacagatttccatgtctttaaggacatattttttagacaagttacacaggaatacactaaaagtaatatttgaatgactaatatatattcctttagatgctagaacagtagtaaatattctgcacattaaaataagttctgtcaatacaaataggctattactcttaaataatatgcaaatccttgacatacacaaatgtttcaatgtccattagggaataaatgactatattttacatatattaatatttggcaactttcctatcttaataaaacccaattaaataaattttaatatgattaaatgactatgaaaacattaacatgtacatttattagttaaatattgagccatctacttatgaataatttacctatttaaaacartgattaaatcaaggtgtgtaaattttctccacattatacttttccgaatttctgtctctttaatacaattgctttctggatggcattttctactgctaaaacttaatgcaaatatttgacaatgttttgctctttggatataatgttttggcatcaagaaaagtctagatgtacatttggaaaactacacattcaaaagatgagtttaaatgagtattcaatataaggttaaatttactaaaatgctttcctgtgctcattggatttactgtcaaaattgtatgttgggagaaggtagcagactagtaaatgagtgtgttaataagttcaaataaaaagggaaaagggaatatctgtgagcttagtgcaacaaaacatatgtaatttcatataaatatttattattttgtttatgtataattatttattataaaataataattataaaaatgctattgaaatattattttaatacaatatattttgttattaaaataataaataataatgaaatattatttttcccacaaaaaggaaaatwgtcttaaggccattcactgttaacactgcacagtaaagaactggatttactaataagaatgtcatcaaatttatcaaacttcccaaaagataatttcaagcacattcatgatggaataataatgacagtgacaatgagaatttcaaaggaaatacatttttacttccatgagatgttttcaatctttagatacttgtagagatgcaaaggggatatataaataggratctactgtattaaacgttttagtctttaatactttactgtttagaataactatgcaataccagcagagaaatatttattttcttaaagctgtattatttgttcaagactggtctgtaggaatttcaggcaaatggttactttggtaaactaaaagatgatttttttttatcaaataagtatttgaagttgatatactgaggacaggcttttccaattgtttttaatgagctgcctcaataaagaaatggtggtttagaacttactcttccataaaaagtaagttataatgcttatacttaaggcccctgtgatttaaaaaaaaatcagtatttaatcaacatgcaagtattattctaaccaaaaaattacttatcaccaaagaatttatttacttagctgtgatcagttctaataagctttattacaggtaggatgagcaacttgtcctagtttgggactttactggttttaaaactgaaattcctacatcctgagggctacctccaagcaaactgagatggttggtcaccctagtcacaggtcatttaaatatttgttttcataagtagtcataatataaaatcaagaataagattgttaatatgatttagaaaatttcaaattcactgcaaagggggtaaaattgatttaattatataagactataatgtttgtgtaaagtctgtttaaaacaaaaccataaacaagtggtaacttaatatttacagattataatacaaccaaaatttcataaaatacttacttttgtaaaaattcttcagagccacatacacttagaatatgatctttggggagtagctggtcatttgtgcaaaaatgcagaatttctgcaattagatctttgacaagataattagctaaagaaaaagaggaataataaaagtcaataaaagtgtatcatatactgactaggaaaagtttttgagcacaaaatatgaccaacacattatgaaggattgtaactgtctagcttcatcaaggggaattaaattgagattcatctgacttatcagactggttagatttaaagatatttggggaaaatgttgtttgcaattcctttgatcagttctgctttcatgtgatataacaaagctaggtattgtgtttctcatgttaaagcccttggtacactgcagttctgcataaaaatctactgcagtttctcttagggacttgggaaatacactcaggaacttgggtatagccaggcaaaagttccagggggtgtttgattctttccattttcaaccaaagtgagacatattgctccttctaagggtatcagcaagataaaagattctgaattaactgcaataaatattttcagggcatttacactagttaatattcatattcatgccatgacattaagacaattctgtgatcattaagatgttcttatcaatgttctgtcactgagacatggaaataatatagatttttcattttttagttgatttatgtaaacaagttatttcgcctttttgacctagtttcttcatctgttaaataggatttataatagcacagtttattttcttcaagaatctggtgcgaagctatcataaaaaaatagacaaacgtggccagtaaatttaaaagtgttatacaggttatattcactctgggatataatgttagtattaatattaataatagctatattttacggagcaattactctattaagtgctttacatgtcatttcttgattattgtacctattatataggtattatatcccaagtttcaaagatgaatggactcattttcagggaagctatgcaattttgtagagattacacagttagtgttaagtgtcacacttaaacaatatctgtttactccaaggcctgtgcccttaatgactgtaagtctccacagttggttgttctctagactctaaacaagatctgtcagactccaaatccaccgttggttcttcttcctttcccatgtagtaattactcaaggttctagcttgaacagctatattatagaaactttaatgaatatctactctctctctccaccttttcctttggaactcaaaatgtagacatgctatagggtaaagtcatttgtcttctcatattcacatatcataatcctcccttttaagctcttacatgaacatgctatttaatagtggccagcaactgaagacaacatgacccaacctatggtctttctgattggatcaaggtgcagcatcattgatcttggccgaataatcagaatctggcttttaggaactgggagctggatcccatagagatagtgaactgtctgtagatagctagactagtagcttggcttcccacttgttttagataagcaaaggaaatgagtgatcagagagtgagaggaatatgagaagcaattatatgaaatgaaatgagatgcatacaggaattctgggctgcttgattatttgtgtttttcatatattcctaattgtttgctgaaattcatatacttgaattctataataaatccatatatatatatatatwtwtwtatwtattttttttwtttttttttgagatggagttttgctcttgttgcccaggctggagtgcaatggtgcgatctcggctcactgcaacctccacctccctggttcaagcaattctcctgcctcagcctcctgagtagctgggattacaggcatgcgccatcacacctggctaattttttgtatttttagtagagatggggtttctccatgttggtcaggctgatctcgaactccccacctcaggtgatctgcctgcctcgcccttccaaagtgctgggattacaggcatgaaccactgtgcccagcccctatattctttaaaacaattttttttttttttttgcttaagctagcaggaattggtttcttttcatttccaaccaagagggtcttaactaatataccaatataacactgctatgattggagtcatctgcattagctgagaaccttgaatagagtaagaaagaagcacaataataacaataattaataaataaaagaaaatatttaatggatcattatgtgccaggaaatagtttcctgttgatatgtagaaactcacttaatagcaatctaaatgtttaaagagctaatactgttttgcaaaatagtggactataacaatgaagtaagatactaaataactttacagatattctaaaactttagaaaagtaaaaatcctcaggcgaatttgataaaatataaattcctgggtgtcatccccagagactgaatcagtaggtttgctaattctgatggaggtatgttataccatgctactagattcctcattaaggaaatagagattctgtgtaacaatgcctattctacctcacaatttatttatatttcaaggaaatacttgttcctaatagatagaagcagccatttttactttaataccatccttatctagaatcttttgaaattcattttttaatatattaaaaacttgctatacttgctattaagcattttatagcaggaagataaaatattrtcgggtgagctatgtgaaratacttcttgaagaaaatagttttgctttcctcccttaagtattaacaaatggatccctgatgttttcttcttatttcacttcagagaaaaacagtagctaatattattttttaataacttcagactttgaattcaaggctacgtcgccaataccagctttgtatagatttgtagacttatttgcaaggttgcttaccacatggcataaaatgaagaggttgtgttgagttatcaataaaaatatgtatattaaacttggtcttagaaaagagctgatacggaaatgctgtagtagtgctccagatcttcccagaattgaaattaacatcagstgcatgatatctttctctgattctgaaaaacatatgttaagaaaaatacttaggacaagacctgcaagacacagtttaaaacatattgcccacaatgtaattttaagaaacttcatgtagtgttttgctataaaagacttaaaagatgaaagcaatcagtaattgatttgtgatgcagtgcatttagctagtccagattggtagagattgcaattataccaaaaacaagtgtaaaggactgttctttaggctttcccaggagcatctcatttgaaataattaagaattcattgtcataacatgaaacgtgaggattcacgctgaatattattacttgcttcatttacattgcttttgatgtcagagttcttcctcttggatttctttcatgcctaattttgtcaagctgcgagtcattcattttgatttagaaattttggcaaataaattctcttgttcttgtcaagtttgtaaacactatttttgtctctccattttctttaaaatttttggatactacacaactacttgaattttacacaaatattggagcctaaaagtaattcttatattctgaacaattgcttacacataaatgagtcaaagaattgcaaaaacagtttatccttggagccagaagccttgactttgaatcctggcactttcatttagtaatgttatggccagaggcaagttatttgaccaatttttttgaacaagtaaagatattaatagctacctcaaaggtttactgaggtggatattaatatctacctcaaaggttttctattacaatagaaaagacatgtaaaagatttacagattataaagcaatatacacatgtaaagtataattgtcattatatgttaccatagcttgattccctgtgatcagtgttttatgcccacatgtagaacataacatgaagatattttcaagtggatatttaaaatgtttctgagggtgaatatgaaatcttgtttttttttatgttaactatgctgacatctaaacctcatggttctctacctaaattgcagaaactgcagttaattttgcacaaacctaatagctatttttgtagcactaaagctttattccatggaaacatctcctccatcaggggcctggcaaatgggtaagtaaatacacattcacccaatggcctggcatgcatctgtatccactcgtgttctggatcccatccccttagtttctgattcagtagatctgtggagggttccccaaacttgtcctactaacaattttccaagtaagctgctgctgttgctgctctggaactgcagtttgagagccactgctcagaataaggacatgggccactcttcattgttatactctaccataaaggtctagagtccagttagggattgaggagccttatgagttagcatttatcatataataagacactcctcaatgcgtccatgatttcagcttctaccattttaagaaattaaatttaaaatacaaattcatgattcattctctcctaaacttttgctgagcatctaccatgggccagaaacttctttcatatgttatggcatgttaccatatttgttacaagaatatggcattttttttgaaagatgtggctttaaagtatgttacaatgagaaatcaaagttttggagaacctcttttgaaacagctctcaaattccatttgatcttcttttgaattaagggtgcttgccacatactaggtcctcaaacatacttatttttgagtaaatatcctgttgtgtacaaaataattatgcatgtatacatttaatcattttataaatatttgccaacaaacaaattattgaaaacaaggaaagagtgtgtgaatataacttatggcttcttttcactactctaaagttattgtttggtgtatgttttagttttcatgactattatgaaataaactatttagaaaaattatattaaagagcttggaaaatgcactataagtcactggaaaatcatcacatcaagtatttcgatgtcactagtgcatccacaaaaatatttcatccaagaataagaaattgtgttttaaaaaagagaattgctggaggagctaataatgtggtctgtgagtagagttattcagaagagtgatatcttaaagtatgaagagagttctttgccatgcttagaaggtaaaataaaaattaaccatattttagacttaaagtagcaagtttctagctatgcttatcatattgtcacagtgagtagcttattcctgaaagaataaatgttgatgacattaaagaccctaatttaggaatcctaagtactatttagaatttttttcccataaactggagcaagaaattaattaaagattgaacattttcgtgaacttgaggtgatttgttttgtatctttgtgtgtaagcctttcaatccttcttatggttataggttttatgaggcagggaccttgcttttttgtttacttgtttattttaaatttgagtatctctcatgcataagctagttattagacaatgaaacagactttaaatgaatgattaaataaatgattcaaacattttatttcaaataatcatttggtagaaactgaaagcttataaaaatgtatagttattatatttcaaacaatagccaaaactgagttaaaactaaagaattaaaatatgaatgcattagtttatcttcttctcttttttttgagacggagtttccctcttgtcacccaggctagagtgcagtggcgcgacctcagctcactgcaatctccacctcccaggtccaagtgattctcctgcctcagcctcccgagtagctgggattacaggcgcctgccaacatacctggctaatttttgtatgtttagtagagacgaggtttcaccacgttggccaggctggtctcgaactcctggcctcaagtgatccacccacctcggcctcccaaagtgctgggattacaggcgtgagccaccgtgcccagcctattttttttttcttttttgagacagagtctcattctgtcgcccaggctggagtgcaatgatgtgacagctcactgcaagctctgcatcccgggttcaagcagttgtcctgcctcagcctcccaagtatctggtgttacaggtgcacgccaccacacccagcaatttttttttcttttatatttttagtagagacagggtctcaccactttggccaggctggtctcaaactcctggcctccagtgatccacctgtcttggcctcccaaagtgctgggattacaggcgtgagctaccgcgcccaactgaatgcattagtttttcaaaactttcagaaaccctagcaacagaagaggtagaactatataaattttaattgctaatatgaaatttgccttaaagaaggcatytatgtttatatcataaattcatttttagattaacaaaatatcagtgatttttttggaatatctgccagtgatcaaattcatttctcaatgcattaacacacacgtatttattcaatattctgccaatccactcaagataagattgaactatgatgattctaaatagactgtcccaggtagggaggataagtttgtgttaatttgggggttagccagaggagttagtcacttacgtcattaaacaaaaaaaaaaattcactgcaaaccaaaccaccaacaaacaagtgcatgtccaaatttataaaacatttaactttaaccaaatttttaagagaaaaacatctatttgactataaacaacaaaaacattaacagaagttgattattgaactaatttgtcaaaaaattttattttttagtgtgttcagaaattacatgactttgacttttatatgcaaaattaatcagttcagtgatgtcaaaatacacaaatttattcaggcacaaaaatttcaaagtttaatgaaataccagtactcacttttttactttgttgcaaaaagaggccagactcgtattgctgctttgaggtacttccactagctgaatggaacaacctattgacttaaaataaaatctactaaattaatataatttggagaagagaaactattaaataattctacaattttatcctgttttgaagtttcattcagacttcatttttaattttttttagattttttaaaaattgaagtaatatttacacatagaaaaatgcacagatcttaagtatataatttgagttctgtggaaggcataaaactctactatcagtaccccaatgacaatatagaacatttctttcattttagaaaatgtccccatgtcttttttatatccatctgcatatctatttggtaactactgttatttagatttatatcaccataaataatgtatatgcattcttttgtttgtggcttctatgtaatgatacacatgttttaaaattatttctgctatcacacatatcaaaggtttatcattgttattgctgattagtagtattccattgtgtaactgttccacagttcgtttagtcatcttcctattaatgaacctctgagttgtttttagctttttggtattgtaaagaaaactattaatgctcatatacaagtaattatgtgaatgcatgcttcatttattgggaatatatgcatgaatagcttgggaatatatgaatgaatagcttggtcagtgagtgcatgtaggattaaagaaaccatttttgccttatgcgttttaaaactgttattaggtacatacacatttaaatttattatctcttcctgattgaccattttagcattacgaaatgatcccttttttctctaatagtactcagccctgaaatatactttttctgatattaataatcatacaagcatttttttctgattgaatgttgtctttttgtttattttactttcaatctmtctctgcctttrtttcttgtgtcccttgtagacaacaattgagtccttccttttttatctcatttgtcaattcctgccttttgtttggaatgtttattctatttacatttagtatatttatggaaattgttagatttaagactgtcttatttatatttgtttctatttgtcttttctattttattctgttcttctgtttctcctgacatgtttattttattttatgcctttgctgcatttttagattttcttctatttttcttttttttataattcatggtactagctctaggaattgcaatatacacccttaatatatctcagtttacttagaactactattgtaccattgcatttaatatgtaagaatttacaatagcaaaataacatttaaccccttccacccattatgttattattgtcaaatagtttttatccacatacacaataaatcctacaataacatgctattatattgcttggtacattgtctttcaaaaaatttaaagtagtcatttgtattattcaacatatttactatttctatcactcttcactctttcctagattccatctggtgtcattttccttgtaccagaagtatttaatttggcatttctcatgtgcctgctagctgactaatttctttcagcatytgtttayggtaatgtctttattttgtttttggttttgaaacttatactcagtggatatagaagtatgttttattttcttttaaagaatttaaaaatgtcattctattgwctctggcttccattgttttgagtgacaagttttctttcattcagattgttgttccacygtgtgaaatcttttcttacatttttgcccccttccctaattttctcttttaattttcagatgtttgagtataaaatgtctatatgtggctgtctttgcatttattctatttgggttgtggcgagcttgttagatctgtaatttgatattttctatcaaatttgaataatttcctgaccattatttcttcaaattaattttgctccctatttttctttcctcctgttagcattccagttgtccacatattatgtttcttgtctcataagtctctgaatccctgctcatgtttatgtgatccctgtgttttctgtacttcagtttggctaatttctacagttttgctttcaaattattattttttcccctgttctttcctatctgttgttaagcacatccagttacttttttattgcctatgttttgtttccagcgctggacttggcctttgtttttgttcctttgtttcttgatgtttctaatttcctgctgagatcatcactaggctagccattatgaacttctttaactttatctacttgaacatacttttaataaccaatttaaagttcccatctgttaattccaacatctggattatctcagaggctcttttgactggtagagttattttcttgagcgagagccaaaattccctgcttctttacatatctatgcatttttattttatgttgaattttgtagatggcacactatgaatcgttaagtttttttttcattggcaggcagttaaaatccttgtcttatttgccttatgattctgaatttttgttgttgttaggccacatctattttggttgatgtagcattgattttagagcatgagttttactcttaagacatggctttgtagcttcatttgaatgcctgaagcgctcagctcagtctcttctctaatttggcccaaatttctgcgttgtaacttcaagtctgtgtaattaacacaatcctatccaattctcagccaaacgctgacattatctactaaggcttgcaagcacatcccaatacttggccaagccgtaagtcctctctctacttctgacccatacccatttcatagctacctcttctttagcactctgcttgtcaaatcacagctgcttctgcaacttggaactgcaggcactgtcttcgcagtcagtgatactgctgctcaaattgggctccagcagcctgcatagcagcatgaaattaccctcaggcacagactgagatgatcacagggcttgcttttctcaaggatttatgttccatactgcctattcaacaccttcaatcacctgattcacttatttcgtctaattgtatagttgttttgatgagtagggaaagtttagtagttattacactattgtgatcagaactagacagccctaagatttactgaattttaatttagatcctttgaggtgctacctcttttgcaagtgaattcaaatgaagtagaattagatgtttcttttcctatgcacttactccacctgttattttactatgttgccattatttgtttgcaagtaaacatgagcaatatgctattcctgaattcaagtatcatatcttttcttctttgcattcattctggatagcatatcacaatatgttttaaggatttgataaatagttgttgaataaataaagaacccttctgcctcacccaggaaactgcagctgcaataatgtttcttcttttttaagtcggaaataaatattatttactgctgattttactttgtctagactcaagcagagaaataagtagagaaatcttcaaatacagaaaaaactctggttactaaaatgattggaaagctagtaataaaagcattaagatgagtcacacaatgaatacttaatttcctacccttggaatgatctcaatagaagttgcctgccaatcgtataaattaggagactctgggtaaaggggcattttttcctaccaataatgatataaagtttcaaatcattacaatgtgactcaaaatataatgtaatgaaacgtatttgtgtttgtgtatgtgcattaaacaaaaaacagaaaatattatcagttaaaccttcaactctgctatttttatcaatgaaatgaaggtaccataactaaaaccaagtaaaattttataatagttttgatgaaactggaactggaactttatagatgattttttttttaatttccctttttctcagaaaaaaaatcattaatacaagaacacatcatttgtgaaaatttttttcaaaagtaagatgaatagatttccctatttaagtttagttatcttcattaccaaattaacccaatacattattgaatgattctttcagattcatatttttacattgacatgtattatacttacctctatattcttctgccatgtactttcccacattccgggttgaagagagcctttcaaaagcatcaaagatggttccacaatgttcacatgtccactccttttattctcttctttcggcatgaagtcacttgagaaggatgaatttgttggaggaatgctactttcaaatcctatatggtagttatgattttcattttctaattctttctctagattaattttatccaaacttgtgaatgatrgagctaaaatactgaatctggaatcatcagcaccatgatgttttcctatgcttccccaggagcattctttattcgtattttgaggttttggtaacacagaaggactaaaaccaattgctggtgctttgctaacttgatgccaggagagttcacggcttttagaagtgaattcattcaaggatatttggtgtgcttcatttaatgaatgccctgttgagtcccattttggtgcagtgggcacaaaaaaggtgttttcatcaatttcactctcgtagtgtggaattttgccactgatctcatctactatctgatcaaaacccagactgacttggctagaagaatggggttgatttacaaagagaaattcttggtgttcatactgcttttcgtgtgattcattaggatttggatccgtttgccaagaatatgccattttttattttatgtaactgagagggttgactctgctccaaatatctccttgataatacaaaagaagatagaaattttcctagaaaaagcataaaatgaaagaaaatatattgaatttgaaagaaaagagcttgtaagacagatataggataaataactataactaactgttttgtgggcttttttttagcaagtgaaataattccttaagtactataaaactctatcagggcttacaacattataagtctgaaaggaaagtattgactttggatagactgacaaaactcctgtgatagaaaaataagttcacgtcaattttaatgaaagtttcatgagtctattcaaagtcaatattctctttttctattgaatatccacttatcatttgactacagagggaaatctataagcatgttggcatgctaaagtctctttcrtattagctaaacagtctcttcttgaccagcaattaccccatccatagacacagttttaactcttttctacccaccacaactaatcaccttaatatggttagctaaactttttttcccccaaaaaactcgaaataattgcagagccttttatacttccctaaaactactaacattaaattcatcaactgactttatgttagtaaattcaaaagacagttttccatcctttttgaatttatctcttcacaggatttgataccgttcaccatacttaaaatttcttgctttctcactttggctttccgtgacactggaatttctrtctttctgtgtttgctctttctcaaacactggctttttttttttttttttttgcctattatgcattttccatcttatccttgtcagggctttttttcttccctgttattcttttattgtaaattatttcatacctcctgtggtttaaattaccatcccatccatttgtcaatgactttaaccttggccactcttcttattacttaatcaatagctccatttggatattttttaagtctccaagtgaaagtccaaraccaatcataattcacccaagaatctgctcttattccagtgttctatggggcaaaaaaatgacccaattattcacgcagctgctcaaaccagaaaccagagtttcacctttgaacccttcctcatctttcttcttctatatccaataatccaccagtccttgtaggatgtactacataaatatatcttaaatctatcttcccctctctgtctatcactaccataattgtcatttaaagctttcatattttcacttgaaatattgtattgactctgggactccttttccattttctgcaattcatttttgtgccttatacagtaatccaattatgtatgttttatttaagacactaaccaaatatctccactggttatagtttttcagtggttccccattatctcaggataacatttataattcctcagttgacttggaagttccttaacgacccgtgacactacacactctctaggttcaccttatgctactcagtttcattctctcccttttcatcatcttggccttctggctcctcaaaaggacttgatttttgataactgacattttcccagggtgttatcctggacactcatcctacttcttgccttgctaattctttttcatcattcaggatttaattgaaatattatttcttcaaagaaaccttctgaatgcccgggaaaggtaaaactactgtatattttctactgtttacacttcttattgggactaataattacacctgtaattacatatgtactatttcccttttccrttagatcatcagaccatatttgttattggtttttcttacttaaaactcagtgcctagtccattgcttcactcatagtagatgctcatttgttgaccgtattatttaataaactttttaaaaccacactttagttaggagaaaaatgaaatcgtgaagtatttgcttcactttgatggatttattaattctcttaacaattatgtgtgcatgtggtaaagacaaaaacaatttttaaaggataattctggtaatgactatcaaacatttctctatcaatcttttgttgcaatgcaatttgatttttattatgttggcatttaaatttttttgaaaatcataatcacctaaggaataaatgaattagatttattatactttatatattcagtaaagtaactgaactaactgataaatttgggaaagattttcaagagatgtatgtaaatggtgtataaagtgttaaccagaaaatgaatctcaaaatattatttaaagctattataagaattcatgagtcacatagctatatcattatctacctgaaatgcccttttcaggaatggcaatttttctctttatgtttgtagaataagctatgtttcattggagcaaattgtactccttcaactgtctatcatggaactcagaatttgtcagcaggtgtgactttaattttgacaacaaaacttaatattctgttccactctttcttagcttgacttgctccttgtagtttattatggcaaatgtagctacattaaagtgatttttacaatttttgatgctttcaaaaccttgagtttttttaattttatggagccacaggaaggtctttaaataaggtatcaatggtctgataatgcaattaaagatttctttaggctggacgatcttgttattgttaacgatacctaacattttttgagcacctactctgtgctaatgctttagatatgtagatattcacatgttttaacatgtttatttctcacttcaacctgtcagatatataatattattactaccactgagcaaataaagacctgagcaacaaaaaaatgtattaacttatctaacgtttgagtttatgttcacagatttattataagcagggattaaaggaggcatatgggtgaacatgacatactagtataacatgtagagcatgcctggattttggccctgaacagagtattcgctcaaatgaactatctccactaaaaagggttaaaaactttttaatttttattaataacaatatttttttcaagtacttctcacagcaagcttgaaatgggttagaagcctgtctgaaaaaatttcattatcatgagataaaggagaatgagaaatatcttttcatattgaaaatgtaataaaaacacaacctcttccagatccatttcttaatattaaatttggttgttttaagaaatttctaggaattttcagtctttttaccatcatattctagaagctacagtatttcttagtttataaacaaataaaaatattatttagttccagccaataaatgyttgcattttgcattatgaagtaatgtataaaataattaaaagtcatacacttcgactttgaaacagaactacacatgtagtttaagagcaattgtgacatatttgagaaggcatgtmtaagagtccctgatttaactaagactgcagaactatagaaaatgtattttgtagacaaaactgtgtcccctcaaatattcccatgttttgatccctggaacctgtgaccacagtaagttacctggcaaagaggatttaaggctgcagatgaaattaagtttcctaattagctgaccttaaaatagaaagattatctcattggacccagggtaatcacaaggatccttcaaatgggagaaggaggcagaagagatcagactgctgtgatatgtggattaaatccactttgctggcttttaagatgaagaaaggggccacatggctaggaacataagacgtctctagaggctgtaatggtcaagggatctctaccttggagcctccagaaaggaatacagccctgatgaaatcttgatcttagtacagtgggacccatgttggacttctgacttacagaactgaaacgtaataaatgtattgctttaagcaacaaagkttgtgataatttgttacagcagcaatagaaaataaatacaatatatgaactgaaaggtatttcctaaattaactggaaaatcagagactagaataagtatagaagaccacacacacaaaaaagctctctattattggttggaaagttcagctcaattcaaacagtgatatttgaaagctggtattattaatgacaactccttagtgtaccacagttgcttataacctggtattcagttaaacttgcaagaggtcagtttctgttgaggattaattacttatctggcttcaaagagaaagtatagacaaaatttcgacacctatcagaaaaaggacagcccctgccagctgcttctattttttaaatctataaaggtgtaaatatcattcaaacaactccagtgttcagaataggaacaaaaatgtttattttacaaaagaacaacaaaaaaggaacctttctgagaatgtttgttcttgatccaaaaagtcctggccacattactaagaatatctacaggaggaagatgagaggagtgtggaagaaataaattatgggactaaataaaaatgatctttatttcagataacaaattttaggaatatacaatttaccagtgttttaatttatataaatgtcatgggagatagagattgtgccaagacaggatgtgtcaatgtctaatgagctaaaccatctgtatttttagtgaggtggaaaggaagtctgtaactatggyggctgacctggttactgagagggctctgagtggaaggatattctgaaattcccaagtctctcttcatctgctcaaccaattcccaagtatctcctcacttgctgagccaagtgtatgtattacatagacacacacacagaaaatcatattttagcaagacacaaatctgaccttcctcagttcaatttggtgtataaattcagagaagataataactagatagacagataggtagatagatagatagatttatcttttattatttacattatctcacttttctcatttctaatttggaatcgagtgataaggtaaacattttactatttacataagctctgatactatttttatttaagtgaagacaagaggtgcttggggaaaacattaatctttacacagtcttgattagctgcccttttatgcgaacaattgatgttttcttattcacctataatcttatagaagtttcacttcccattaaactgcctaaagattcttgcatatggaaaattcaaagccatcatttattctcatttttgagagatattgactttaataaatacatttatttattcacacacctattactcatttgcacatttgtttattcagtagctgtttttaagtatatatgtcaagcactgtacaaaacacttgtaatacaaaaatgaatacaaaaactataaaatacagctctggccttcaagtaggtcatagacaaaaatttatattacagtacaatataggaataactttaatacacacaggctccattttatttgtaggattttatatagaatattattaagcttattttgccttggaaaaagcaaaagtaaaattcatgaagaacgtatttgaggtttatatattgggtatgtttttgtttagaatgtgcaatatgtcaaagataattttgtgcaggatcttgagacctggtttcaagaatgttttgattcctaagcgttgttacattttcaaccttaaatataataaagcagttgaatcagtaattcattcaatgcctctgagtgtgtctcaggagtaaataagacaataaaaagttagcctcctattttcacataacaactttggggtaaatgatttgtgggaataaagcttgcttcagggaaagacatggagagtgaaggaaacccacagactgaatcctgatagcctttgaaatatgacacttgctgggggctgcatgagtacaacctagtggcatttgaggaagaaacaataatgattcaattattatcagacaaatctaacctgaagagaattccaggacaatgagaacgcttactgatcagaagatgtagctgctgttttctttgtctactgcaacaaatatgcagatccccttcctctgtttaaatattgttttactgagtgttcttttagtaatgaattagaggactggaaaattattttcaataatttatttgctgctcagataaatttttttacattacaactgtgagcaatgtcattaggaaaagaagatttcagtgtgtcaaagtgagtgggtaagatttcaagaatagaagattcctaagctaacttgaaggaagtaacagtttttctgacagatttgagaagaggaagaggaggtctttgaattggtttccatacagaggatatgaatttggcaaagccaaggccaaaaacaagaagggagaaaaacaggagtaagaaaaatagaagataggccaggcatggtggcccacgactgtaatcccagcactttgggaggccgaggcgggtggatcacgagctcaggagtttgaggccagcctggccaacatggtgaaaccctgtctctactaaaactacaaaaaattaggcaggcgtggtggcggacgcctgtaatcccagctatgtgggaggctgagacaggagaattgcttgaaaccagaaggcagaggttgcactgagtcgagatcatgtcactgcactccggcctgggcaacaagagcgaaactccatctcaaaaaaaataaataaattaagaggataaaaaagatgtggaatataaaaggagaaagatgaagtgaatgaagaaaggtgaagacatgagaaggcactttgttacaaagtactaggtcatgagtcacagcagtgaaaaaggccaacgtagtcttacaatcttttgggaaggaaaattgtcaacagactttttggcagcaacaccttgtgacagaagcaaataatgtgatatattttagatattcaagaaaagagaattaaaccaaggacataaactgacttcaaaattaaagcttctcaaactgtcatgaccccggaactcaggaaacatgcaggaactcagaaaatattgttcttatggacttttaaaaataaatactggagaataagcttcagacaatcaaaatgacagagatatatcaacacaaagcctgttggtgagaattaaatatataacatgttttcttagagacctcagacagatgagggacatattgaagacagtttaatatggctatctgatctgacaacatatacgtagttcaactttaataaaaggtggaggacatgaaaataatgtaggcttttttttattattattatactttaagttttagggtacatgtgcacaacgtgcaggtttgttacatatggatacatgtgccatgttggtgtgctgcacccattaactcatcatttagcattaggtgtatctcctaatgctatccctcccccctgcccccacccyacaacagtccyyggggtgtgatgttccccttcctgtgtccatgtgttctcattgttcaattcccacctataagtgagaacatgcggtgtttggttttttgtccttgcgatagtttgctgagaatgatggtttccagcttcatccatgtccctacaaaggatctgaactcatcattttttatggttgcatagtattccatggtgtatatgtgccacattttcttaatccagtctatcattgttggacatttgggttggttccaagtctttgctattgggaatagtgccgcaataaacatacatgtgcatgtgtctttatagcagcatgatttataatcctttgggtatatacccagtaatgggatggctgggtcaaatggtatttctagttctagatctctgaggaattgccacactgacttccacaatggttgaactagtttacagtcccaccaacagtgtaaaagtgttcctatttctccacatcctctccagctcctgttgtttcctgactttttaatgatcaccattctaactggtgtgaggtggtatctcattgtggttttgatttgcatttctctgatggccagtgatgatgagcatttttttcatgtgttttttggctgtgtaagtgtcttctttcaagaagtgtctgttcatatccttcacccactttttgatggggttgttttttttcttgtaaatttgtttgagttcattgtagattctggatattagccctttgtcagatgagtaggttacaaaaattttctcccattctgtaggttgcctgttcactctgatggtagtttcttttgctctgcagaagctatttagtttaattagatcccatttttcaattttggcttttgttgccattgcttttggtgttttagacatggagtccttgcccatggctatgtcctgaatggtattgcctaggtttccttctagggtttttatggttttaggtctaacatgtaagtctttaatccatcttaaattaatttttgtataaggtgtaaagaagggatccagtttcagctttctacatatggctagccagttttcccagcaccatttattaaactgccctaggtaatttatagattcaatgccatccccatcaagctaccaatgactttcttcacagaattggaaaaaactactttaaagttcatatggaaccaaaaaagagcccgcattgccaagtcaatcctaagccaaaagaacaaagctgggggcatcacgctacctgacttcaaactatactacaaggctacagtaaccaaaacagcatggtactggtaccaaaacagagatatagaccaatggaacagaacagagccctcagaaataatgccgtatatctacaactatgtgatcgttgacaaacctgacaaaaacaagcaatggggaaaggattccctatttaataaatggtgctggaaaataatgtatgcatttttaagaaaactctttttgttaatcatataagtgactgtattagaattttcatcctcataatattttgtgtgtaatgctggattttaaaaaatgagtaattctagcatccccagcatctctctctttctcactctctctctctctctatctctgtgtgtgtgtgtttgtgtgtgtctatggatgggggtgtgtgtgtgtgtgtgagtgtcatttcttataacttcattccttggaaggcctagaagtaatgttcatttcagtacaatgagcattcctcacattcagattgtggtactggaacatcattacctagtaaaagaaagcagggttgcttggtggaccagttgatttcaggtttgggcagataatgtatacgatgagctaggatgtcctgtgactctagttcacaagaaagatatcaaagaatatgagggtacatcaatagaacctgtgagctaactcaaagaggctcttactagctaatacaaatatgtttatatccatgaattcacatgacacacattcatgcacaatgaattaattgtctttgtacaatgcagggttaataaagtgtacaatcaaacatttattttgtcattgttaaaataaagctgtcactggataactaagtaatagatgaggcaaagtttctctttgtagaagagaaataaataaatgaagaaagtgatgaaattgcattatcaatattttacagaaactaatgaattataaaaactaggcatcaagcattggtgactgctaatatcacaagaagagaagcagccaggtgttttgtgcttcctgataaagaattcaaaactaccatgaagaagtcttgccaaaaattctaacttgaatatatttgattaagcctcyagatttaattaccaaggcccaggaaatatggaggacagaggtacacattaaactaaatcaggtggaaatctgtacagaaaaaataatatggtttctttaacaagtaaatttctagaaaaaaataaacggagcaggaatacattaattaaaaaatacttaaaaatactactccccaaaataagggaaaataaagccatgcaatttaggaataaacacttgcttgaagaaattatatagaaaagtacagaagtgatatcagaagagtgtttactcatggggagacaaagggcattgtgtttgggagagtaagcagggctttctggatgttaggaaatttctagacatgggaggtgattacaagtttgttcaatttctaatagcacattaagctgtacctttattttgtgtagttgctaatatcatcaatttaaagagtattaggtagcatgattcattggatgtatgaaactgaaggacttgtacaaaatctatgtgaagatgccgaataagcagttattacatgtgggtcttgaattgaggtgacatatcttatggtttattccataagtcttttttaaagacggttaagagattaagaagagatatcaatatgagaataaaatctcagtataagagacaatcagtatataatggattgaccccaaaaagaaaagtacagaatagtctgagaggtaggagaaaaataataagccactgccatctcactttgtccacttgtggccctggtaagaggaaaataagtgaaaagcaagctgcttccttttaaggacctgatgagacctgcatatatcacttctgctcacatctcattgccctgaatgtataacaacaggaaggctggaaacgcagtctcttattttgtttgccatgggcctagggaaaaacatgagtattttattactaaaaggaataaatgaccttatttagaaaaatcatgattgaatggctttgaagttctctgggaagcctggagttagagtgtgaaatgaaaatgctgagccaagtgtaactagcaggaaagtctctaacagatgcggaggaacaaggtcagaggaggtcagcaagtagaagagacatggggcagtagcgaaggatgtctggggactctaaggaatggaattttatgctgtgttgaaaaggaggggcctggtagtcaacagccatatagaagaatgtggtgggcctgtctcctattccttggtatgaggggcatgggactatgaacagcttccactagagtgtcacaaaagaacagagtcctaagggagagccaagtcttccttacaaaaagagggtaaaggaagcctaaaaaaatcagcaaaacatcttgcatagattaaatctcaagtgaaagaatgtgtcccactgtatattttacaaattgagatactgtcactcttcttgcttttatgagaaaaaatattaatcaattcagatgtagttcgtaaaattatagttttaatttaaataccttttaaaatttatatattttaataatagaaggagttggtatgttagtaaacaacttcaggcatgtcaaagttacatttttagaatatgaaactattccttaagaggatttatatttataaagcattatatcttttaaccataaagtacccacaatagactgttttctgttattttaagttgtctagaattagagtaaaactataaatcattgtatagctagcctacattttatagaatactggtccaataaacattgggactggtttaactgataagttttacctcacttgggaactaagacactgcatattttcctggaaaacagtagtagtccttgggccacatttaatgttattccctaagttcagcataactctacaaaactaaaggagaatttcagcaccatttagtcaaaggtaacaggggttaatgagagagaaaaaaaaaagatgggctcaagagagttttatcttcactcttcattaatagctgcatgactctgagtaaattagtaaacatttctaacatctcaaatttgttattaataaaaatagagatattaataactgccttccatagtgttaataagtattatataagaaaaacttgtcgggctgtgcgcagtggctcacgcctgtaatcccagcactttgggaggctgaggtgggtggatcacctgaggtcgggagttcaagactagcctgacgaacgtggtgaaaccctstctttactaaaaatacaaaaattagcygggcgtggtggctcacgcctataatcccagctacatgggaggctgaggcaggagaattgcttgaacccaggaggtggaggttgcagtgagctaagatctcaccactgcactccagcctgggtaacggagagagatgccatctcaaaaaaaaaaaaaaagaaaagaaaaaaaaagaaaaaagggtaacttgtcagtgtctgacaaatagtagccacatcattttataattgctatttggatgtatcctgtaatccattaatttttgtctattttatttaactgattctatgtattttaactgataataataaaataatgtgtattgtcatctttatttccattttgcgtaagcattattgttagttaccaatgtaatgcagcaaaattttccactcatgcaaaagattacccttgtttttatgagtatttgactgtgaatggaagtaagtagcagaaaaaaataattccataacagtttcttctttgcaaaactctaatattgttctgaaaccaaagtggtaaatagttttagctcttaaatgaaatctccttacatggtagtcactttacaggacatggtttgagaagacttgcatgggtgaggaaaacctaggggagataatgtttcattactgccctctgcccagatgcaggagaggggagagaaactacatataccccaatgtatctattgctgttctagtggctrgaaacatgtggatgttcttcaccaaaaaaaaaattataggtgaattaattatgcaaaatataaaaaatatgaacagatacctacttaatgatgtttaatattaatgtaattgttagcatgaggatataggttcttaagaaatctaagtttcagctggcacagtggcttatgcctataataccagcactttgggaggccgaggcaggaggatagacttgaggccaggagttcaagatcagcctggccaacacgacaaaatcccatctctactaaaaataaaaaaatttgccaggtgtgttggtgcacggctgtaatcccagctacctgggaggctgaggcatgagaattgtttgacccaggaggtggaggttggagcactgatatgcaccactgcactccagcctgagtgacagagtgagactcgtttaaaaaaaaaaagaaagaaatctaagttttgactgaatctttgacaaagttattgttatggtgaatgatatatttgataagaatatgatttagagaaagatctagaaattttttggaaggcaaatgtaggtaaaaccaatggtaagttgaatacactggtaattttaatgcttctgagaacacagcacacacaatgataaataccacataaaattattttttaaaatatggctaatacgcactgtttgaatagtcacattttattttcactatttaaaacaagtatctgaattatgtcatatgattcactgcataggaggcacaacagtgggaattcatctaaaaatcaatgtagtctaagagttaaatgaattagtatgggaaggctgaatgaaagaacagataggtagaaaaattcagaaaactttgtaaaaacttgaaaaaggttacaaattatgaaattaaaagctggtcaaatagactgtggtttcgggaaataatatccttaatgatatctctaatcttagaataataataataataataacaataaaaatcaaggttcttagcatcaatacagytgacttgctgtagaatggtatctggctggtaacataactcaaaaaattaagcaaatattttatgaattgaataagcaaacaaaaaaattcatttartatagcattaccagccacaaagactcacatccattcagtcaactaaatttttatcatatgtaagtcaaaacagattaaacagaaatggaaggaaaaaatccacacgtactggctggcmcttgctttgtatctggaggagaataaatatcccagcctgaaaaaatggtaaagaaatggttcattttcctgctactgctgaattgggagatatagggtcggatcaattccctccaccgccctaaaaaggttgatctgttgcacagcaacacctttcagtagcaacgagggccacatggccacttagctttctacatgcgttctaagactaaaatttgcattaatgcaaaatgtcgcatctatggtgactgtgcatttgttttgccttatgtaggaacgggggatgaatgtttgggatacaaagaataccatgagaaagtacaaaaacagtccacttctggcaaaagaagaactatatattggctagaattacctagatacgtataccttctcaaaatagtcaattggacatgaaagcaatatagatgaagtccagaatttagggaaattaagtgactgctagtgaccagaaatcagatgaagtctgttcatatttaccatccctttagttgaaaatctgagaaacatgctctaacaggtcaataatgagaggaaccaggcaagataagctgcagacattatttatgagtcatcaacggagagaattcaaaggacgagtaattgggaaaaatgtgttaatatagatgtgcaaatattctgcaagaaataaagtgaatgcttatcaagacataaaagaagatcttacttctgaaaaatatatgctatgtataacgaagtaattattataaaaacagtagttatatgtgatctataaaattaagaaatcatgtgttctattaaataatctataaaattaaaaagtagcaaaacaaaatgaaaaaaagaagaaattgggtaagagagagatgccaataaaatggagcttaatgagatactgagatgtgaagaaactgaaaattcagtcacatatttaaaatattccttaaagcagaattgatacatcagaaaactaaattttgaattaaaaattgagaaatactatgaatacagaataagaggaacaagtgagagaaagtataagatgtgatactacaattgtaacattcatagaaaggagagaactatcactgtattatggaaatcctaaaaataaatcagaaaaagtagaaacaaccaacattgaagatggcaaaaaaagaaaaccctgaatatgcatattacatctgcatatgtatatggtacatatatacataaccagaaaatatatgtgtattgtgatattttaaaaatgaagcatttacccaacatgaaaaaaatgaagaaaaagaagagaatgaggaggagsaggaagaagggagggagggagagaggacgagaggaggaagaaaaaggaggagaagaaagaaaaatctatctggacatacagtttacttgtaaagacaaactgccttaagataatggaactatgtctacatagttctaaagtaaatatgttctataccaaacattcagtttgtcttttgtatgtgagagcagctaaaacatatttgaacatatgtaagtgctcacaaacctttgtgcacttctaatgagtaacatgcatccggccacaaaattttaatcaaaataagaactcaataatagggaactaatagtaactctttaaaaaccagttaacattgactaggtctaaataatgattgcaaatatattttaataatttcaaaatttactccgtattaatgagcaaggtggagtcttagattatatttcaactaaaactgaaaggcatgttaagtgttctgtcttacaagaggaaaggggataaaatatgctgttttgtttctatcaatgcttttttaaaagttcatatatatttgtttgtatatatagagttattaagtattatagaactattagttggagaaaaataccatccgtattttccaaaacactagaggaatcaaaatgtgataacatttacattatattcagcaggaatataggaaattaaaagtatgttttaagaatagcaaacagaatgggccctgtaggatcactgacatctaatgatgataaatataagcagttaataggattaagaacattatgcaaatataaattttctattgcgtagtgttttttttttttttttttttttttttttagatgaagtctcgctcttgttccccaggctggagtgcaatggcacgatctcggctcactgcaacctctgcctcccgggttcaagcgattcttctgcctcagcctcctgagtagctgggattacaggcgcctgccaccatgcctgcctaatttttatatttttagtagagatgaggtttcatcatgttggccaggctggtctcaaactcctgacctcaggtgatctgcccacctcagcctcccaaagtgctgggattacaggcttgagccaccacgcccagcctattgcatagtttttgtaacagaaacacataaaaaawttaaagcaaagttaaaagtattaccaaatatattactcaaacatacacacctacacagacacacacacagagacatgcaaaatgaagcaagagaggcaatattagtaacagaaaactgtaggctaaaagcatcaagaccattttattgaaatttttacataagttataatagatataggcatttatgaatcaggtaaaagtgtgtgttttaagatgaattaatggaggcttctggaattttataaccagctcaatttattaactaataktaactttacatttatactatatatatttagcttttccatctgctaaagattgaatccttttgtttatcaataaatcatacaaaaacatttgttttgcatttaattttgtatttattcatgattccttaaatgatgaagcataaatgaacatacctaaaatgtgaaaaataattttctcacatcagaaaccaagtatcaaggacatatttgagaaggggatttaaccagagcccaagtggcagaagtacagattaaagaaaaatttgccactaattattctggagaaggtttttctccttggagtttgaataaatagccacgcacatgtatacacaaaaatatagaaacacacacaaccatgaaataatcaagctgatgcttataaaattatttcagtactatgagaagagaatgttatcatgaagactctaagaaagagaattctcaaaatcattgaggaaaaggcttgctgagtgagcaaatgttcagatgccccatgcaggcttctacagtgggttattagtctggtaagacagaggagaaaagagtggtgatgctgatctcaatctacagaagacactatgcactgtgagccaggtagatggtttttctccccacgcccagagagagttttctcaaaaggttgagtgttgatgagaaagtattcagaaaaatagatcagaattcagcctgtctgctcacacagctgattttcttcttttgttctcacatacaatattccaaaaagtagctgtctccagaaaaaaaaaaattactcctattcaaagatgcacaataccaagaaagtaatcataatggaacctaagcaaaaaatatcacaacaaaggaggaagccaacgtgatctcggcgggaggtggaaatatgaagaatataagccaatactcaacaaaacagcattttgaaaagcagaacaaagtaaaaatgtgttctcataacctgtttatctctaggacattaccattaatggaaatttttaaagaatgtgcttaagagtagaaggaaaattatcccagggaaggtctgaaaaataccagaaggggaggtgagtgaacatgatagtaaatacgtggataattctggactaacgttgactatataaacaataataacaatttctaatctggaaagcaaaataagtaagatataatgaaatactagactataatactatgtaagttggggttgagcaatccaacttaaaaaacattttctattgagaaagtacagatataaattttgatttttgaagaatacatgttaaatttttagataatacatgtatattcagataatagagggtatattttctaccggtaggaagcaaagaatgaaaacaacaacaaaaacaacaaacatcaatcaagttgggagaagttccgtaagtgagaagatgagaaaagggtggcactgatttcaatcagctggagacaaacaattgccttgtcctatcttcagctgaagcacaaatataaatgttctctaagatgaagaaatgaaaaggtatatatcagaaacacataaatgtgaattgtctggttatgtcatataaaatctatagattgttacattttattaagaaaaaaagctaaatgagatttgttacagatataccagaatttaaaggataagtattgcttaaaatttaaaagacgaaaaaggtatcacaggcaatttgtaataatatcgacaacaacaaaaaactgatgtcattacattgaaaagacaaaacgaacctattggaaaaagtaattcaggaggtaaagaataacactttataaggtaaagagtcaattcaccaggtgcatatcacagatttatacttaaaaataattcatttgaaattyaaatggcaacagtttatactgctacaaggagaaactgatatagccacatttataatggaagtaatagtaatctcacatcatttgtagagtgatcagtcaaaaatatacaattaacaagcttaattcaatgaacatatataagatactgtatccagtattggaatttatacctttataaggacaagatggcttatgagaaatgatcatatatttggctaattttaatataattcaaagtcagtattgtacagactgttttctctgtccccaatgtagtcaaaatcagtaaaaataagataacttacagaactcatgtttttaaacttaaaaaacatttttaaataacttgcacagtgaaaaaccacaataaaattagaaaaactttgagataaaaaataaggttgccaagaaaaatacatatttttgcataagaaattcaaagatacacatcactcttattttatagctgaaaaactcttgaaaatatttcagccaacagaaaaataaatcataataatttaaaatgcaagagttttgtcataaaaggtctattgctaagaactgataacagttaaaatggatttatgcctaaacaatttaatcatattttgctatgattatctgtataacatttcatcagatcatacatttggaaaatagcaagaatttagttagaaatacaatacaatgcttttctagattggaaatgattacttcatcacgttttcttcctaagctctgagagaattgtaccatgttttgcttacttgaagagggcttcctcacgaccaaaatgattccagctcaggcagaagaaaaagtgaaatcatagccttggggttcacaatggcatcacaggatcttgcttatttaatgaatcagtgaagactcacctactatgaaccttttctataggaggtagaagttgtctttttttttttttttgtcagctcactcatggttagctattttcttatgctcactattttcttatgctcaattcacaaacttgctttttatctggttcagatggcagatagacatgcgtggagaataaataacatgtcatggaaagagcccttgagttggaataagaaaaccttgattaaaatccaagctcttaataacattattaatgacatgaggggtatgtgttctttaacctcgctctctgagtctgtttcctaagatgcaataattacattagctaatgcatttaaaaaggtgatcactatgtacaagttatatattatgattagtttgaaagaatggggtatatcttatctctaactttaatcctaagcttcagaaatagaattgttcatcagacaagaacataagggggcaactgggacacacaataggttcacattggcctcagtgagctacgaataaagaggtaggcaaacagcagagacggaccgcagcacagagggaggaaatggaaatagaacagagcttctccctagcaggagttgcttctagtttggatcccatatgttaagaaattccaccttccatttaacaagaatttcctctgggagccatcatggggatgccgtctacargctagtggcacgagattcaagacactaaaagtgtacactaagaaaaatctaccagtagacatgaatgaaataattagctcaaggctctgatgaaatggtatgttatcaaatgcaatctgtggtgtcagctagctggagagagagagaaagaaagaggcagagggaggggggaaagagagaaagaataagtttattcaggaaagatctatcttctggttgtagattttggggaatatttacaagctggatatctctgtttcaaaatatggcacaaactcactctgattttaaattcatctaccatttttgtatcacagtataattaaagagctattttgcctcaataatatatttgagtcgaaatatcatgctatgtagttaagtataggaagtttatttgttttagtttcttacctgacgcatatatcttcctgaaatgaaacacgatctcatttcttttcaagagtcaaatacgctcacacaagctaaaacacttctatttcaagggaacgtgatgcttccactggaagcttttattcctgtttggcaggttgggcgtgtttggaaatctattttccatcaaaccctgaagggttatatggaaaaaaaaagaaaaaaggtttgcattgacataatgaatagaggatttaagccaaaaacccaaccataaatkagcttctctgtgctaaacagaattcgggccaaagatactgatcagcaatatacaaacgaaaatatattttttaaaaatgtgtaaggtgggcatatttcccctcaaattacagctaaggttattatgcatttaaacgtggaggtggttggatgtggtgaaaccagtggtctcaatttgcaggagcagaggtgagcccttgaaaaaggtattctagccattctgtgagtttcacctatcgaggtattttctttatttaattagaatttaataagttcatttttttctaatttagaaagatattaatttttagtttagccttaggatgcatagtaaatttcaatttaaatatttttaataacatctgaaaaggaacagcaaaataaaacaatatttataagattagcaagtagatgtgggtggtttattgttttggtatactgctcttgaaattgaacaatgtgtggagactctgagacaacacaagaaattatataattaaatccaggtaaaataggatctgccagaagtaggcctgctttactgggagaaagttttaggaaataaaaataaattggattactcttgtttccaaaatatgtcgtaggatccttttgttgttgctgtttttttctcttcttttttcttctttttagatttatagtagttttctgtaagaatgatttcttacatggaagggtagagaagagaaagttgagaattatatcactttcagggctactcatggaaagatatttatagtattgaaggttcacaattgtacaacaccatcccctgacccttgtaccccttctgttctaaagctacaaaggtgtgagaggtcacagaaaaatgggagcttgacctagaagtggagggtgatgtcacacaggaaaacaatcatacctttatattttaataataacctgagctgcaattcttagctttggaactctggggagatagatgactttaaaaataactttacatgtagtgattttttccaaatacatttatgctaaacccttaaaaatctctttaaattaattcctaaaatgagccactatttaagaaaaatagtcccttcaaaaattgaaacattttggatctacaaatctcttaccacacattaaagtaggctcatacatttttcaggaggacttatgagagctggactgggttgaaaaggaacaatctaatcttgataaaactcaaagattaaggttagaacagtttgatagtcattattcattaacaagaaagggtacaaaaatgtaccttgtactttgtttcctttgaaaatatgttcttcaataatttatctttccttgcttaacatgtacgcttacctattttagtagcacttttaattaaaataaaatccagagaacaattaarcttcttctaaaatttacttttttcatggctatgtcctatgtctaaaatttaaacacacaaagccttctgtcttacctggtagtagtctactccrttttttaggcaaagtatttaagacagaatgatcaagcttcaacaatgaaatgcaaattttatttaaaaatcaatgtttacgtgcaagtttatttgatttcctgtctattatgttaacattaattaggttattttgtttatgcattttattgtaagaktcaaaattttaagttccatggtgaacagccttctaaaactttcttgcttgttacattaagaaatcaatgtcaaattatatataaccttctatttttttctaaataggcttatttccccccactctaaagcaaatgtratttctttgttcaaaattcctcaattttcagaacacacactrcaagatgagttctacaagtgtccttactcatctgcctgtagtcttgctcgaaacctgggaaagatttttcaacactcgctctgccagtaggtagaacttagcagagttgtctttaaagtttaatataaagagttgtgacccagaccccgaagctggctacctgcatatttcatacatgctccacattttccatctcattctctttttaatgttatttgtatatacccattttaaagcaggatctcactttttaagtcaaaagttctgatagagtatctactgggtacttagcagctacctagtacaggttataatgtggtgaaaaagaccgacaagatttctgctatcatgaagattacaagagcaacttcccaccctgttgcttaatagagtgacccgaacctagttactacctgggtgaaaaacaaatgaaggcagatacaggtaataatgcagctacttgaatatttctctttcaaatataggaaactgccagagaaaggaaaatgttttgatcaagttatttagaaattaagtgctaactgcattgctgctctattaaaaagtaaattgcttattcattcactttaagagggaaaaaatgaatcaatagaatatgaaattctttataaagatagagcttttagacattccaaaaatactatttaatgtctagcataaacaaaatatttatatcgatttttctaagtcttatacaacctgagcctcaacattttgtactaaacttgaaccaatcattttaagacgatattcattatcaaagaatcaacatagatgagagattcatctactgctatataagtagaatgagtacatatatataatagaatcctctcccgcccttaaaaaaaaaaaaaaggaaatcctgacatttgcgccaacatggatgatccggagggcattatcttgagtaaaataagctagacatagaaaaagaaatactacataatcttactcatgtgtgaaatctaaaaaagttaaattaataggagcagagagtaaaatggtggtcaccagaagctgtgggagggagactggggagatgttggtcaaaggataccaaaatttcaggtagacaggagaactaagttcaagaggtccattgtgcaacatagtcattatggttaaagcaatgtattgtatacttgaaaatttgtaagacagattttaagtgttttcactacaaaaaaaaatggtatgggaagtaatgtatatagtaattagctttatttagccactccacaatgtatatgtcaaaatatcatgttgtacaccataaatatatacaatataaaagagtagattgaacaatcatctgtcattttcattattaatttggaaaaaataaggctttaataatatatgctcttctgtggtgcccattgttcagcaggagcagaggtggatgttttgaccctctgccaagtggacatgccttactctagattctgaaaatctaaaaatgacacttcccatatgcctttgcagccgagagtcaggatgagagttggttctaccaagaagttgtatttgtacaggtaaaaggtacaagcaaggagtatatttctttatctctttctgtttcttttctttctttctttttctatcttctttctttctctttcttttcctttctctttctttctctttctccttctttctttcttttctttctttctctttctttctttttcttcttctttttttcctccctccttcttccttccttccctccctccttccttccaccttcctgtctcctttgtcttctttcttttttcttctttctttctctctttctttctttccttctttcttttcttttctttttttctttccctctcgtgyactggcaaggaagatcttgtttttcaaagcaatactgcagtatctattcttcacttcccttggtgttgagaagcagctgtggcaaaagtagtggtgatagctgattcccagctttctaattctgagattgcttttatagtggattgttcatctgcaatagtcccagtggtgatctcagtccctgggtgtgtcagttctcctgtgctgtgttccagcctagagcccacaactgtggctcttcctatcattattgcaaaaagtagtttattctctgtgttaaatgaatctttcctgctttaaatatttagatttgtttctgaataacagtattgcatcaaaccgagaattgtcaccccgtatcttttcttaacctgtttccacaatagagtttcaactggtcacatgcccatccaacttaagacttcctttttcaacctcccttttgagaggtaggaccatgtgtctaagctctagaccatggaatttaaacagaacatatttggtacttaaggctttgtccttaaagattaaagcatgcaatattctggaacctttccctctttctgatagttgtgtcakgcatggcaaaagmtgtttccctgaatccagagacagaagtgacatattgagaacggaagagttrtcctgccaacaacaagcaacctaccacttgatatttagtgagacataaatttttatctagtataaaatgctgtgttttagggtctctttctatgttttaatgacatctaatcttaaatgaaacatgacttggttactagaagtgtactctagcataataaaaaaaatgaagctttggtctaaggattgagagtgggagagaacacagatattgcaggctagaaagttagtaattctcattactttatgataaagcatttcataaaactgtcatttgcaatccttaaaaagggagattacttgccagaagaacacgtaacctctgtgaactgctgaggaagattcttgtgcaaagttctgtgacaatacgtactcgggctagaggtgactctaaaaaaggagggccggcagtaaataggcctctgactttttcaagtgcccacattaaaacctctcagttaattgaagttctttatagtttcgaaggttaggctgagagtgatgctttcctgcctaaactaatattttcaggtagcttcaaagtagacacccataaaccgaaggagagcagaatgtgctaagcaaagaaaccartaaataaaagaagatagtctgcgtgcatagcaacactgcctgggttaggtctttgggtatgataatttgcccatggatctgactggaagcaactagatcaaaagcagactaaggttttcagagaattgcattgacctgcagaagccaatctgtgtttgacttaaagtatctcccatgccccactactggttttgcagcatatacatcacaaaatatgcgcagctccaaagagagaatattttctaattctttcttacaaaataattacagggtaattaaatacttctgagaataaaatggatacatatttagaatagataattcatttattgaatacttacattacaccaaaacaatgttttggttactatagcagtaatggacaaataatctcatagagaaatgaaaataggaaccataataagggacaataaattcctccaagataacataattcttcctcgataatcatggaaattatttcactgccatagcagaagaggtcaaaaatcttgtccagtggtatttgatcattgccttgaaaaatgacagctgtgcttttcctcttcttgtatacctggatatttgggtaattgactgcaagttgttccccagtattctttaccgtcttctttcctgatgatggctaactagccaaagaccattttttcaagcctttctttcaactagatgtgggcaccttactggttgcagtcaatgaaatatggagaggaacgatgcctgattattctagttgtgttcttaaaaggattatctgtgagctctcctgtctgctccctcgccctcaacacacacaccatcaaccagttgggagatagtgaggaaaccttgcgctgaacatggcaaagctgtattataggttctcagtgtcatcttagatataaaagaaagaaagtaaaaacacaagtgagagaaattttgtcttgtttacacggctgcattttgggtacttttgttatagaattagatcaaaactgtattaactcctacagtagccataaattcaagtaattattgttcttaaaaagttacttatagaaaatagaatcagaatagactcaaactatttctttttttctttcatttatttgtttgtttgtttgtttatttatttatttatttatttatttatttatttatttatttatttttgagacggagtttcactcattgcccaggctggagtgcaacggtgcgatctcagctcaccgcaatctccacttcctgagttcaagtgattctcctgcctcagcctcccaagtagctggtcaggcatgtgcccgactaattttgtacttttagtacagatggggtttcaccatgttggtcaggctggtctcaaactcccaacctcaggtgatctgcccgtctcagcctcccaaagtgctgggattacaggggtgagccactgcgcccggcctgagccactgagcccagccctctttctttttttaaatttttaagtgaaaatttaaattttttaaattaagaaattattattattattattattttgagacagagtctcactctgtcacctaggctggagttcaatggtgcaatcttggctcactccaacctctgcctcccgggttcaagcaattctcttgcctcggcctcccgagtagctggagtagctggaactacrggcacatgccaccatgcccagctaatttttgcacttttagtacagactgggtttcaccatgtttgccaagatagtctcaatctcttgacctcatgatccacctgccttggcctcccaaagtgctsggattacaggtgtgagctaccacgcccagcccaaactgactatttttaggtgcaggtccaaaatgagaatattacaaatattacaaaaacttgatattaaaaaattataataaaatatatatgtttataaataactttccccagagaatatgaaaataaacaagtcatctattgaatattaatgctactaatcattagattaatttaaataaacagattcacatcttcgagattcctacagctctccacatggtttggtaaagagccaagaaacagtggtcatagatggacctctggaaatgtgatttcataaagtctagggttccattctgaaaagaaaaacaaaacagtaagaatggaaagcagtctaccttagatcattaagtgagtgtaaagttaatattcaacaactaatacaaagtacacaaaaatagagggttggtttttaaattcytctaactctttaaaaataaaataagaaaaayatatattcttctattctcaaatctgttgattaaagtaaactgctcatgtttctccactttaagcactaggctcttaggatgcatctttttttttcttactcaggtttgtctctttggagcagcctcagaaaatgctcactgctttatggcttctagggttgctggagtgagagaaaaactgaaacatgcaatctgaggaatgagatgcagaagataaggtttggctaattgctgtcttaaaatgaaaaaaaaaaaaaataattgaagccaccagatgggttattggctagttttatcactaatcattgtgtgttactataatggccagataattagaatatagaacataagagatagtgatgatcaagctggaattactttgtggacatttgggaaacacataaatagttatagtccttcaagagtttcattgcgctacaactccagagtgtggcggtcactgtgctggtttcctttatgcctatttttaccttttaaggtttcagttatttagataagacctttttaatagcttctcctgtacttctgaaattgcattggtctttatctaaacaaatcttgaggtatttatatctttctgactcgtatgataatatctgtrcatatatatacatatacacacacacgttttactctccyactataatatggaatcggtgttttattcacatacctttgcttcttgattataataagcaccaattttttttaacaactgtctataggtcttgatcctgcttctgtgccttttgtgtttccacatctgttttgtattacttctaccgtgactatatgtgttacaaataagtttaatttatcgacttatttatttctttattcattttcttgccaactggagacaaagctgatgcaacaaggagataaattttccttctttcccataacattttgtagcacagcttttaaaaatgttctctttaaaaaatctattctttgaatatgatcatttttcttgagatataatttatacacagtgagacgcatagatctaagagcacagcttgatgagttttgaaaagtgcatagacctgtctyatcttgtcaggatatggaacatttccatcatctcagggaaagtttccccatacgtcttccaaaacaagtgctacctttcctcccagagacagtcactgtccaaatttatattaatggacttcagggcatgctaccccaaaatatggcattttggcatttaaggaaagagcagaaacaggaaacttactctctgaycttctcctgcccttctcccctgaagcaggttgtaaaagaattctctgccttccttccaaactaggtcataagacttttctttggagaggtaccctcctcatacatagagaaaagaaatgtatatgtttctgaagacacagggacacagagtcgaatttgaacaaacaggccttgctggttcccccaagtttattaccattagattatacatatccttttgtccttcaactacattcctgcacgactagccacttcttcattgaatttagcataaaaatatacaagtgtctatttctttgggttttcatttctgaaggctccaacaccacacaaaacttttattcaatacatttatatgcgttttgttaatcttttattacaggtgacttagctatgagccttgtgataggtgaggaaaagatattagtttttctcctccacattattgtcatatattatttccatctttatagatttgttggattatgcggtcttgggtgaagagtaatttgtctgacagagaatatactgttgcgtcaatttgataatattgggcttgattacagcagggtgagagactaaccttgctcactgagcaaaattgtgtcaaggatttgcaccgtattagttctatagtttcggttatatcctgtacataagttgttatactcagagaattgtaataacctttttctatatttgcctgagaagtaaaaatattgatatgactcggaatatttgatctgcttaatttctaacatgaatatttgaaaaatttatgtcctgtagttttttaactgaatgttccttttctgaatatgtcttttctggaaaaaactaatttaagtatttacagaataagtgtcatttacacatttaaaaatacttgagtagagtctattgcattcagagatggtgtgttagtagaaacatgaatattacaaagtgtcacgtgtaattttggtatcttcattcctttcttcttaagataaattactagcttaatttgcagacatcctcccaaatcctgaaaatgactgtggtatgcatatttctataatacattgtaaattgagatgatagaaaagccttaatttaacaaaaatcaagctatggttattattaatttttaagaatccaaatatttgtgctacgtatttcaagaaaaacagattaagtataatagtatgactcttcaaattttaagtgatggatctatgccttccatttcaacagatattttaaaccatggtgcattgtgaagataatttcataaaagtaagagtgggacacattgatgtatttgtgatactataggctacactaaatacattgcacatgatgaatttcaaatatatttctagtcattgtctactgttatcacatgcttagagttttactagagatgcatttgtagtttgtgtgatataacagrtagtaaacaacaaggctcaaatagacaaaaaaaagctcccagtatataaatgactatgactaaaatttccaattcttccaaaaactgtaagttgacagttttaagtggacttttccattctaaatataacagttttcatttgaccactgaataggttcttgttgcttacataaataatgtgctataaatactcacaatctcaggcaacatcacagatgttctccatctgtctttgcatagaaaacagatcaatttactgtagtcgaaatttattacatataatgctacatatgttttactaggcaaagatttctaaaaactctagaaaattcaagaattaaggaattctactctcttttctgatttctttgctctttcttcaatttccccatacacttattaaatcctcaggttttaataatgccagaaatattttaaataatcactagaagatccatgaatttctatagttaattatctgattttgcacatgaattctctgattttacgtatattttgagtataatacaattatatggcatgaaatgctattcaaatgcatttatagataaattttattaaatgttaaagcagaagttggtatttctcatgtaagcctggcctacttttctaacatatcccttaatatttttgcttattttgtttttaatattgcactttctaaattgttgtactgctagtttgcctagacaattaggtcacagacataggaaaatggtgattttaaaatgttagcaaggaaagggcagtagggcatttatttaatttgaatactcttagaattgcagttaacttggatgttaatgaagggaatatctgctttgtttctgagggaaagcaaacctgcgtttttaactattctacagcgccaccttctggaaatgaaatgcttctctaaatgtcaagaagctcctcgtgattgtggctaaaagaactaggacatgagaaaaatcatgccttatgagaactatatattatttttcaatcaaatatgttttttccctttgggagtatgaaaaaggacaataatgtacggcaaattcataataacaaaatgtttttcgaccgctatactgggaataaaattctgtcaatttcacttttttttctgttggtacaattaaataataaaattgtcctgcttccataatatgtgccattttatattacctagatatagtacataaaatgtataaatctattttcaccataataagaacaagctaattgttagcagttccagtcgatattttctaaactagtgaacttaacattttgtttgcttgagacaggagaaaatcagatttttctgactaattctggttacattgagtgagctaaacttacaattagttagagttaagatctgtgtacagggcatcccccatttacctccttcaaggaaatattattttcactgtgatattattaaaaggctttttttttttaaaaaggaactattagtatttattagttggaagcttattcgagttaagatgggtttgtaaagaaaagtttaaaaaggacagttttatttctgaaattttagctttgtgaaatataagatatttctgagttttcacttttttaatgaaaaaagcagaagattttcaatttctaatttctgtttaatttataatcctggttgctaaatgactatgtagatatatactgttcaaataatattaatggtatcatacaactgtttggctaaatctggagaagcaaatttatttagtagtgaacagtcgctcctgcccatgatagatattactaattgatcttggctctatttcttacttagccaggaagctgtttatacratactttgctttaaagtgctattcaatttaatttatgaaacatggtttatggattaaccagggcctaggaggaccatgagtaggatgaaaaggaaaatacttgtagtggaagtcagggagaaagagaagcaagtaataccaattttaaagaaaaagtgaaaacgtagttactttatcaatataatttatgttggaaatagagtttatagtatcaaactatcttcaattaaattccaccattagatattcattcttctgaaagtaatcatttttattcaacagtaaatacctttgaaaggtcaaaaacataatgctatcctagtcactaacagttctattaactttatttcttaaaatatcagtcaccttagaaacatcttttcttgagtaagggtggtggcagggaatgaagtataacagatattctagcacagcgtacagtccaaaaagagcaaatgccataggaagagaaaaataacagattgatgatattgtctaagaagaaatccaacaactttcaagcctattaggtgccagatactgttttatgtgtttaggataaagagaatatgcgctagagtcctaataacaaaaaaaagcaccttactgggtcagagaaatatgcataaatggagatgtttggaaacttttcatttaattcattatcatgcctggaagtagtacagagggtaaaacaacctacaaataaaacacatttatgtgtwttatgtgttgccaataaaacacatttatgttgagtaatacatttaaaaacactcagagagaaaataaatcgccccaaagacatataagacaagagcatggcatacccaaaagtgttgttcatatataaatgactttacatacataagaaatatgatgatcttaaggagcattggttagtaatagaaacgtataaaaatcagccacgaagttgaagaattgttgttgttgttgttgttgttttgtttgagatggagtctcgctctgtcacccaggctggagtgcagtggcgcgatctcggctcactgcaggctccgccccgggttcacaccattctcctgcstcagcctccckagtagctgggactacagcgcccgccacctcgccggctaattttttgtattttttttagtagagacggggtttcaccgtgttagctaggatggtctcgatctcctgacctcgtgatctgcccgcctcggcctcccaaagtgctgggattacaggcgtgagccaccgcgcccgcccggaagaattctatccaaatactrcccatgttaataggtaaaacatattttagttgcaaattggtttaaggagaagagagggagagaatttacaaatttctaggtttatagaaatttaaaattcaagggtacagttgacttgagacactgcttgagctcagaatttaataccatcaccagaaattggtttttctttctccctgtctcacctgtgcttttctctgtgtcagctccattctcaggtaccrttggcagttttcaggtaccatttccttggtttacaatccaggtagttagtttctgcttctcaacaattctcaataatttgattctcastggtacaggagttaagaataaattacttaggcagatagtaagggtatgggagtcctcggtaaggctttcctttttaatgaaaagcagtcccaaatcattttctaacaaagagcagcctgtaaagttgaggggcagacacagagaagcaagctgggagcttgcacgtgtgaatgtggcaggaactaaggactagacatgttcaagatggcggctccatcttcccttccttttgtcaggcatatgtacaataagaagcagacaagatggtgctgatcaactggaaagtccatttgcattrtaagattagggtggagtgaccagccttccccttgcctgccctatgtaaacgtcatacctgatggaacaaatctgtgagccctatgtaaatcagacaccacctcctcaaacctcagaccataaaatcctatgcattggccaccagtgggtcacttcgctaggaaacacctctctctatagagacagctgtttctctttctctttcttttctcttctgcagattaaacctccactcctaaactcttggtgtgtgtctgtgtcctaaatgtctctggcacgcgacaacaaacaccagggcacataccccagataacgtagctgtttcatcagtgactctaattgtcctgtttttctcttcctatagatgttgggtgtgtcaaagtagagatgtccacacatctatcttgggagaaaaaactggagtcttttaagtattataattccataatccaaacctggttctctatttctgagagatattaatagatgttctgcctatttctccaaaaattctatttaggaaatgggacttaggagactttcctcttagacatcartaatgaacactggcatattaaaatctgggagaagtcttgcagtgagaaaaatttatagaatttgagtacatattatgttttatataacawgattttccttcatgagaccattgagatatagtttgggaaattataagactatctcaaatgtaaacataaattattctygttataatagcctcttgccattaaatatttaaatgatagtattygtcttcttatacaccagaatatgccaagcaaacatttggttatagtatgagtctccagctaagtctactggtgaggagaggttgtcctagacctgtccacaagacaattccagtctgaatgactgccgtattgctgatggtaaattacaatacttccccatttgaggcttctaaaacacagatgcccccataatctcttaaagtacttttcagttcacatgctttatcatttcatcctcacaaaaattctgtgaacagattgggtgaatgaaaatacatcttctttacagctgaaaaattgagagtcagaggggaaaatggaacttgcttggagccaccaagaaagaattataaatccgggaatctaacccagatctttgactgcaaaataatattttawaataagcttgtttttgaaaattgtgctttctaccttttaaaacaccaccaatattataatctataatatataaattggactcagtataatacatcagattcacagccagaagtactgtgtgttttcttatgagaaatggattcacttgtgatgggctgaaaatatcagctttctaagtctgcaatgtagttaagttttgatcccgaaatttggtatatttaaccagctatgcttcattgggaagccacctagaggccagccagctatcatgttttggaagcacccaactgtccttttaaggattttctctggccttcagttttgcccattgtggtttgattttgcaaaagatgatcawggtactgttctgagaagctcaatgaatcttatgragggctcaaattgagataaagatacttctaaagctttgcaattaaaatttatttctcagctaaaaccttaacttcttttaaagggcaatatattttattcttgataagctaccaaaaattttaaaatcatgaaagccaatactaatgaggttttgcaaaaaaatgtgcaatattagactagtggcaatggtaacattgctctaggtagtccataaaatatttaggtgctctaattctagaaactcaagtagcgaatttataaataaaaaaatatggtaatgaaatggaaaaacttacaataaatattttagcatgagagtgatttgtaacagtgaaaatttttgagcaatcttattaccaaaccacaaagagatggttaagcaaataatgctgtattagataaagggaaaattctgttatcactaaatttgaatgtataacgactagcaaccttaaaaattgtaagttamatatgcagtgcatccaattgtacattataatgataattaataaaatgtgtaatttaaaaaaatttagatgggaacattgaaaaatggaagacattatttctgcttgtgaggatacagtagattttttttccctcccaaatcactcttgggtaatttttaatacagattttttaaatgaagtaacagaatgctgtaaaaatattcaaaggaaatctaacaattttatgataaaatattgagatgtaagtaaatctttcactacggagtaggttttttcccagtgtttaattatatcacactgacatcaaaatgtgtaaaatgcagtgctgactgagttaaaattggaattcactggaaatgagaggttctaaaacatgaaggatcgaacgttgtttctgagtaagagatgctcccaaacatgaattatataaaatagactatgccttgtttattttttattacgagttttcctattttttctgactcacaataattccccaattgaggcttctaagatacagatgcccacgtaatctcttaaagtatttttcagttcacatgctttatcatttgatcttcacaaaaattctgtgaaacagattgggtgaataaaaatacatctttacagttgaaacattgagactaagagggaacagagaacttgcttggagccacccaaaagaattataaagctgaaaatataacctcgatctttgacttcacaaataatattttataataagcttgttttcaaaaattgtgccttcttctttttaagatgccaccaatattatgtataatctatgctaactccatattggcatacattgcttctgaattacttctgagattaatgttcattgttagaaaaatattataagtgtccccaggacaagactggatcttccctttagttactcttcacatttggaagcagcttgatagcatcgcggcagtgcctaagacatacctgattaaataatggctggaaattgtagtattttcctgatttgattaacactttaatttacttgtaaatcacttttagagatagtgtaaaatgcagagaaaatgattggatttgtggatctcctggataaatgtagttttgagacccagaaagcaggtatgagataagctcagaattctaccaaaagtacggaaaaagttcttgtttactaaattttctgttttattataccttttaagcaatttatcaagaacccccagtattccactttattaaacaatctaacatattagattctataatttgttttctactaatggtttgaatagagctcactatactggaattatcttagtattcttttatttttattttaggctctgctattagctgatggttattttattacctttactgactggcagttagatttctatcctgttacagattatagaatttggggtaaaatatatttttcttctagacattttctttagtgaataaaattattttgcttgatttggcattttgaatttaccaagatcattttgacaactaatgtatttttaatcactattttatgctatactcatgtaatataccctctgttctcatagttattaccacactgtaccttgtgcttaattctcccttcttctcttactgaatataagctctggaaggcagggactcagtcttaattttcttggtattcttttgtctgttataatacctagcacataaacatcctcaggatgttcaataaattagagtttataagtgccttttamatattttaaaaagtyttctgttttttttctgttgtattttctagaaacctaatttacattattaaagtagcaaatccagtgtgaagctgggtgtcacatttagagtttctgaatttgaaattctatttgaaaatggaggaattataggaaatgggagtacgcattaaaaatgaaagccagtttcataaactaatagacaaaaagaaatctaaattgatggctccataacaagcactttagtttctcaccacttgtttcttcagggcttagtgtctactctcactaattataatttttcaactgcacttgataattgtgattaaaatgtttttaattatctgtgtttttaattttaatttacccccttgttttctttgaatttgaattgtactttgggccaggtagaagtcacatactgacctttaacatatgatttaacctttctgggatggtgccatctctaacagaagagttttcaaccaagatcaccaacaatttaattactgtagtaattattcttttaaaatttttttatctgaaaaaatttttacccaacacctgcaaatgtagtaattattcttgctttactctattctgtcaacaatttgttatctaggaaaattatcattgaaattaaaatacacacacacacacacacacacacacacacagaaagactttataggatttaaactttatgaattaataattttataattattcaggcatttctgattacataaatcaaataatcttgatgttgaaaacttcatttcaggatacatttcatagtacagtgtacatttacattacttaccttatatgttcttctttaagttgtatttctctggccagtagaaatgccaacagggcaaggtcagaggctcgtttcgtgtttaatgattcactataacactgtgaaaggagttttggtctctgttgattttatcttatcagttgytacacaaataaaactacatgttcccatgatcggtttgagcaccttgagtgactgggaaaatcagtttttccaatctcttccgttaacacttactattgacacacttaattcatacaacttaactgttactagtattaatttagttgtttaaacttccctctttcattaacttccaagaactaagatagggkatcartgctataaaagggcttttataaatttatcttagaaagttgattatttgaaattctcaccttattttgctgttacccgcctaagatctaaaagtrccatcgatgactcagcagagttggaatgaaaggtgtatgttgttgctttgtcgtgtatctcttctcttgtaagaatatattggcgtcattttcctcttaaggcttggagttcagtctatacagcccttcccaaaactttgtggccttgggcatcttttataatctaaaagataaaaacctctgaaaagacttaagatttgccacattaggaattaaaattcagaaatatttaaaatacgtatttaacattttattttaaaacaacaataataaactattgcttggcaaaataaatcatatatttaattttacaaatagttattaaaaaaataataatgagaagagttttttcacatttttgcaaaacttgtttgtgtttggcttaatagacaaatggattctgacatctgcttctgaattcagtctgctgcaacatactgttttgaatccaggatcactcagatacgtagttgaaaagagaaagtatttttagataattgtggatattgttatttggtatttcaccaaaattcattaggtgatagtttttcaaatgatagttgcaatatggaagctctaactgtactgataaagttttcctaaactattacattaaaattcatcttgcaatggatgttttactcatgcattttgtaattttgtaacatcaagcatattttatttggaaaatactgatttactaagttatgcaatgttccaaatgttgacacattttattatacaatatcaaaaagcaaatcgcatttgttaatgtaactgctgacctaaatctttaagtattaggaacatataaagctcagagtggtgggtacagrcttcacaaaattcaaatttttacttcaaggatttgattttgctattggcaataattatagtaaattgttttccttgagttacaaagttactttctttcatttttgagaataccaaatacctcatacccaagtctcaatagccatggtatctgctagtcatttcttcaagaggacagcattaccragaaagrgagttagttcagttttcarttaaaataaatgaaccttagctttttctagacacaatcattatcctttgatatgtaacaaaagtactttatgtataagtcccatgtaattacacagtgtgttaaaacaagatgcattcaaaggttgagattttattaaagataatgattatactgcttcatataaaaagtatttttggccgggcgcggtggctcacgcctgtaatcccagcactttgggaggccgaggcgggcggatcacgaggtcaggagatcgagaccatcctggctaacacggtgaaaccccacctctactaaaaatacaaaaaattagctgggcgtggtggcgggcgcctgtagtcccagctactggggaggctgaggcaggagaatggcgtgaacccgggaggcggagcttgcagtgagcccagatcgcgccactgcactccagcctgggtgacagtgagactccgtctcaaaaaaaaaaaaaaaagtatttttactgctttcattcttaatgaaactgacttaagaaaaaaattcctgtacgccactgaggaaaacggtaactactagaaaaatctggagccacttccttgattggtgctagctgctttacccacaatggcacttgtactatgagcacaaatatcaacaaattgaaaaaggcaaataacattttgtatttttatgaaagtggttttgacctcagggaccttctcaaaggatgtctgagacccctagatttatagggacactgagaattactggtctagtaaaaataacttctatctagagttaggaggcctacttaggtagctcggctttgctagaattattttgtaatttggtaagtgttttaaaattttaacctcttaatstcagtttactcatctacaaagtccacaaaaattataagattaatgtgtgtgtttgcataaacatgcacctcattagaactaatgaaatgattgatttaccctatagcccacacaggaatacagtgtggtaayattacctaagcttaattaatgaatctcatattttttgttaaaatgtgatggtgggtattactgataattttttaaaatgcatgaagttgcatgaaagttagtgcagtgtgagtttgtcacatttatatggkaactcatattatatcaatatagtrattagaaattggattacattatattagagtgctatgcttttcaatctttaactgaaaattcaatttaactatttttaaaatatattgaaatattgctttacaaagtagtactagcacttgcaagttaactgtattctgttgctaactatggattataatttaaaagaattcctaaaacttctgcacttttgtttttctcattcacagatcaatataagaatcattattttcccttttgtaggttattataacacagtaattcagcaccatcatttggagtcattttttaattactttagagagctatacttagtcttggcaatgaagattgacttgagctctcaatcatatgccttatggggatatacaaaattctacaatatgtctgtaaatattggtgatattcttgttcatttccactttcaaaatcctgatgttggccatgctttctctattttgcaccatgtccacccacatatgtgtttgagcacattccccattttccattaaaattcacttatatctagcattgttagwatagtaaactaaaaacaaaacctctttctataaaattgccatttaaagtgatgcaaaaacctttcttttacccctacaaacaagtggaagcactgaataatatggatgaatcatctgtgttcttatgaaagataagaaawccccctgtggcacaaacagaaaggggacaaaagctggggttaggagcaaaagctgattctgtgttcactttagggatgtgagttaaaacagactgctacaataaatcttgaagctacaaagggcttctcaaaagataaaggaatattggacataccgtgacctccagctgcagcagaaaataaaataaaaattttatcctgatgtaaatttaagtgaggaaaaaatgtctccctttgagaaatcaagaccttaagcctgtgcctcaggtgatattatatgtaactatacctctctctgtcctgcaaaaacacccagtcccagaggttaaaaaaaaaaaaaaaaaaaaaagttgtcctcatccagagatactcttggaaataagtaatactactctagaactaccttcttaaaatccaggctgtattatatttggtataggaaaaaaaatacaagctttattttgctaaaraggaacttgcaattacaaatagatcataacagaaatcaatgaaaaatgtaccatgtatgaatcatcagttataacaaagagaagcaaaacttggcataatagagctaggtcaagactataaaacaaatctactgtgtataaaacctgtaaaactgtaaaggaaggcataaaaattaccacaaaaggacaaaatgtaagatagaacaaaatgctttaaaacagaaatgaggcagaaatacaaatatttggaaaaagcagattgaaaaaagaacaaaattagctatatttgatatttaaaaatataattgaaacaaaatataagcactcaatgaatggattaaatagcagattagactcagctaaggctagaattagtagtctggaaggtagttgtaagggaattgcccagagtggcagcacacaattattaaaaaaaaaaaaaatagaataaaaaatctgggacagttaagagacctaaaaatagaatctttctcataagactttccaaggagagaacagagaagttctcagaaaattttcaaaaacataatttaacttaaaaaaaatggctccattgtgagagcacagtcatcacaggactgcttcctaccctgggaaccatagcccctatatctctgcatcctgagagctcccactgacacaccccagtgtccacccagaaggctgcagcggcagagcattggcaggaccctaagatgctatgtggttcccattactctagcccacagggagtactactcccaggtgaaaggacagtgcagtgcacacaaaaaggcagaccctgggacaaaggaaaccaaagtgtatgtttccagagcttgagggcaccctatttgaggttgtaagaagttactccaccctaccagtggcaaaaattctgtgcttagccttgcaagcaaataatgagatcccctctcacagacagaatgacttgtgcattcaggctcatgcatggaaattaggacctcttttatccctccacacaccactgcagacatagctgcttctgctgccatcagacactggggcaggcaaaccaaagactgactgtctggggctgtgagtgatgactgcatccccacaggtggaatgatctccatgtccggggttatgtttgaagcatgaggtctctccccacatctgggtggcactgtagcactgctgcagaatgtgggagagtgtctggggctatggatggagaccccgcaccacagtcattgccagtaacagtatgcatcacccaggacacagagagttatctcaccactgctactgccatcacaccatgctggcaacctagacatccaataatctgctcgccaacctggctcaccactggcatcagagcaaaccacctggaggctcaagaatcagcctgctggtcccactaacaccagtgtgagccatatgctgccttgaggcctaagatgaggcatgctctagcccatcactacctccaccagagtctgaagactggcccagcttgcatctctgtctctagaaaaacttcaccatagcttccccttataaccgtatcctaaaccaccaaggaaatcacaggtcccactgatgttgtctacagctaaagaaatcataaagaaactacaccactgcacatttatgcaaataaactagaaaatctaaaagaaatggataaattccgggacacatacaccctcccaatactaaaccaagaagaagctgaatccctgaatagaccaataacaagttctgaaattgaggcagtaattaatagcctaccaacaaataaaagaccaggaccagatggattcactgccgaattcttccagtggtacaaagaggagctggtaccattccttctgaaactattcccatcaatagaaaaggagggactcattttatgaggccagcatcattttgataccaaaacctggcagagacaaaacaaaaaaagaaaatttcaggccaatatccctgatgaacattgatgcaaaaaccctcaatacaatactggcaaaccaaatccagcagcacatcaaaaagcttatccaccatgatcaagttagcttcatccctggaaagcaaggctggttcaacatacacaaatcaatcaacataatccatcacataaacagaaccaatgacaaaaaccatatgattatctgaataggtgcagaaaaggcctttgataaaattcaacaccccttcatgctaaaaactctcaataaactaggtatcgatggaatgtatctcaaaataataaaagctatttatgacaaacccacagccaatatcatactgaatgtgcaaaagctggaagcattctctttgaaaaccagcacaagacaaaaatgccctctctcaccattcctatttaacatagtattggaagtcctggccagggcaatcaggtgagagaaagaaataaagggtattcaaataggaagagaggaagacatattgtctctgcttgcagatgacatgatcgtatatttagaaaaccccattgtctcagtccaaaatctccttaagctgataagcaacttcagcaaagtctcaggatacaaaatcaatgtscaaaaatcacaagcattcctatacatcagtaatagacaaacacagagtcaaatcatgagtgaactcccattcacaatggctacaaagagaataaaatacctaggactacaatttacaagggatgtgaaggacttcttcaaggagagctacaaattactgctcaaggaaataagagaggacacaacaaaaggaaaaacatttcatgctcatggataggaagaatcaatcaatatcatgaaaatggccatacttcccaaagtaatttagagattcaatgctattcccatcaagttaccattgactttcttcacagaattagaaaaaactactttaaatttcatatggaacaaaaaaagagcctatatagccaagacaatcctaagcaaaaagaaaaaagctggagccataatgctacctgacttcaaactatactacaaaactacaataaccaaaacagcatggtactggtactaaaacagatatatagaccaacagaacagaacagaggccttcaaaataacatcacaaatctacaaccatctgatctttgacaagcctgacaaaaacaagcaatggggaaaggattccctatttawtaaatggtgttcagaaaactggatagccacatgcagacaactgaaactggaccctttccttacactatatatacaaaaattaactcaagatggattaaagacttaaacatatgacgtaaaaccatagaaaccctagaagaaaacctagacaataccattcaggacaacggcatgggcaaagacttcattacaaaaaaaaaaaaaaaaagcaattgcaacaaaaactaaaattgacaaatgagatctaattaaactgaagagcttctgcacagcaaaagaaactatcatcagaatgaacaggcagcctacagaatggaagtaaatttttgcaatctatccatctgacaaagggctaatatccagaatctacaggaatcttaaacaaatttacaagaaaaaaacaaacgaccccatcaaaaagtgggtgaaggatatgaacagacacttctcaaatgaatacatttatgtggccaacaaacatatgaaaaacagccttatcatcattggtcattagaaaaattcaaatcaaaaccatgatgagataccatctcacgccagttagaatggcgatcattaaaaagtcaggaaacaacagatgctggagggaatgtgaagcaataggaatgcttttacactgttggtgggagtgtaaattagttcaaccattgtggaagacagtgtggtgatacctcaaggatctagaaacagaaataccatttgacccaggaatcccattactgggtatataaccaaattatagattataaattattctactataaagacacatgtacacatatgtttatttcagcactatttacaatagcaaagacttggaaccaacctaaatgcccatcaatgatagactagataaagaaaatgtagcacatatacactctggaatactatgcagccataaaaaagaatgagttcatgttctttgcagggacatggatgaagctgtaaaccatcattctcagcaaactaacaccagaacagaaaaccaaacacctcatgttctcactcataagtgggagttgaacaatgagaacacatggacacagggaggggaacatcacacacctgggcctgttaggagtttgggggcaaggggagggatagccttaggagaaatacctaatgtagataacgggttgatgggtgccgcaaaccaccatggcacatgtttacctatgtaacaaacctgcaccttctgcacatgtatcccagaacttaaagtataattaaaaagaaagaaagaaaaagaaatagcccagtaaggcaaaaataaagaaaaaataagaagaatgaacagtctttctgatatatgggataccataacgtgaccaaatatacaaattattgctatttccaaaggtgataacagaataaacgagtttgaaaaccttttttaaaaaatagaagaaaacttctcaagtctagcaaaaaatttagacatccagatacaggaggtccagtcatcccaaatcagatacagtgtggaaagtcttctccatggcacattatagtcaaattatctaaagttaacaacaaagagaaaattctaaaagcagcaaaagaaaagcatctagttatctataaagaagatctcattagactaacggtaggcttcttagcagaaaccttataggacagaagagaatgggaggatatattcaaagtataagaagaagaagaaaaccctgctaattgccacccaaggattttgtttccagcaaaattatccttcataaatgaggggaaataaagtgtttcccaaataaacaaatgataaggaaatttaccaccactagatatgaattacaagggagttctaaatctggaagtgaaagaacaaccattaccatcatgaaaacacatgaaaatatgaaactactggtaaagcaaacacataaatgaggaagagaaaaggcttaaatggtaccaccatagaaaatcaacaaaccataaggacaatcaataagacaaaaagaaatgaatagataatatacaaagcaaccagaaaacaattaataacatcacagaaataaaacctcacatatcaataataacccccaacataaataaataaaattattaacttaagagatatacactggctgaatggattaaaaaacctgaaacaactaaatgctacctacctgaatgtactttacctgtagatacatatagacaaaatttaaggggtagaaaaagataacccatgcacacagaaaccgaaagcrataaaacttgtatcagctaaaacagactttaaagcaaaaatcactaaaaagacaaaggatatcattatataatgataaagacatcaatccaggaagataatataacaattctaaatatatatgcacccaatactggagcatccagactcataaagtatattagtccattctcatacttctaataaagacacactcaagactgggtgatttataaaggtaagaggttgactcacagttcagcatggctggggagaactcaggaagcttacaatcayggcagatggggaagaaacacatccttcttcatatggcggcagtaaggagaagtgctgagcaaaagggggaaaagcaccttataaaactgtcakatttttgtgagaactaactcactatcacaagaacaggatggaagaaaccacccccatgattctattatctcccaccaggtccctctcatgacacatggggattatgagaactacaattcaagatgaaatttgggtggggacacagcaaaaccatatcataaagtaaacagtagatgtaaagaaagagactacaatacaatagaaatggggaactttgtaacccactattagcattagacagagatagaaaatcagcaaagaatcatttagacttaaactggacttttaccaaatagacctaacagaaatttacagaacattttatctaacagctgcaaaatacacattcttctcatccacacatgsgacattctccaggattgaccatctttttagccacaaagaagtctcaacatagttttaaaaaatcaaaattatatcaagtaatttctcagactacaatggaataaaactagaaattcgtcccaagaagtactttggaaactttacaaatatgtagaaattaaatgacatgttcctaagtgaccattgagaacattttttttgaagcaaatgaaactggaaaaaacaacataccataacttgtgggacccagcaaaagcaggctaagagggaagtctatagcaataaatacctacattaaaaaaagattttaaataaagaatctaacaaggcacctcaaggaactagaaaagcaagaacaaaccaaaccccaaattagcagaaggaaagaaataataaataagcagaaataaataaaattaaaactttaaaaaatacaaagattaataaaataataagttgtctctttgaaaaaacaaataaaattgataaactactaactagattaaccaagaaaagggaagacccaaataaacaaaaccagaaatgtaaaaggagacattataattgataccacagaaatacaaaagatcatcakaagctatatgagkaactatatgctaacaaactagatagcatagaggaaatgaataattttctgaacacgtacaacttaacaagattgaatcaggaagaagtagaacacctgaacagacccataataagtggctatattgaatcagtaataaaaagrctcccaagaaagaaaagccaagtactgaatggattcactgtggaattccaccaaatgtataaagaagaactaaaaccaacctacctctaattacttcaaaaaatttaagaggaagaaactctccataactcattccatgaggccagcattaccctcatactcatactgaatgagggaaagttgaaagccttttctctaagaaatggaacaagacaagagtatccactctgaccactcttattcaacatggtactgtaagtccaagccagagcatttaggcaagaaaagaaaaggcatccaaattggaagtcaaatagtccctgtttacaggtaataaaatcttatatctagaaaaaccagaaattttcacttgaaaattcttataactgrtraacagattcagtttataaaacaacccatttcatgaggccagcattaccctgataacaaaaccaggcaggaacacagcaaaaaaagaaaaatataggccaatatttccgataaacgtagatgtaaacgttctcaagaaaatactagagaaccattccaacagtacatcaaaagataatacatcaaaagataatacatcataatcaagtgagatttatcccagggataaaaggttcattcaacacacaaaaataaatcaatgtaacacataatattagcatatgattatctcaatggacacgcaaaaaggcatctgacaaaattcaatacctcgtcgtagcaaaaattctcaacaaactaggcataaaagaaccatactttaarataataatggccatagatgacaaacctacaggcaacatcatactgaatgagggaaagttgaaagtcttttctctaagaattggaacaaggcaagagtacctgctctcactgctcttattcaacataatactatcagtccaagccagagcaattaggcaagaaaagaaaaggcatccaaattggaagtcaaacagtccctctttacagatgatataatcttatatctagaaaaaaacagaaattctcacttgaaaattgttagaactgataaacagattcagtaaagtttcaggatacaaaatcaacatataaaaattagtagcatttctatacaccagtgacaaactagcagcagaagaaatcaagaagccaatcccatttacaatagctacaaaaaagaaaaaagaaaacctaggaataaatttaaccacggtggtataagatctgtacaaggaaaactacaaaacactgataaaagaaattgaagaggacgcaaacaaatggaaattcacctcatgttcatggatcagaattaatactgttaaaatgactatactgctcaaagcgatttgcagattcaatgcaatttctatcaaaattccaatgtcactgttcactgaaacagaaagactatcttaaaatttgtatgaaactaaaaatgatcctgaatagccaaagcaatcctgagcaaaaagaagaaaggttgtgacatcatgctacctgacttcaaaatatgctataaagctgtagtaatgggaaacagcatggtcttggtgtaaaaacagacatatagaccagtggaacagaatagagaaaccagaaataattccatgtatttagcaacaatttatctacacaaagccactgagaagatacattggggaaaggtcagtctcttcaataaatggtgttggaaaaactggataatcatatacagagaagaataaaaattgacccctatctctcattatataaaaagtcaactcaagatggagtaaaaaacttaaacgtaagaccagaaactataaaactactaggataaaacataggtgaattgctttaggagattggtctagacaaccaataaggtcggctaatacctcaaaagtacaggcaataataacaaaaatagacaaatgagactatctcaaatgaaacattttctgacaacaaatgaacagtcaacagagtgrggagacaacctacaaaatgagagaaaataatttcaaattactcatccaccaggggactaatatccagaatatataaggaactcaaacatctcgacagtaaaaacacaaataatcacattaacaaggtggcaaagcacatgaataggtgtttctcagaaggagacatacaatggccaacaggtatataaaaaaattcttaacatcactaacatcaaaatagtgtgaatcaaaaccacaacgaggtatcatctcagttagaatggttactattaaaaagacaaaagcaacagatagtggcaagggtgtagaaaaaagggaacccttatatattgatggtgggaatgtaaatcagtataaccactgtggagaacagttgacaatttctcaaaaaacttaaaatagaactaccatatgacccmagaattccactaccaggtatctatctaaaggaaaagaaataagtatatcaaagagatacctacacttgcatgtttattgcatcactattcatgatagcaaatatttggacgtcattctaagtgtccatcaatgagtatgttgattccatcacttcatggattccacagtgaatccataaagaaaatgtgatagatatacaccatggaatactacagagccagaaaaaataaatcatgtcacttgaagcagtatgtatggaagtggaggtcattatgttaaaagaaataaaccaggcacagaaagacatatactgcatattctcactgacgtgggagctaaagaacttgatctcatggagatagagaatagaacaatagattacagaagtgtcaagtttggggggtgtgtgcgggatgaagtggggttggctatggttacaaacatatggttagatagaagaaatgagttcaaatgtttgatagcagactagagtgactatccttagcaataatattatgcatatttcaaagtaactagaagggaggycttgaaaaaataccaatacataaaactgataaacacccaaggtgatggatatacctatgccccgacttggtcattatatattctttgcaagtaacaaatgttcacatgtaccccataaatatgtaaattattacatattaataaaaaaagaagaaaggaaataaagaaaaatcaggtaaaatgggagaagaaagacaaagaatggataacaaagtgtgttaaaaattatggcaaatattgcacaaataacatgtagaaataaatccacatttttggtaattataataaataacaaataaaatatcttccaaattaaaagaaaatgaccctgagtttgaattaaaatataaaggtgtctggttaaatgcaatttgtgaaatacattatgaaaaatttattcatggtatcttttgagaacctagtatatgccaagcattgttctagatacttttagtaaaacaatgaatcaaataaaaatttctttccccaggaaactcaatttccagaatgggagacaaaataaacagtaatgaaatatactatatgctatgtaaacaatattaaatattgaacatatctaaaacagatgttttagaatttatataaaaatgtatgtcaggtgatacttatcaaaagaaaattgagatattaatattaacatgacagaaaaataaactggaagcaaaaagaacattattagcaaatagggatattctagagatacagcaaattttcgacagaaggggaatatctatcctaaatctgaatgaacctggtaatataaccttaaaatttactgaataaaagttaaagtaattaaaatgagacacttaaaaatattcaataatattttgaaattttgaagtttttaacccaatcctttaaaaactgctaaagaaaacaaatattaggatatagaatatttaatcaacaaaatcatgatcaaaggcttccaacatagagtagaagttttttaaaaaaattcatttatgarctatacaaaacattgaaggaacaaatactttattgcgtataaacttatgcagagtggaaaatggtggaaactgaccaactattttgtgaggttattataacttggtttgccaaagcaaacaaacaaacaaagacaaaggaaaattatagtttaagtttatttttgaacataaaaacaaaaatcctaaatatagtattttaaagagaaaacaggtagtgtctcataagcaggttgattttaacctaagaatgttttaccattggaaacatattaagatttatttacattttaacactcgaagaaaaaaagcgtatgactatctcagtatacgtaaatatttataagttaaaattttacactaattcaagataaaaagtcttagtaaacttggaatggatgagaacattcccatcctaataaaaattatccaacataactagaaagaaagaaatatcaatacaatataaacagaaatacctaacaaatatgattcttggtcaaagatatttaaaacaattacagtcataatgaattaaagaggagaattactaacactatgtctattcaacattgtactgaaggtactagccaataaaacatgacaagagaaaaagtaagtgataataattggaaagaatagttgtcattatactttgatgatgtgataattaatatggaaaagaaagttgccaaggtagttatctaaaagtaaaataattatgttttagataactaccttggcaactttctcaaagttgtttgaggttatactgagggattcattgaaatttgtttgtaacattaaaaagcaataaatggctaacagtataccaatatcagggataaatatatcacggcttactcataagattgggcactaaagagcaactgcaaattaatgaactagacctttacatatgaaagtacaaaaataagaaaataatattgagtgaaaagtaaaatatcttcatagtataacaagtatatgaattctgatcattaagcacaataatttgagttacatatacatacacatatgtacatacggatataatcatattcaaggtgtaaaaaatatttacagggatatacacactgagttcagaataacactttccacttgggaagcaggatgagggaagaatatgagaatatgctttaactttatttaattatttatttagaaatagggtcttgcgaggccgggcgcggtggctcacgcctgtaatcctagcactttgggaggccgtggcgggcggatcacgaggtcaggagatcgagaccatcctgcctaacacggtgaaaccctatctctactaaaaatataaaaaattggccgggcttggtggcgggcgcctgtagtcccagctactagggagactgaggcaggagaatggcttgaacccgagaggtggagcttgcagtgagccgagattgcgccactgcactccagcctgggtgacagagcaagagtccgtctaaaaaaaaaaaaaaaaaataataataataataataataataatagaaatagggtcttgttctgccacccaaacgagtgtggtggcacaatcatagctcattgcagcctcaattttccgggcttaagtgatcctcctcattcagcctcctgagttgctgggactacatgtgtgcaccaccacatccggctaagttttacaagtgttttgtagagatggggtcttgctttgttgcccaggctggtcttgaactcctgggctcaagtagttctcccacctagacctcctaaagtgccagcctaactatatctttatttctttatttttttacataaaagagacatataaaatatatttttttacataaaagagacataccaaataaatatggcaaatatggtaatgtttgttattcttaggtagcgtgcccactggtgtctgctatataaattacatattatctgcacgctgaaatattaaagaaataatttctttacttaataatattttcgtatcagaaggagaaggattcacattgctgcaacctctgggggctctttggcacttcctcagcattgataatttctgctgctcccscatctgatgtagtaccagtgataatccacttttctgttccttttgtttccaatatcttttttcccttcccttttttgagacagagtctcgctctgtcccccaggctggagttcagtggcgccatctcggcccactgcaacctccgcttcccaggttcaagcgattctcctgcctcagtctcccgagtagctgggaatacaggcgcgcggcactacgctcggctaatttctttgtatttttagtagagacggggtttcaccatgctgcccaggctggttttgaactcccamgctcaagcaatccacacgcctcggcctcccaaagtgctgggattacaggcgtgagccaccgcgcccagcctcccttccctttctaaggagcaagaaatagaaaaattctcccttttttcatgtagagcttcttaaatatgatcagttttcatgtttgccatcacctctacaccaagcagctgaatgaaatatttttccatgccaacatggttcttctttaagaaaacctttcgtatcatatttgaagataaaaatttcagctctttacagttgttttagtaaattcttgagggcaaatgctttctgctmatctgctttatcctccaagacttcaaatgcagaaaatcatgctggcatgtgtggtaaaaagccatcaaatcattaaatatgaattcccttttcccggaatttgcctcagtgcctagaatgataaaatagcaaaagcaattttgatgataataataataaattatcatgtgaaacagtcattatgcattctctaaaattaaaaaagtttaaatatttaaaatgacaacgataaggaggcctcatattttcctttttctgtactaattatctatttttaacgtgttgatgctttgtggtgctataataattttgccttgccatccataattagtgctttgggttttcccatttcaatttacttctaataattgatgatggcaatttacaattttaccttatttctgggatactaatataaaattacaatttacttacactaaactctgaagaacttgccaaatgaataccaagaaggaaaattaagaagatcatggttttgaattcttgaatctcagtcctttactgttttctcgagctaaatatccttttaaatggataagatattgcagattatattaagaatataatatgtaaatattcacaggtggcctaaaatattaaaaagtgtatgtttgttgatatttatagtcatggatatagtgtcagcttttagcatcacatttaaagaaaaggatatattaatatctacataagattaaaatgttaatttacttttaaagctaatatttaaattcatcacatccagagccttctagttccctgtttcttcttagcctttcaaattcctgcaaaattcctctggagggcactattaccataactaatacaattagctccagatggcaaggtagtgaaaggcactgggtcttagtactgtttatctcctttcaaatcttagtctaatcatgactttaatttttttttcttcttaagagaaaaaataaactcatcagcctatccctattaagaattatagaagttatcctcactcacattatatarcattataatccacttaaaaacaaacactattgctgccctccttattacttcttaatacaactccaatgaagtgctagcatgaatagttacttctgcatagacattttcttactgcttaaaaaagaggcaaatagaaatttgagtagcagtagaggaatcagttaaacatataattacatctaaattaattttcttcagcataatcttttgcttattaaatgagaatttaagacaacaaacaaaacccaaaacaacacaaaaaccccagaggtcaaagagtcaatgtcattcagaattctaattgaaaagaaacgcttttcattgaaaagcgattgagataattacatatacaaataacacctgcgtcagtgcactatttctctgtagcagtgtcttcttcggtatcttctgtatactttgtatctctgaatctttttcatatactgtttaaatgaaaaatcaaaaggtatttggagatttcataaattcctaaataacaaccagatatgaaaaactacctcttagatttagtaatcttagaactcttagtagagttctccagaagtactctttcattttaatgatgtgtaacataatagaaatgcagcaaatacattttttagcatttaaaaacaatttgagagggaaagaaaaaaatgcacatagaatgcaattaaaaacagagaaaatatctttcttaatctcccaaaatagtacatattacctaagtatataccacatccatctatatccatttctcaacgattagaaaacattttaatgtttactttcacattggctgccctatatgaagcacatcactgcatattgacatttataacaggtagttttttcttttcccaaagaaaataacttttttttccttgttcccagtaggttatacaattgtgttgcttaatggctaactcrtcatgggcatttgctctaaaatgatggtagggaaggaagctccaggagtgagtgtactctgcttcttacagtttcctgatagagcattcctgatagagtgatcacatacagtgtgaaatgtctctgaagccttctgttgtcttaaatagacatgtagtcatatcatttcacatgttactttatataaatccatgmtcattttaaaagaaagagaatatycaaattactatgccatgtttagcgctgactgtagcacccctagggtttcacagccaaaatcatatttgagaaacaaatgaaagaacatggtatttgcaattaagtgctggtttcgatcttaagtttattgctcactgatattggaccttgtataatttatttaatttctctaacattcaataactcccctgtaaaatggagttaatattatatggaaccatgtgaaattgctatgtatgcaagtttaaagtagtggaatactaaacatttctaatggttcaagcttacttttcccacatatgtataaacgaatgtgtgcaaaattcccagtaaagtgcktaacacacagtaattttaattatgctaagaaaattgttgagggctctatgctagcagtataaataaaaatgctttttctattacaaataaaaatgttttctatttatagtgagaaggccatagaattagaagtcacagttacattttttatcattcattaactatgagtataaaaatcaacatttttacttttcaaacagctagttcacatggttgttaacatgcttgaatgagataatatatgttagtatgtgtgtcatgtgtgtttattcattaaagaaagagtaaactagtataaataggtactatgtagaaatagtacaarcaggtaccatactaggtgctgctctagatgtcagtaagacagcagttaataagacaaagtccattccctctggaagcatacacactaataggaaagaactgataataagcaagtagatagattcaaaagcataattttatatagtgacatcaaataaaaaacagaaatcttagcatgcaataggtgctcaacgcagatttttaaaattcagcttttttcataattatatatccatgccatttaatctagcccataattcttttttctgttgcagcttagtgatatgtgataagagggtccaaatatttgggcagtttgaagaatttctaattattagcttctctggataacaagcattctattgaaaagcttctctcctccttcattaatccgttagcagtaatacttgcttctgtttcaaaggtagtagccataaaattttaaggctaaatgtaatctaggttaagaaatatggtaattgttacctagctatctgaattatatttccctaaataaccagctttcctagatgaaacatttttatttcaccttctctttttatagctgcatccctttggaatctttttatcattttattgcatttgaagcgctttcttttttggggaaataaaaagaacgatttgaactttacaaacagatataaatggaaaggaagaggaggaaggtcagattttgagtctgctaaccttggcagtgtcctttgaaagtagtccctaggtagtgttaacttctgcaagctcacgtgagcctaagatcacccccgggcctagcctgcktggcaaactgacagaggtcacattttcagacaaatgaacaatttccctgataaagtgaaaccggtacttaagcacaagctctaatgagcagccccctgtctttagctcccattttaaagtatccccaaggtttccagtacaatttcatttgacctttagctaaagaccatattttactagatcaccaatttccccaaatccctggagtgttttcctatgtcagcacttatgagaaacccacactacacacaaggcaggtgttcattattcgtctttaagaacaaccagcccctcttctcgcccatttcccctgatttcctgtttcccctttgacgggatgatagaagttttcagactgcattttcagatccccccaaacagcaagctttgaatttatatatttttgtctgatagtaagatatgattgtgggctattaactgctattattttttgaacaatctaaaagatgtgtgaactttctttaaggttatagaaagcacagagtatttatactatttatattaacctcaaatcatttatgttaacttcctcttgtcttttgtttcataattaggatagtataacaattaatgttagtaattgatcatattgctatttggttgggttagtaatttcctttaatcttacattagtggtattactaaaaaagcacaaatcctttttgaatcatctgatgttcaaataataccacagaggttatgagggacgggygcttttcccccactaatayatgcataaaagtgagagaatttccatgctgctttctaaagggaaaagcctggatgggacaccttcatatttttacactttctcactctctcatgccaagggaatagaagtgagttattaactcagtgtcctgtgggtattgcacagacaatgtgatctgcttttcttgtcatatgataaccagacttggataggctttgtctgtataaggatgaggactacagtttgggagagtaagttaattctggagtgagagattattaagcacattgtagctatacatggaaactatatgcatcactctagaaagctgaatcttgatcttcatttgtttccrtcatgcgtacatcttctggtcagttgtaaatgtaggggagaaactaaagatggaatttattaaaaccctaaagccacaacatttataaatataaatataaattttaatctgaaaaatgatgttattacaattaccattattatttccatccatttcaataagtaaaatttgaaatatctatcttgttttggatggaacaagttcaaaaccaaaatcaaaactaagtttgaatgtccttagacatgcttgtattcctcagtgttctcaatccccactattccttagtatctaattcattctgcttaataaaatttgaaaaagctaacagtttaattaaaatttaaagtggttattcatgttagatctgaaaatatgtaagtcataaatgtaatgatagatgtctgaaacagatagagggaaagaaacactgcacgttttgtgaccttttggatgtaaacacctctgcagccattggaaatacaaactcaaaagaaataaatgtaataactactgtaactcatcaagatggtgctgcatgatatttatggtactaaatgcttaatgagaaatattttatttagcccaggcgcggtggctcacttctgtaatcccagcactttgggaggccgagacgggcagatcacaaggtcaggagttcaagaccagactggccaacatggtgaatccccatctctattaaaaatacaaaaattagccgggtgtggtggtgcgtagtcccagctactcgggaggctgaggcaggagaattgcttgaacctgggaggtggaagttgcaatgagccaagattgcgccactgcagtctagcctgggtgacagagcaagacttggtctcaaaaaaaaaaaaaaagaaatattttatttaattcacagaaatctagataggtagatattattatttctatttgacggctgtgtaaactgagctaccaagataagaggtaaattttttaagtttatataggtagtaagttggaattcagatttatatcccaattgtcaatctctacaactcactctattggctgtgttttcttgacctcagaaaaagttatggcttgtgtcttacagaaaaattttttcctccctcgactagtgtggcagaaaaagatgactattgtgtctctcagcttcagaataattttatttcattaatattacaaattttggcagattgagttttatagattagtctattatttactaatacatgtccttaacagttataagctataaatatatacagatacatattttcccaggtaatcattttaaccacacaactaatgcacttcttaattagcaatggaaaattatctgacaatttgaatagatcatttgaaaagttaaaataaacagtttcttcagagtaaagaaaataaattaatatataatacagagggaataagaatttctgtagggctcatatatatagggagaattgaatatattaggaactagaatctaaatttcaagcaacagctacactgctcttagatctatccaggtttacttatccatatcaacagcaggaacatatacccagataaatttctgcttcctccattctatcaacaaattattgaccaaagccctcccattaaaagtaaatatgccttcaataaatctgtatttttccagaccagcaactcatgatttgatatttgaattcttttctgaagttcatttatatttttttctaaaaataagttgttactttgtgaattgaggatgtgcgtgcgcacacacacacacacacacacacacacacagagtcaataattagatcttggaacaaacaggcaaatgataagcaatacaaaaaatgtataaagatctattaaaggaagcatgaatactgcacaaaaggagtccaaggctgaaaataattgatcttgtttaggatattagtagggtgaacaactttcttggtttgccagggactgagggatatctctgcatgctggactttcagtgctataattaggacagtgctgagaaaactgagaaggttgatcaacctaaaatgtgaaattattcaataagaagatacatttgggggcaagtgtttaatcataacaacaattatattatcattatttctaacgtccactggccttattgtgtgccagacattgttctaaggcaaattatgtggtcgttcactatcctctttatataattgaagaaacagaggcatgttgaagcttgaaagggaatatgaacgtgagaatcaggacagaataggtactcgggaatagtaaagatttaaggacactgaagaataaaagcgtgtctaaaggcattaaaattttagttttgattgtacttttgaaaaaaacaagtcacatctgcagactgtgtctgcttaacagctaccagttggaagcttctgagggattaatagaatatgttccacagtgaacatagagaagacagtttgcatgccaaggaatgacagggtaaaagacccaggtgctgaaatatttaatatggcaggaatattggtttttatgaaaggggaaaagagatacgggtgttgttaaaatagattagggccagattttgaagtatgtgtsatttttattctgagcagtgatcatttgtcaggggcttttaagtaggagcatgaccctattttacctatgtttttcaaagatgaatttggtgcagcattaacaataatttgaagagaagaaatggagaaaaagagcagttgagagtttatggctattgtcttgtaaaaattcataatgacctgaaggaagtcagcaacagtggggttgaggagaatagagccaaacacatatgggaggtaaaaatgagtatgctcagtacatgactaaatatggtagtcaagaagaagcaaaatgtgagaatgattaggagctttcttgcatgaatggatgaataaagtgtgattcattatgagtgacttgaaaatgcagaaagtggagcagaattgacctggagagaatcagggaatatagtcgtatttagtttgaatatgcatgtgactttctgctctacaatgaaacactgagttggaaaatggtttttatcatttttaatattatatgttaagtccctaaggtaagcattctggtagaaatgctacaaacttggtagaataagcctaccwtgaaaacaaatcaggtatacatgctggcaaatggcatagtggaacgctgccaaataggttaatggttctgaaaatcattttaccccaacatgggtaaaaatcgtgtctgtatgtgaaygtgttgcaggagggattaatggactagcagcctttacttttgacttcagaacaagtcatatttcatagtcctatgggatgctacttagggaataatttatcargttaattcatcaatattaattattatttatcacaggtccacagtgtagcacattttattctgtaatttgttagatagggacagacacaattcgtttccaacaaggaaataggagattatatgcagaagataaattccaaaaaccattatcaattatgtgtgacttttcaaaatgataattaattgattagagcctagtgaagtcatattcactccaacatactctctctttctcttcctccactcccctactccaggtcaaaatattagagaaggttttatagagcaagttataaaaaacaattccattcaataaacatttattgtatatccattctatgaaaatctttgtcctagatactgccttgtgaaaagtaaagatgattatcttcctttgccttcaaaaagtattaataatttatgatggtggaaatttagatgcctctttttaacatattatctcatttgattttcacaaataacttacagaataggtaggggaggtattttcccacattttacagataatgtaattgtatcttatagataaggcaatgtcatgtctttacatgttttaataaagaaagttgttagttaaacaaatcgacatcagaaatgggctataaaaatgaggaaaaatttaaattgagaagagtttgtggtctggagtgaacagtttagatcagtatcagcaaacacacggtatttgtgagagacttgtcattccctcgacctctgagaacatcactaaccaaccccagaactgttttctactaaattggaattggccttacgacccctctctacctagcccttcaaacagccattacaatccattgcgagtggcatttgtcatgaaacctatttgcacctagatagaaaagaagaggagacaattgaaaaggcrtatcagtgaaggaagtaaagataaaatgttgaaagaagaattcagaataatatttttttttctgaaattgttttgagaagaagtatgtggtataagcagagaggggataattacaacagcaggtgttatttgtgtgatagcagattgacagagaattataattctacatagaagatgagagcagagctgatgaatacttctcctagatgggccaggacacttatgtcctgtgcaacagtcattctcttgctccccttcgctcctctttcayccaattcacagagacacaaaatttcttctttggagaaattgaatggaatatactcctggaccctcagacaccaagcactcggatacaccgtaatcacatttctgctgccagagaagaggcagttggatgcatgtcaacccctttctatttgtcctctcctagacagcaaatggaggtgtccttctctgaaaaaacggactagtcctgaaaaacaatctatcctcaacctgccttggaagagtggccccataaaattcctctcaccatctgccaattctaaattaggccaatgatgggaatgtcacttccttatacactccaatcaatcttttcatccctcttagagatgaaaacagacaagtttcagaaggaaattcattaatgtcacgaaaagaagcaaaaacataagattggaatgcaaacattcagaaaagaaaaaattttgaagagacatacgtaaaatagaagaacttcaaagacaaaaggtctccaattgatactatcagatgaataagagaaaatattgcatcacccaaagaaaagcagagtaatattggcaagaaatgattaaagaaaagatcaaataaaagctttgaaaataaaaatgtgacagtagaaatgcaacatttaatagaaagctgaaagggtaatgtcaatgataacttccaagaaagtagaacaaaaaaaaaaacaaaagagacagagagacagagacakgtgcacacgtgtgcrtgtgtgtgcacacacacacgggagagagggagtaagagagagagacgagaatataagatagaggatcaatttctggttttaacaactttagaaaaagataacaaaaacagtgaaaagaaaatgttatccaagaattaaaataatgaacaaattcctaaaaagaggaacattaatttctggtttattattattcatttaattacacacgtatgtaggtatatatgtatatttttttaaaaaattcttccagctttaagtataattgacaaatacaaattgtatttatgtgtacaacttgatgattttgtatgaattgtgaaatgattaccacaatcaagctaattaacatatctatcacatcacatagtcaactcccacattttgtggtgagaacacttaaatttattctctcagcagattttaagtatacaatatattattattaaccattgtcaacatgttacacattatatttcatgatgaactatgcttatatacatataagttcatatgtgacaaacttattcatcacataactgaaaatttgtaccctttgactaagatctttctattttccccaaccccagcccctggtaatcagcattctacattctttttttacttaaggtataagtgagattatgcaatgttagtttttatatgtctgacatgacatcctccaggttcattcattttgtatcaaattgcatgatttccttctgttttagggctgaatggcattccattgtgtccatgtatcacattttctttatgctttacatatcagtgggcagttaggttgtttccgtatcttgactattgtgcataatgctgcagtgaacatggggagttcagatatctctgaaaaatcctgattttagttccattggatatatactcagtagtgagattgctgtatcataatgtagttttatgtttaattttttcaagagacctccataatgttttccataatgactatattagtttacttttcatcaatagtgtacagtgatcccttttctttacatccttgctaacatttatcttttactttttttacttttggttttgatttgcatttctctgattggttatgctgagcacattttcatatacctgttagacatttatatgtcttctttagaaaaatgtctattcaggttttttgtccattttttaaattgtgctttttttgtcattgagttgtatgaaatctttacatatttgaaatgtaatcccttatcagacatatggcttataatttttttgcattccatcagttacttttgcatttcgttggttgttttctttgctgttttcatgaaatagtaacttgatataggtcacttgtttatttttgcttttgttgacttgtttttgatggcatattcaaaaaatttattgccatgaccgatttcatggattttccactacattttcttctaggagttttatggtattaattcacatgtttaggtcttctggaagacttaactactgcatttgagttgctttctgtgtataatgtaaaataaggatccaaaactgtttgtggacatagttttccaacattatttatcaaagagactatccattcctcatttggtattcttggtgcctttatcgaagatagttacctacttatgtgtgagtttatttctgagcattgtaatctgttccattggtctatatgcctgtttttatggcagtaccatactttgttgattactatagctttgtaatattatttgaaattggggaatgtgaagatccagctttgctcttatttgtcagaattgccttagctgttcagggtctttggtggttccatacaaacgttagactttttttctatttctttgaaaaatgccattgaaattttaatacaattacactgaatctgtaaagaactttgggcagtatgagcattttaacagtgttaattcttccaattcatgaacataggatatctttctatttatatgtgttttcttcaatttccttcatcaatgtctttaatttttaatgtacaactctttcacctccatgtttaaacttattcataagcacttcgttcttgttgttgctattgtaaataacattttcttaattttatttttgtatagttgttactacatagaaacacaactaaattttgtacattgatttagtatactataatataactttactaaatttcttcattatttccaatagtttttgtggtagagtctgtatggttttctatatataagataatgatgtctgcaaacagggaccacttacattatttctttctgatttggatgtcttttatttcacttcttatttttgcctaattgctctatctaggacttccagtattaggttgaatggaagtggaaagagtaggcatccttttcacattcaggatcttagaggaaaagattttagcttttcactgctgagtagaatgttggctgtgagcttgtcatatatagcctttattacactgaagcatatatatctttaatttgtaatttgttaaaagttttgatcatgaaatgatgttgaattttgtgaaatgctttttattcatcttttgagagaattacatagtttttatctttcattttcttaatgctgtgtatcacatttgtcgatttgcgtatgttgaactatccttaaatcccgggaatgaatcccacttgttcatgatgtatgaccwttttgatgtgcttttgaattcaatttgctaatattttgttgagggtttttgcatctatgttcattagggatattggactgtaattttcttatattgcagtatccttcttggctttgttacaagggtaacgttggattagtaaaattattttcaaaatgtcccctcctcttccaattttttgaaagcattttgagaaggacaggtcttaattcttttttaaacatttagtagaatttgtgagtgaaaccatcttgtcctgggcttttcttttttaggagattgttgactagtgatttaagctcttaacttgttaatagtctattcagattttctacttcttcaggattaaatcttggtaggttgtaygtgtctagggatttatccatattttctatcatatctaattttttgtatctaattattaatagtagtctcatgatcctttgcatttctgtgatatcagttgtaatttctcttatttttgattttattagagttatctcacttttttcttagtgtagttaaagatttatcaattttatcttttcaaaaatccaacgctttttttttttttttggtcttttctattgtttttcttgtctcctctctttcatttattcctgctctaatgtttgttattttctttcttctgctaacctggactattttgcttttctttttctagttctatgaggtatagagttaggtagtttattagagctttttcatttttctgcatatagacatttgtcactacatactttccctttagaatagcttttgctatatcccataagttttgctatgttgtattttcattttcatttgtctcaaaatattttctgattcctcttttgacttctctgacacattggttattcaggagtgtgttgtttaatttccacgtatttgtggattttaaaaattattttccctgttattgatttctattttcataccattgtgatcagaaaagctatttgatatatattcaaacttcttaagttttatgacttttttgtggcctaacatatctatccggaagaatgttgcataagtttgataagaatatgtattctgcttctgttggatggaatgttctgtatatgtctgttaggtccatttggtctaaaatgtattcaaattcagtatttccttgttgattttctattggcgttatcttttcattgttgaacatgggggtattgaagttcccctgctatcattatattgctatttattcccccctctgatttgttaatatttattttatatatctaggtgttatggtgttggatgcacatatatatattcacaattattatatcctcttgatgaattgatcttatcactatataatgaccttatttgtctttttttatagtttttgacttacagtctattttgtttgatgtaagtgtagccaaacttgctctcttttggttttgatttacatgggttatttttttcatatctcacataaccctatatgtgtccttaaatctaaagttagtctctggtaaacaacatattttggatcttgttttttcttcattcactcagccactctatgacttttaatcagagaatttagttcatttacatttaaaataattattgataagtaagcatttaacattggcattttaaaattgttttctgtctcttttgttgttcttttgttactttttccctcttttgctgtcttgtgattttttgattttctattatggtatgctttgatccactaccatttatctttgcatatctaatatagtttttgtgttgttgttgccatggggcttacataagaaatcttacagtcataacagtctattttaagctgatattaacttaacttcaaaggagtgggtgaagcacacaaagtgtcaggggcacctgtgggccagcttgtggggagagtctgcaggagaagtgttccaagcaactcatagaaaggactcctgatagagtccacaaagaatttaacaggctacatggctctttgttgagttttaagccattattattgttagtctctgcctcttttctttgcttccagcttctcctagccattcagctatgctgatcccctcactattctggatgtgattagaaagaggtgggcctcttgggcagtacttcacacagctggaacagctggacaatcactctttatgttctcattttctcttataagaaaaatcctggacagaggtgctctctccagtagtgagctgtgatgccttggggtgaggtgacatgggtaaagtgaattatttttcttatcctccccagtgtgtctcttcttggttatttttgctcccatggtatggtggaacttctctgctggactcttggactccctcaaaagtactctcatctgtgagtgtctgttaaaatcactgtgctgtgggaggatgatggtagaaaactccaattccaccatcttgcttacatcgctctttgagattctggttttaaatgtttttttatgtgaccaaatatctgaattagagaaaaacctacattaatcccgaaaattataaatatttagaacactagggattatggtggacatgataaaagctttaaaaaatataacgaatttatattaagaaagtattaaaatggtaagcatattttaaaaagtaacatttacgtactaaaagatgatggacaaagttttcaaaattctttatatcaacctacaatactagatccaaacaagggattactcaaatgtggtggtaaaataaagttgtggacattcaaggactttgatatgtacttttcttctacctacgcaaatacttacaagggtactatacataagtaaagaagtaagcaaagaaagaagaaaataagaaatagcgaacaggcagtccaacacaagagaaccataaagagaaatctcaggattataaacatgcagcgggtgttgagagtaatttttccaggtttaaataggagaaaagaaaagtaataattattcaaaatgagtttgaatattcaggggaaataaatttgataggtctaggctgaatatgatagggcagctagagaatttagggatargtttatagaaaattgagcaagagaaaaatgaatcagttattaactctacaaaattaatttgtacaagaaaggaaatcacaggtaatcttatctatgtttcacaaggaatatattattatcctagttgcaaatgaaatacagactacctatctatgtcttaattcagaattattttattgcactgtttaaagttcaaatacatttgagggataattcaaatatctgttgaatgtatttatttgtaaaatatttctgtgacaattttaaaaaattatgaagtaaagcaatgttattaagtctctaataaatgaaataaagctcagagtgtatttgcagtaatttgatgagaagaaaagggtccaagggatttgaaatagagttttttttagtaatatactaacttaacaaaatagacaaaaattgtatgacataacttctataatattttggttaaactataatggaagagaatttacttaattctactcatttcagaatatgattaacactgatattctataattcatttagtgtttaaaaaatcttaatattctatagctcatctaatagttgtttgttgttttgagatggagtcttgctctgtcactcaggctggagtgcagtggcgcaatctctgctcactgcaagctccgcctctggggttcacgccattctcctgcctcagcctcccgagtagctgggactacaggcgcctgccaccacgcccagctaattttttgcatttttagtagagacagggtttcaccgtgttagccaggatggtctcgatcgcctgacctcgtgatccgcccgcctcagcctcccaaagtgctgggattacaggcgtgagccaccacgcctggcctcatcgaatagtttgtaaaaatcttgtctctgtaaacccagcagtatattggaaacatgttgatttttcttaaattaacaaggttgtagtattatgcatgtctgaaacctaggtcaggttgcacacctgagttctttgggtagcctccattattgtttgctctgataatcttcctgggcaagtggaagaactataagaattgtaggacataaatgaacttattcagtgatgatcttaaaatctgtagctttttacaaatcacttttacagtgatttatttcctatcgtgttccagaggatcacagaaatctttaatgttttgatttcaagggaatatttattagattaagtaaaatatataattaagtctaacattaagaaataatgttagacttaggccacaagtcttggtcatcaagacacagtttaagctttcaagaagctaacagtctcgtggcatagggttgtatacatgaaactgatggaaaggaaaataaaaataagtgcttgctgctctggaaataaaagatatctaatgcagtcagttttgtgattggaaactggctttaagatatggcttctggagaaagagaaatctaaaatgagagttgaaagatgaataaaactcattaaggaacagtggaagagcatgtgcaaaaacatgttgataatagaactgtatgaactccaatatgctttgaattaatataagccataatggtaatgatgatcataatgacagtgataatgttgttgttggtgatttgcatgagctaggttagtgacaggattgagagacaagtagaagctagacgacaatggctttgaatggagacttcctagttattttactctctgtaaggctagtagagataattaaggattatagcctgacacagactaggaaatatatttatttatttacttatttacttatttaattaatttatgttttttgagacagagtttcgctcttgtcacccaggctggagtgcaatggtgtcgtctcagctcactgcaacctccgcctcccgagttcaagtgattctyctgcctcggcctcccaagaagctgggactacacgcgtgcgccaccatgcctggctaatttttgtattttttttagtagagacagggtttcaccatattggccaggctggtctcgaactcctgactttgtgatctgcccacctcarcctcccaaagtgctgggattacaggcgtgagccaccacacccagccggaaatatttttatttttaaaagagtattctattcatgtaaggaatggattgctggaaagtaactagagtcagaaagaaagctaataaattgtgacaataacagaaatgaaacattcaaatagtaacagggttttcttattaaaaaaagaagttagacttgatagatgtttttcttaaaaaggttaagatataaacctttttccaaactgattggaaaagggaggagtcaaagatggttttcaagtttgtagcttgagtggctgggaggtgatggtatttagaaaaataggaaatggagtggtgaaaagagcaggaaagataatgaattcaactgtgggtgttggaactgacattttccatttttttcaaatggttcaggaaacagagaagtgatgttggctccaataatttctggcaaggaacttcagttctacagctggaaattcaagcaatcagcagtgaaattgatccctttctttttctttcttctctcaaatagtagaagtattactattaagagtagtaggaatagcagcagcagaagtggtagtattaatagtaacagtaacaataataatagtcatagtggtagaaactgcaaaatcattttcctactgcaatagcgttgttcagttttgatggtagaggttccttcactgaaataattttacatcactgttttggtaactattcttaactattttggttcaatttaggttccctagccatttcaaaaattttattgaacatttaaattgtctagagtcagcggtgttgcttgcaactaaaaattcttcctcaaactaatatgttgaatttaggtgactttagaatatacaattagaaatatcaaataggacacatgaatgcattggtcttggtgccagaaaaaaattcagagctagagatgtaggtttggcaatgattggtatttggctgttagttgaaactgttagaataaaacccctgagatagcaggttgtgaatctcaaacacaggtgaaggattatcctcaggcaagctatggatacctcattccttaagacaagaaaagaaaggaaaaaaaaaaaaagcacacctagagattgattttctttccttaaagtcttgatgttttgtaatgacaagactttctcttgcaacccaggatttcaccacaaagaatttctttttcacccaagcatttaaatgtacttttctgagtaccttgttaatgtcaaagtgaggccaggcacagtggctcacgcctgtaatcccagcactttgggaggccgatgtgtgctaatcacgagttcaggagatcgagaccatcctggccagccaagtgaaaccccgtctctactaaaaaaaaatataaaaattagccaggtgtagtggcacgtgcctgtagtcccagctattcggcaggctaaggcaggagaatcgcttgaacccggaatgcggaggctgccgtgagccgagatgcgtcactgcactctagcctggcaacagactgagactccgtctcaaaaaaaaagtgtcaaagtgaaattcacacttcctcttatatcagaggtaggtctgtatgatcagtaaaatacttgatattttcagaggtcctaaacagcatttatgataagacatctttcctctgctatacacttgacctcactagcatttgataactggatgcaatgcaataaataaacatttagtttcaagcaaatacaagaattcaaggaactcaaaagtgtcaaatacattttttaccagaaattcctatgaatagattatatttgacagaaacaaaaaaaatttgggatattgaaataagtatagattattaaatggtgaattgcagtaatcatttttctagattcttattttgtcattaacttttctcagcctttacttcttatctttgataatatatataggtttatctctaaatattaagactttttaaaggtgacttttaaggtgtttaagtttaagatgactgtttaaggtgactgcctgctcttatcttaaaaaattcttatacaaaggaaaagaaacttgacatttgaaatgaggacaaacatattcttaccaattattttggccccatggttctttgctgatatttcctctattgccctagattgtgtttccaagatctgttttcatgtttctccactttttagatttaagatcccctgaagggcaggggccatgtcttaataatttttgtaaatccataagctaatgtaggatctgacaggctaatgtaagaaagcaatatactttcaatatatatttgttgaatgagaaattgaagtaatcatgactcaatcagagagaaatgttgctcataaggaccttgaaaggaggtacagtctattagaaaaagtatttcatgaatagaattcatttttaataacacatgtttactaagaacctcatacaatgccagatattgtgaatacaaaaaagtgataaatctctttttgtaggttacataatagggagaggaatatttgagagattgtcaggaatattcaacccctaccctcacaatacatttagaaaactgcacacatttcttagtaaacaaaagcacttttatttcatgcttgtgagaatggaatgataagaaggaaaaaatatattcttacaagacttcactaaatgagttcttttttagcaaattaagataacttaggctttggaagcattcccagacgtgagaaataaggcaaataacatctgtttttcaaagtatccacyaccttctttgtgaatatggattcagagtaaataagccatagctctcctcatttcttgttgagaggtaagaattgtctctcttagaatctttactgattccatatgttgttacaaggctcaatataaatttaagaatttgggtaaaaatactttgaaaatattatctgtgtatagaatctatttgaacttagcaggtgtctctaaaacgattacatgaaaatgctaattttatgatgcttatatcctgctgttcgatggttgattccaacaattttgtaattaattttttcccatttattttgttagtttctaaagccaggggcataatttatacaattaaataaaaccttggtgtttctaatcaaaagagcagaacacttgaaataatatggatcagaccctgtgaaaaaagaaacttgctcataatctagccacttcattttcaacagttactgtcacagcttttaatttcaattaataatatccttaaaaagattcatgctttgataattagtttggaccacaccaaatttatttaagtgagaaatcagctttcaaagaaaaaacatacatcattttagaggtctgctttttaaatttgtaagcatttggcttttattttgaaaaattttggatgctcaaaacgttgaataaacaggaaaatgagcacctgaatactcatcatagacatttattaatcagtaatgtcctatcaaccggctctacatttcccactttctccaaataaatgctgcagacatcaacacattttacttctaattacttcagcatgtatctttcaagataaggagtcacacccagatctcttcattgtatagggacattttctccttggtagttaataagtaacatgtgagtgatactctgagatcttgtaaatacctttttatccaacacgccagcaatggttttaagttctattgattaccctgtgtgaatcatgaaaactatattagcagttataaaataatgacttttgtttgtttgttttgagacagagtcttgccctgtcgcccaggctggagtgcagtggggcgatctcggctcactgcaagctccgcctcccaggttcacgccattctcctgcctcagcctccccagaagctggggctacagatgcccagctaattttctgtatttatagtagagacagggtttcaccgtgttagccaggattgtctcgatcttccgacctcgagatccgcctgccttggcctcccaaagtgctgggattacaggcgtgagccaccgcacccagccaaataatgactaattttatcattccttaggatatgcttcctccaacctcatatttttttttcttttcctccttctgtgataccctaccttcttgtaacctgaatttttcatgcgtgtccatgtgaagagaccaccaaacaggctttgcgtgagcaataaagcttttaatcacctgggtgcaggcgggctgagtccgaaaagagagcaaagggagataggggtggggccattttataggatttgggtaggtaaaggaaaattacagtcaaagggggtttgttctctggctggcaggagtgggggtcgcaaggtgctcagtgggggagctttttgagccaggatgagccaggaaaaggactttcacaaggtaatgtcatcacttaaggcaaggactggccattttcacttcttttgtggtggaatgtcatcagttaaggcaaggaccggccatttacacttcttttgcggtagaatgtsatcagttaaggcggggcagggcattttcacttcttttgtgattcttcagttacttcaggccatctgggtgaatacgtgcaagtcacaggggatgcgatggcttggcttgggctcagaggcctgacattcctgccttcttatactaataagaaaaatgaaacaaaatagtgttgaagtgttggggcggtgaaaatttttggggaggtggtatggagagagagaatgggcgatgtttctcagcactgcttcaagcaggattaggggcggcgtgggaacctagagtgggagagattaagctgaagggagawcttgtggtaaggggtgatattgtggggatgttagaagaaacatttgtcatatattatgattggtgatggcctggatacggttttggatgaattgagaaactaaacggaagatacaaggtccgaataaaagaaggagaaaaatgggtattaaaggactaagaagtggaaggacctacgacatccaattagagagtgcccaagggggttcagcataattacttgcttggttggcaagtttttgggctctatccttgagtttttttatgttgtcatacaccaggccagattgatttaggtaaaaacaacgctcttcatttaagaaaatacagagtcctcctttttcagcagtgagtaagacaaggccttggcagttttggaggacaactgcagctaaaaagtcaacttgggcctggaggactgataaagtttgtgacatgtctgtgatgctagcagagaagtcattatacaggctatggaaggttgtgacagaggttgaaatgcctgctattccagtaccgagagcaatagtggaggcagaaagtcctaaaccgatcagcaagggaattagtagaataactcttttttgttgtgtcagtgtcatgaggggaacagcgagctcttcggtcccatttgcaaattgaattatgggggtaaggaaaactagtgtgcatgtacctgtccaattagcaggtagacacatgtaagtagaggatccacagaggaagaagagaccttgtgcgaggcaaaactggagatgcaaagtaaaaaaggtgagaaggagtgctgaaaaggggtgtcttgtagccagactcctagggatccagctagggcggcagccatcagaggttgtaatggggactgatggggtaactgtgtagagggggaggtttgattttcatggtgtatgagaaaacattgagcatctatgaacaacctttcactgttattttcagggctgggtttaagtaaacaagaagagggcctgggaggagagtctgacgagcaaggggaaggtagccaagtatggagtgaaatacagggtaagtgtcttcctaagcaataattactgctaatgtttttgagtttgtcagtattgttagagggcttgtctgtaatatggagctggaagtctcccattgtttcagtgatgtgtgtagttgggcttcggagatgaagagtaaaggaacatcgagaaggtgaaagattacctaggggaattccagtgggtctttgccgagagatacataaaggagcggctacaggaatagtagtttgtgttgtgagaggtccaaatatggggagagtagagttaacataaggagaaaggttttttaaataagtgcagaggagggcggcagcttgctgatgtgaaatgtctggggaagtcttgctggacctgtctagaaagtaaatgagttcttcaggagggtaaaggtgagggctgttaaaggaagtttggaggcataaggagacaggaaatgttgcccagagtgcctgtaagatggggacagctgtgtaggcactggaagaaagggaaatgcaaagccagaagttgttcgctaaggagagattagaagcagctaggagagaatgggtaaggttgatagtgtggtggagatagctggggagaggtaaagggtggcataagaatgggaatgagaataagagtgagtataaaagtaaagaatagagcttcatcagtgtggaagtattggagggtgccctgccagcaaagatcatctacccactctaagagggaattaagagtggcggtttggggatagcaccaagagatatcagctgtgatggcttgaagaaacagtgtaaaccagcagtgtaaacaagagtagggcatttataagtagttgagaacggagaataggagtatgactagagagaaaatagtagggatgacaagttttttggggcttggcctaaatggtgggggtgacttcgtaaagcctgttgcaaaaagtagggtaaggacgaatagacctaatagaatgaagggatatattaggctcataagggttattactgttcttcataaatatgagtgagtttaagggaagtaggggagaggacttgcgacttccaggaggaagaagagggattaggctggctgtccaatggacacagctttattctggaacggtgaacccagtggggaggatcctgtaggcagacagcagtcggggtactatagatgactaagtagggtccggtccattgaggttgtagagtttgaggggtcagactcttaacaagaactgatcgtccagctagggtgtcttcatatggctggggatctggagtaggcaagagaagattagcagcctggcggatttcctgtctagcctgttggaggactggaagatagtcgcctagagggctggtgtctgggatgaggttggggccaagcaagaaaatgcatccatataaatgttcaaatggactgtaccctgtagcatctcgaagacaggctctaattctgagaagggcaagaggtaaaagtactgtccagtcctttttaagttggaggctgagcttggtgaggtgtgtctttagaagaccattagtcygttctacctttcctgaagattgrggatggtaagggatatgaaggttccactgaataccaagagcctgagaaactgcttgggtgatttgactagtaaagactggtctgttatcagactgtatagaggtgggaaggccaaaatgaggaattatgtctgacagaagggaggaaatgactgcggtggccttctcagaccctgtggggaaggcctctacccatccagtgaaagtgtctacccagactaagagatattttagttttctgactcgaggcatgtgagtaaagtcaatttgccagtcctgggcaggggcaaatccccgagcttgatgtgtaggaaagggaggaggcctgaacaatccctgaggggtagtagaatagcagatggaacactgagaagtgatctcctgaagtgatctccttaaggatagatttccaagatggaaaggaaatgagaggttctaagagacaggctagcgacttgtaacctacatggaagaggttatgaaatgacaacagaatagaatgggcctgtgaggctggaaggagatattttccttggtctaagaaccatttgccttatgtgggaagagattgataggtgtaagtttcagcgggggagtaggtgggagtgaccaatgtgaaggagaaaaactggccatgagggacagaagttggagagctagcttctcgtctagccaccttatcagcataagtgttgctctgagagacagaaattggaaagctagctgcttgtctagccaccttatcagcataaacattgcctagagcaatgggatctgatgccttttgatgccccttgcagtgaatgaccccagcttcctttggaagtaaagcggccttgagtagagtttttattaaagaggcattaatgatggaggatgcttgtgtagtgaggaaacctctttcagcccatgtgaccacatggtggtgcagaatatgaaaggcatatttagaatcagtatagatattgatgcgtagtccttttacaagagtgagggcttgagttaaggcaactagtttggcttgtcgagaggtagtggaggggggcagagtggtagcctcaatgatagatgtggaagatactatagcatagcctgcctttgctggtgagtggcgattaggcctggtggaactgccatcaataaaccaagtgtgatcagggtgagaaacagggaagaaggaaatgtggggaaatgggatgaacgtcaggtggatcagagagatgcagttatgggggacaggtgtggtatcaggaataatgtgggaggcctgattgaagtcctggccaggaacaatggtaattgtgggagactcaacaatgagtgagtacagctgaaggagccggggagcagaaagtatatgagtcaggtgtgaggaagaaaatagattttggaaattatgagagctgtagagagtgagttgagcatagtttgtgatattgagggcctctaaaagtattagggcggcagcagctgctgcacagagacatgatggccagcctaaaacattaaggtcaagttgtttggacaaaaaggctacaggacgtgatcccggtccttgtgtaagaattccgactgcacagccctgcacttcagctgtgtgtaatgaaaagggttgggatgagtcagggagagctagagtgggggcagtctctaaagcttcaaggaatggaaagaggagtggggaaaggatttaggatctatggggtcagctaggtttccttttgtgagtttatatagtggttttgttaggatggcaaaactaggtatccaaaggcgaaagtatccaaccatgcccaggaaggaaaggagttgttgttttgtagaaggggttgaggtttgagaggttagtcagacgcgatcggcagggagagttttttatgaagaattatgctgaggtaggtaaccgatggagaagaaatttgagctttggagggggatacccgatatcctttggagaataaatgctgaaggagcagaagtgtgtcaccttgagaagattcaaaggaggggctacaaagacgaaggtcatcaatatattgaataaggtgagaagcagaggggtggaaagaaagtaaatcatgagaaagagcttggctaaagtaatgagggttgtccctgaaaccttgcggcagtatagcccaggtaagctgctggtactgatgggtgtcagggtcagtccaggtgaaagcaaagagaggctgggactaagggtgcaggggaatagtgaaaaaagcatctttaagatcaagaatggaatagtgagttatggaggaaggtattgaggacaaaagagtttacgggttgggcaccacagggtggataggcaaaacaattttgttgataaggcgcagatcctgaactaatctgtaagacttgtctggtttttggacaggtaaaatgggggaattgtaaggagagtttataggttttagaagcccatgctgtagcaggcgagtaataataggctttaatccttttattttaaagcatgctgtggaatgggatattggcgttgagtgggttaagggtgattaggttttaatgggatggtaatgggcatgtgatcagttgccagggaaggagtagagatgtcccatacttgtgggttaaggtggggggatatgagaggaagagcaaaggaggctttggattgggaagaagggaggcagtgagatgtagctgtaatccaggaatagtcagggaagcagataatttmgttaaagtatcttggcctaataagggaactcggcaggtggggataactaaaaggagtgcttaaaagagtattgtctaagttggcaccagagttggggagttttaagaggtttagaagcctagctgtcaatacccacaacagttatggaggcaagggaaacaggcccttgaaaaggaggtaatgtggagtaggtagcctctgtattgattaaggaggggacggacttaacctccactgtgagagttacgtaaagctcggcatccgtgatggtctacggagcttctgaggcgattgggcagcgtcagtcttcagctgctaagccaagaagatctgggaacgagtcagtcagagagccttgggccagagttccaggggctctgggagtggctgccaagtgagttgaacagtccgatttccagtggggtcctgtacagatgggacatggcttaggaggaatcctgggctgcgggaattcctgggcctggtggccagatttctggcacttgtagcaagctcctggggaaggtggttctggaggaacacctggcccctgcggtttgggcgtttggaagttcttgtgtgctggagatgtggctggggtttgtctcacagtggaggcaaggaattgcaactcagaaatatgttggtacttggctgcctctattattgtacaccttgaaggcgaggttaattaagtcctgttgtggggtttgagggccagaatttaatttttggagttttatttaatgtagggagcagattgggtaataaaatgtatattgagaataagatgccttttgagtttctagggtctagagctgtaaagtgtctcagggttgctgccaaacgagccacgaactgggctggatttttatacttgatgaaaaagagcctaaacgctatctgatttgggataaagaaaaaggagcattaaccttgactatgcctttagctccaaccacctttttaagagtaaattgctgggcaggtgggggagggctagtcacagaacgaaactgtaagccagaccaggtgtgaggaggggaggtgataaaaggattatagggtggaggaggggaggctgaggaagaaatgggacctagctcagccttgcgaggaggggagaggtcagatgggtctgtagaaaaggaagattagaaagatacctctgaaacctgggtgaataatcagagaggtgtccctgcaatgattaaacaccaagggaaggctgccttccatagcccgtggtcggcgccggagttttgggtccatggataaaacgtctcatttttctctaccagaaaatgaaaggaattgaaattaagtgaagggggagattgaagtgtggtgccaagattgaatggagaaagaggttgagggatactgagggaggttgcagaagagagtaaaagaggccgcttaccggatttgaaattggtgagatgttttttgggctggtcagtctgaggacctgaggtcgtaggtgaacctttctcatggagcaaagagcaggaggacagggaattgatctcccaagggaggtcccccaatccgagtcacggcatcaaatttcatgcgcgtccgtataaagagaccaccaaacaggctttgtgtgagcaataaagcttttaatcatctgggtgcaggcgggctgagtccgaaaagagagtcagccaagggagataggggtggggccattttataagatttgggtaggcaaaggaaaattacagtcaaagggggtttgttctgtggagggcagaagtgggggtcacaaagtgctcagtgtgggggatttttgagccaggatgaggcaggaaaaggactttcacaaggtaacgtcatcacttaaggcaaggactggacattttcacttcttttgtggtggaatgtgatcagttaaggcaaggaccagccatttacacttcttttgtggtagaatgtgatcagttaagctggggcagggcattttcacttcttttgtgattcttcagttatttcaggccatctgggtgaattcgtgcaartcacaggggatgcgatggtttggcttgggctcagaggcctgagagaattgactctcctttagctaagagagccagacagactctatcttggctccttcacttgcagccccttacccacccccttcctcaaggacttaacttgtggaagctgactcccagcacatccaagaatgcaatgaactgataagattctgtggcaagctatatctgcagttcccaggaatttgccccattaatagcacccaaagcccccgcgtttgtgtctggttggtaacgcccaaagcccctcatctgtcaccttgtgatagattcaaagcccctgcacctggaactgtttgcttgcttgtaaccacttatccttttaactttttgcatactttgcttctgtaagattgttttaactagaccccccccccaaccctttcgaaaccaaagtataaaagaaaatctagccccttcttcggggccgagagaattttgagcgctagccgtctctgggtcaccagctaatacaggactcctgaattcgtctcagagtgcggcatttctctataacttgctcaactcgcttggttacaacacttcttttcagtatcactgtcgatccatgtgtatttattttgattcattttgttattatccattgatttcattttccattttggttctgaaattgacccaaatttggtgagtggaatttacttcaagccagtttctatttccgtgtatcatgacactattagtctttgagcacttcctttttgggcaaaaagatgttccagcctcacttttctcttccacagatctagaatcaattatttcttcaaagaaccctgtcctttgaaggcaagatctgggcactaggtccgttttttgttgttgttgtttggtttggttttttaaccaaactttatgtataattgctattcttcttatttttgttaactagtatttgttgtaaaatgttaaataggctgggtgtggtgtctcatgcctgtaatcccagcactttgagaggtcaaggtgtgcagatcacctgaggtcaggagtccgagaccagcctgaccaacatggagaaaacccgtctctactaaaaatacaaaattagccaggcatggtggtgcatgcctgcaatcccagctactcgggaatctgaggcaggagaatcacttgaaccttggggagggacgttgcggtgagctgagattgcgccattgcattccagcctgggcaacaagagcgaaactccgtctcaaaaaacaaacaaacaaacaaaagttcaatagaagtagaggcagtggtcatccttgtcgttttcctaatctaagaggagaagtgtatgttcacctgtgaatatgacgtaagctgcagagatttgtaaatacagtttttcagatcaagcaatatcccttctactcccagaatgccaacactttttatcttgaatgggtgctgagttttatctaaagccttttgacacctaatcaatcttatggattctctcctcttaatgctgtcatagattagattatttgtttttttaaaacttttggaagtgatttcaaacttacaagaacatttaagaattaaaatgcttcaaagaacacttgcgtattctatttggtataacttaatgttaatattttatttcattttattatttaaagcatgtacactgtctctataatatatacatattttttgaaccatttaaggtagttgaggtacattatagccctttgtccctaaatacgccagtgtctatttcctatgaatagagatattatattacctattaaaagtacagttacccaatgcagtacattatcattatttataatacttgtatttaatctactctttctactctaattttgtcagctcactctataatgtcatgtcttccctctagtacaagtggcagtctagggtgagaaascagttagtgatcatgccatttgaacttataaaattatggaacatttctacaattttactttgccttttgtgacaatattgttgaagaatacagctctttcaacctttattaataaaagttcctgatttgtttttttcttgatgcattcttgcttgaaaaactgcatagatgatgttatgtctttcccagcatatcacatctggaggcacatattttccatctgtctctcactgctgaattagtttagatcattctcttaaggtgttgtctgatttttccacagtgatattactgactttattcttccttgcaagcaacagtttataagaaaacattttaagagcatgcagttgttattgaagtatgacattattactgtgaagattaggttttagcctacgttacggctagtgtacttcagcttttctttgcttctaggatataaaccttcaaagacctcagctgaaagcctaggcttttaccagagtctcttggtaggtcatgaacacaaacttctgtcttctcagagctctacggctgtaaaaaaaaaaacttctgctcagctctttggcatcccagctgctgctttctggtgtttctcgtttgtatagtttttttttttttttttttttttttttttaagtgtgtctttcctatgggcatcttcagcattcaaactttctgaagaaaagtttcgtacaaaattttgggttcagttttcagcagtttccttccctccatttctagccccttagaaatactagattgcaaacctctgtttcctcaacacaggtggatcggggctttatgttcattttctgttgtcctagacttaaaattggcaaatacccttaatttctaatcaaaagtgattatggagaatattatgcctgtgttggctgatctacartgcatttgaatgggtgttttatgtattttgcattgcttttataattgttttggcagaaacgttatttaagcatgaattattttgtaatagcaaaattggacatctacccactgtccttttaacaatggtctaatcccacacattcagcttctgttccttataacctaaaatgtcacctaataaaaaagaaaattaaatgaaaatgttaatagatgtaataatttctttattggacttggtcaataagagaaaatggaaaatgtgctgactatttatttcactatgctcccaaaactagatcaattatctgccatttttttcatattctatgcttttagggcttaattctgtggattatataatctggagttttagtttcccttggatttgggttcagacacagggaaagttagggggtagattgaaagccattaggacagaaagagtgggcatttttgtctgtacttccactctctcctaacagtctggcaatgcttgcattcctctgtgactaggcttatagctttgatgggcttctctttctttcacagctttagtacttactgattccaataaatcattgccttcccttgtctcttcaggcctaagatagtaagacctccctgctattacttttcactgggtgtttcaccatatcttaataatttccttagacatttccttgtttctataaatgcctgacccattaaatatctttaattaaattctttgaagtatgccatcactttgttatatagactttcactgaaaaattagattagtagttaatgaggaactcttctaaagaaaaaaagataaaaatatacagagaggaagatttaaaagaggatggattgagaaattttaatatttgtctcattggtgtttacaagtcagatttaactaatttacacctaagtaaaactgactgaaatattcacaataaaaataataaacattgagttctcattcacagaacatgtgyattgagagtcagtttgtccatgttttccttcctcagcaatccaagttgatagactaactcatatgtaagacattattgatcttatgtctataaaaagtatgataaaaccatgttatcacttttaatacttctggttagaatgtggcacttgtcaatcttactcaaatttcattgaacaaagcaagtcacatggattgagtaaaaatacaccatacataagaagtaattacataagtaattactcaaagtaaagtgaagaaaattatgtaatttcataagaaattacagaagaagaaaaaggagcaaaagaagaaaaaggaatacataaatggatgataatttagaatcttgtataattgaaggaattgtaagtccccaaatcaaatgtaaactttgtgtaccaagccaatcaattaaatatgaaaccatacttaaaaaatgagtgtataatagtaaactaaaagtgaaataaaaatgttaaaatgtatcagagagaaatgacattatctattaaaaaatgataattagattgaaaactttcttctcattaacagtgaatggcagaatactcttaacacgatattgtctacatttggggaaacagacaacgcagtattttatgatagttaagctgtcatccatgagtggaaacaacaaagatgtatttgtgagtaataaaacactaagtaaattttgacttttagactcttacagaaaaaaactgtttaagaagataattgataataagaaaaatccaaagagtctgtgtagtgggaggatggggaagcattagccaaaaattccaatgttgcaatattaatataagacaaaattgatgataaagattacaacatagtagtcaaatgaagaatctacaaaaagatatatcatttgtgaacttgactatatctaattacatgcttttgatatttaaaagtcaaatctgaaaaaattaataaattgttaatttcagagtcatgggagagattttaataaatttttaataaaaatcaagagataggccaagcgcagtggctcacgcctctaatcccaacactttgggagggcgaggtgggcgaatcacctgaggttgggagttcgagaccagcctagccaacatggtaaatccccttctctactaaaaatacaaaaaattagtcgggcatggtgtcaggcacctgtaattccagccactctggaggctgaggcagaagaatggcttgaacccaggagatggaggttgcagtgagacgagctggcaccattgcactccagcttgggcaacaagagagaaactccatctcaaaaaacaaaacaaaacaaaacaaaaacaagagataaagaaaacaagaatacaaataaagatttgagcaatgctcgtataatagaaatgtgtaaatatctgaagcctaatatagaaaacmcatcatattatatacaaataacatatttacaaataaagaacatgtacttcttcacaatgatgtttctagacatttcaaaaataaatattttacagacagtgttacttgagataatgcagctaaatgagacatgaaccaataacaaatatagccagaaaacactatatgttgtaaactttacaattatctaaaaaagaaaggccaggcttttgagggaaaaaagtaaatatactttgaaaaatagaactaaatgggccgggtgtggtggttcattcctgtaataccagccatttgggaggctgttgcgggtagatcacttgaggtcaggagttcaagaccagcctggccaacatggcgaaaccccaactgtactaaaaatataaaaaattagcctgatgtggtggtggatgcctgtagtcctagatactcgggaggctgagggaggagaatcacttgaacccaggagggtatgttgcagtgagccgagattctgccattgcactccagcctggacaacaagagtgaaactctgttacacacacacacacacacacacacacactcacacaaaagaattaaatgataatgagtgcattaatttcacataacaaaactttggaacatttctaaccataattacatttgtgttttcaacaagaacaaattaaaatttcatgaactaagaatctaatgtaggcaacttaaaagaacaaaaattagccaaagaaaatagaagaatgggcataataagtataagagcagagattaataaaatgtaatataataaatatacgatctatacctgagtgtcatccaaaccaaggataaattctctagaaaggatagtataatagaacagtctttagcaaggctgactaggaaaataaagtaataacaaaaaataatttattaaactgatgagaacagatgctatacttgatcttagccaaaaggccaataaattatgggataatccattaatatgtggatcaacatcaaaaaaggagaaataattgaagacacaatagagagagagagtgtgtgtgtctatgtataatgaaaaagtttttgtcaataaatttgagaaattctatgcaaagaatttcatatagtaatataaaaataaaaattatttcaaaaaatagatttaaaattcacaatgcactaaaacttttaactttttaaaaaattattttactttaagttctgggttacatgtgcagaacctgcaggtttgttacataggtatacatgttccaaggtggtttgctgcacctatcaacccatcatctaggtttttaagccccgcatgcattaggtatttgtcctgatgctctccctctccttaccctccaccccatgactggccctggtgtgtgatgctcccctctctgtgtctatgtattctcattgttcatctcccacttatgagtgagaacatgtagtagttggttttctgttcctgtgttagcagagaatgatggtttccagcttcatccatgtccctgcaaatgacatgaactcctcctttttaatggctgcatagtattttgcgatgtatatgtgccacattttctttattcagtctatcattgatgggcatttgggttggttccaagtctttgctgttgtagatagtgctgcagtaaacatacgtgtacatgtgtgtttatagtagaatgatttataatcctttgggtatatacccagtaatgggattgctgggccaaatggtatttctcgttctagatcctggaggtatcaccacactgtcttccacaatggttgaactaatttacactcccaacagtgtaaaagtgttcctatttctccacagcctcaccagctgttgtttcttgactgtttaataatcagcattctaactggcgtgagatggcatctcgttgtggttttgagttgcatttctctaataagcagtgatgatgagcttttttcttatgtttgttggccacataaatgtcttcttttaagatgtgtctgttcacattctttgcccgcttttcgatgggggtatttttttcttgtaaatttgtttaagttccttgtggatcttggatattagacctttgtcagatggatagattgcaaaaattttctcccattctgtaggttgcctattcactctgatgatagtttcttttgctgtgtggaagttctttagttgaattagatcccatttgtcaattttggcttttgttgcaattgcttttggtgttttcatcattaagtctttgcccatgcctatgtcctgaatggtgtcgcctgggttttcttctagggattttatggttctaggttttacctttaagtctttaatccatcttgagttaatttttatataaggtgtaaggaaggggcccagtttcagttttctgcatatggttagccagttttcccagcaccatttattaaatagggaatcctttccccattgcttgtttttgtcaggtttgtcgaagatcatatggttgtagatgtgtggtgttatttctgaggtctctgttctgttcctttggtctatatatctgctttgttaccagtaccatgctgttttggttactgtagccagacagtcttacttgtgaaatgtctaaaatttcgaagcactgataagatctattctatataaactttcaaaaatttgaaaaggtagagtgcaaactttatgaagctctgtaatactaacatcagaactagatagcaagctaataaaataactatagaacaagtttaatttacttagatgaaaaaatactagcaaatagtgtgacatgttataatcatgtagaggttaattaggcatgcaagaataggtaaatacctgataatctgtcaatatgaaactatatgtgaaaagttatatagccatctcaaaagttatagcagaatacttctaataaaattcaataaatataaaagcaagagacccagaagttttcactgatgaactctaccaaacatttaaagaagaaattatacccattcatggcaactcttccagaaagtagaagcagatggaataatttttaaattattctgaggcaagcattatcctaatactgaaaccaaataaaagtgtgtttacaagaacgtaaaaaaaacagaccaatctcttatgaacatatgtgcaaatatcttcaacaaaatattagcagatcaaatccaacatgtacaaaaataattatacatgacaaggcagcatatattacaagtataaaaagattcaacattcaaaaatcaactaatgaaatttatcgtgtcgacaggctaaagaagaaaaatcatatatgtcaacagatgcagaaaaagaatttgataaactccaacacatatttatgataaaaattctgagtaaactaggaatagagagaaacttcataaccatgattttttaaagaatttacaaaagcctacagttaacatcatacttaatggcaggaaagaatatttccacctttagaataaggcaagacactccctctctgcagtgttagtcaacattgtagataatccagtaaaacaagaaagtaaaatgtataccaattgaaaaggaagaaataaaacttttatattctcagatactatgtagaaaatgccaaagaatcaacaacaacaaacctcatggaactaataagtgactatagcaaggttataggatacaaggttaatatacaaaagtcaattgttttcctatataccagcagggaacaaaagaatttgacactaaaaacacaatatcctttatattagcaccaaaaaattaaaatacttaggtgtaattctagccagatatgcatgacatatatgagaaaaacaacaaaaatctaacaaaataaatttataaagaactaaacaagtggaactgtattccayattttgggtagatagacaatattgttaaagtacctgttatttctgactttattttatagagtcattatactttcaataaaatacaaaaaaagttattgtgtagatattgacaaactgactctaaagtttatatgaaaatattatagatccagaatagctaatacaataaaaaagtggtaaaactaatattacccgaagatttaggataaagctatcagtatgaatcagtacaatgtggtattgatgaaagactatacagttagataatggaatagaattatgagcccaggaagaaaagtacacaaatatagcaaactcatcattgatggggtaaaggcaagtcaagggaagaaagactctcttcaccaagtggtgctagaatagatgtaaaatggtgaaaatagaccagatgttacacattttacaaaatttacctaaaaatggatcatagacctaaatgtgaaatacaacatcatataacttctagaggataatatgggaaaaatttaggttgaatttggtgaccaatattggttgaccttgaatttggtaatcactttttagatacaacaccagaagcactatctacagaagaaaaatttggtaagttgaactttattaaaatttaaaaattctgctccatgagacactgtaaggagaatagaaatataaaccagagactggaagaaaatatttgccaaacacatagctgataagtgagtgatattcaaaatatacaaagaactcctaaaactcaacaataagaaaagaccccacttaattgaaaatggacaaaatatctaacagacagacacggcacataagcatatgaaaaaaaatgctcagtatcatatgccattagagaattgcaatttaaaataacaatgagacaccataatactaagcaccccttagaatggctaaaatctatttaaaaagcaagactgaaaatatagaatgctggcaaaaaatgttgagcgaaaaggattctcattcattgccaatgggaatgcaaaattatacagccactttagaaaagagtttggcagtttcttacaaagctaaatatagtcttacatatgatccatcaatcattctgttaggtatttacctgagttgaaaacatatccacatcgaagcttgcataacagtctttataatacctttgttaataactgtcccaaacttaaaacaaacaaaataactttcaatagataaacagactgtggtacatcaaaacaatggattatttttttagctatataaagaaattatcaagccaccaaaaatgtatgaaacttaaaagtacattactaaatgatagaagcctatctgtaaaggctactgtatgattccagctacatgacattctgaaaaaggcaagactatacagaagtaaaggatcaatggttgctagtggtatagaggtatagggaggaataaatagatgaagcagaggattttaggacattaaaactattctgtatgataatgtaatgtgaactcatgcctttacacattggtcaagacccatagagctttactaaacaaaaaaattaatcttaatgtaaactatgaatttagttaatgatgtattgatattgattcattcattgtaacacacgtatcacactaatgtaggatgttaattatgtgtgaaactgtgagcagggaaaaaggtacatgggaactgtatactatctgctcaatttttctataaattcaaaactattctaaaacgaagtctaccaagtaagattacaatactagcttgtataaaaagcatagaatacgatggagaaagctggaacayggtactgaatgaggcaaataaaatatatccagaattcgaggaggaatttgcttcttgatatcaagatctactacaaagctatatcaattcatataggttggtactggcacagggaaaggttaactggaacaatttaattcacgaaaattacagaaacagactcatggacaaayggaacttcaatcccatgaattaggaagcattgcaaatcagtgaacaaagaatgtattattcaatggtgcaggaaataatgctctcacatgtggaaaaaccatattaaaattctacctcatacagaacatattgaaagtaatttctgatgaataaaagagatatgagaaaaacaaagtttaaaatttttaaaagaaaatatataactatggcagtgaagcattccttaagtaagactaaagtctcaaaccctaaaataatatttgtaataatttggctatattaacaaatgttttcctgaaggatacaataaaacttaatagaaaaactgcagactaggagaaaataattacaacactatatttgacaaaggacgagtacacaatatttcataattaatatgagaaactcaacaacagaatagaaaaacgagcaaaatatgtaacaaaatctgagtgactttttatgaataaatgttcaatcattgcttagaacatttgaaaaatgcaaaataaaacgatactattttgcactcattagaaaggcaaacgtgaaaatatttgctaacactaagctttggtagaattatggagaaacacacatttctaaaccatgataataggagtataactggtacaatttggtaaataatttgataatatctagtaaattttaaaaatgcacttttttactcaaaaattccacttgaagctaaaaaaattactatctattttgttatgttcttgttaatatgtatgtatgttcttgttaatatgtatggttttgtgtgtccaatatagaactttaaaaattctatttgttgtaaaagttctattttattttgactttgtatcaggacattcacccagcaaacaaagcattggtcattggagagaaacatatatttcaagcatggccttcggtctattcagaaatataactattcaatagtattattatagttcttcaaatagaagataatagaaatcgtttcttttaacttactagtgaagatcaaacttatctaactctttatttggtttgtttttctctcaaaagagaaaatggtttcgaaggacaaatcatatttgatacattttgagaattctggttcatagacaaatatcccactggtatttccatcattcacaacaagctcactgcattttacctcttgtgtgggctctgacaatataatgattttctaagccttttatttctgatcttgagcaagaatcctggtgaggctgtcaggattttaaatgaaagtgaaaagaaattatacaccatgatgccagcaaatgaaaggcaaatgtataatttgaagtgtcaaattttagagagactaaaaggaatttgctatttttaagaacgtttactaggaatttatgagaaaaagacctaaatcaatatatttctaatagctggatcatagatataacttatcaattyttatattgatgcagtaataacaaatgttttttataccacctttaggcactgcaggcattactaaaatatattttttgattattgtagtctttatcaaaatatacttactttgttaacattatgttgtgagagtacattattcaacttagtacaaaaataaggaataaatttattttgaaagtttcattaattatgagtttaaaaatagatttatgaaagatactaatccaaagtgaatattcaagggtgatatttatttcctcttattacattatttctattgtatgtctgactttcaggcagagaattaaaaaacattcagtttaaatatttttggcatcttaaaataaaacttcattaaattttacagaaacaagtttacaattgcttaaataatacatattgtgttttaactgtgagtaatgtgttcacttgcttgacacataacattgttttaccttttcatactgtaagcaaacttctgaaaataactatccaagctaagaagagataccattttccttgaagtgttatttgtatttccccttgagaggaaaaacctccccttgagaggtttaattaagctaaaatttatggtgttaagaaatttttcaaaaacacttcagttaaattttgggtttaaggaataaatcctacagaaattcctctttaaattattgtgaaaaatacttcccttaaattctaaataatatttactatcctgataagatgcaattcatatacattttaaggttatgtttggaaattttctaatattattactctaaagcaaaacaatctatttcaaaataattttttctttcaagttcttaaagacaaatagctattttaggtattagttatttctattttgtctgatttgtttattttcttctcaggtgttttaattcatcttgggaaagggcctagcagagcaacttcaatagtttaatgtcataaagctgaaaagagagaagaaaaatgttataattgcttttaggttagcaattattaatgacatttatttttatgattaaatttataaaatgcttttatataaatactgatgttatatttcattgagaatttactatgtatcaagcactttggtaagtagtttacccggaatatcttatttaaccctcaaatgaccctacacatcattaggtactgctatgattcctattttatgaaagcaagactgaactttagacaatagaaaatcacataactattacagcaaagctagtaagtggtacagccactatagcatattattgctgtctctctccccccttctctctgtctccatctatctactgatattctgtctgtttgatctgcttattactgacaaaagggactttgaagactccaactataataaatttgtctatttctccttttagttctatcaattatacttaagattttttcttggttcccctaaagtttacaatatacttttcaaattaacataagtccacctttaaataacactatattgcctcatgtgtctaccttataccagagtattaccaattctaccattccactctttgtgatatttttctcatgcacttcacttatctattgactataatcatacaatttgtcattaccactatttaagcaaatggttatattttaggtcaataaagaatatgaaaaataagaggttttatattgtcttcatttattccttgtccaacactcttcctttctttatgaggatccaaatttcagacctatattattttcttctccctcaggaacttctttgaacatttcttgcaaggcacatctgcttgtgataaatacctcaaattttgttttcaaaaaatctttattttttctttcattttaaaaggtaattttactgcttattgaattctagatttttttcaatattttaaatacttcatgttattatcttcttacttgcctggtttcagatgagaggcctatagaggcacaatataaggttcctttataggaactataacaattacagaagagttctcatctgaaacttgtctcatctcccccctgcacactggattctgtcaagatttttccttttctctggttttacacaatttgaatatgatatggctaggttcagtatttatcctgttttgtgttttctgagttttgtggatttatgtttaatgtctgtcatgaatttttgaaaatttttgaccgttgttactataagaattcaagtattttctaggcttctttggctttttctcttctcctctggtatttaaattagatgtattttataactttttatatagttccacatttctttccttgttttgtttttttgtttgttttgtttttcttgagacaggatcttgctctgtcacccaggctggagtgcagtggcacaatcatagcttactgcagtcttgaactcttgagcgcaagagatcctccctcctcrgcctcaagagtagctaagcctacaggcatgcaccaccatgctgagctaatttattttttatttatttatattttttgtagagatgtggtcttgctatgttgtctaggctattactgaactcctggcctcaagtgatcctcctatctcagcctctcaaagtgctgggattacaggcatgagcaattgtgtcctaccccacatttcttgtatgttctgttttgttcattcttttttccctttgcattttataatcttcaggctatatatctgtgttttagtgagtctgtgtatctgggctgtgaccttctaagtattcttccaatggtactattttcttttcccttgttcctacttgcttccctatgtgtagtattttcaatgtatacccttcaagccctgacccctgttaatcccgccacacccccacccccaacctccctgtaacttaggtgaaataggagggctagaggaaggagtggtgagaggaatgcttttctgccttctgcagtaaggctctggccaagtctttttcctgtagagtaagcctttgatatggagaaggctctggacatgtttcacagtggtttctcttcccctccgccccattgcctgcccctctccctccccacctccaccacccaacagaaccagctcagaaaccttcttttgatcttcacagtgagaaactcaagtttgtaggtctcccaagactgtagctcccagaagtttttccactctacattcagtgtctagcaatttgtaaaaattaccatgaaagtattttaccaatgtatgaycccagcttctgttccatgtacatagatcttgtctgtgtctctttagatttacctgtccttccatattttagtgtgaaagttttccctgcaacctcaacttactattttatccaagtaatggattttcagcttccctggcttcctgctttcttctttcttcttcttcttcttctttcttctttcttcttcttctttcttctcctcctcctcctcattcctccttcttccttcttctttcttctttttttaaaggacatcagttacaacttccattcttctatatcggagatgaaactgaaaatccaagtgcaatcaaagactcagataaaagacattaatttagagtcttgcaccacagttacagttatgaaatgtcattggtgggcttaaaaagtcaaatcttcttgtgcaaatcgaagacatcttttgctataatgcatcttacttcttctcattttactatctttctttattgtaggttggatcatctggcataaaatcaactgcttgtagcttttgtgtttccttggtctatagagatacatatatatcttcctattaactccaattaagagttggtgcaagttattgcagtttttgcattgatgaaatttgccatttgatattggaatacattcttaaataaatgtggttatgttatactgttactggtggagcgtgtctaggttcttggcatctcgaacaaagaattggacaaaatgcacaaagcagagaaagaatgaaacaacaaaagctgaaagttattgaaaatgaaaatacactccacagtgtgtgagcaggtctaaccataggggttcaagggctccattacagaaataccctctagaggattccagtggttacttggtgtacaccctatgcaaatgaagaagattaagtaaagttacaaagtcatttacttagtgtacgccctatggagaggatatttcctgtcatagctaaagagtgaatctgccttacattccctgcctccagaccctattttcctttctcatttccccctgagagaggtaatccctataaatctttatgggaggtagtgggactgatggcctttcttctgtaactgcttcatgctggctaacctattgggcatcacagaactctcaccctgctctgtttagtggaggcaaggtagcttcttgaaggccaggggtggtgctttcacttggaactagctggaacctttgttgcatgatcatctgaagcttgatggtctctaggagaaaggaaatgaatttggttaaaagatttaatggaaacttcaggggatgcatacctattgttataaataaagtttcggtgccacaaaagaaatagcactcgaatataaaattttctttttaattctcagcaaggcaatgtacttctatagaagggtgcacccttacagatggagcaatggtgggtgcacacttggacaagggaggggaaggggttcttatccctgatgaacgtggcccctgctgctgtgtgttaccctattggctagggttagacagcacaggctaaactaattccaataggctaatttaaagacagtgacggggtgagtggtttggcgggagtcagggtggagcaggtaagggtggagcaggtgatcagaatgagtcagggcggagccggtaatcggaatgagtcagggtggagcaggtgatcaaaaaagattgctttacgaagaagttaagtttaaaagtgggaggcaaagaattgaacatactgacctgttgattctttgaagaggaatttagaacttatatctaataattccctcctcttgcattttccttacagctctttcttttcaaacttctttaacatgtcctggcttagttgttctgcttgattttccaaaagaagaagcttttctggataaggtggatgatagttaagggaggttttaataagcgccatttctatgagcctctgcaccaacccatggatgcatggtatgacacagcacctgacaataataagtacactcattacagctgtgagagaagtaagaattgaggctattattcctttccatttaccgaaccacttttctagccatcctgtaaaggggtcatttacccctgagttgttggttaactcatcagacagagcagtcagaccttgcaatgcctttgttatacttccatcaggggtggtgttgtttgggatcaaggtacaacattgagttttaattgtgatgcaaactgcccctctttctgctaataacatgtctaaggctatcctattttcgtgagccatctggctagtagcccctaattgctcagctattcctttaacagcatctctcgtgtagttaataaatcactgttggttgtagtagatgtagtttatccaatttacatttttattaattgtcacccaccaaaatattgactcaaattctgcagctatttgatttcaggctttaaattgatctkgtattctctgtgggactccaattgcatttaaatagacgtaagagttgaaagacccataaggggctcctctcactttatgatgtcttatttttccttcctctggttgatgaaatgccagggtgaaagggatagccaactggactaaagcacaggtgccactccagttatttggcagagtgtgcagtaaaggtccaccacaataccaccacacatccactcggggatgagcaagggctgactgattgataagctcttgaaaattcttaagctcactgcatcccttcaggtctccaaggaacactaagttttctgcctgttgtgagagacacgaactgaacttagttttgggagatggaagctggatggcccttgggggttgaaccgcagggtgccggactttgggatatagcagagagagagcttggtacgacttgttactccaggctgtagaatcccggaaaagagctaccatgaagcccatgcccggtcacctggaggaccaccctagtgggaaggagacaatctgggcctctggcctgccgtgcacccaagcataacaattgcttttgtttaacctgcaggcggaatatttgatccattccaaccaggcatttgcatcttggtacctgtattaattgtcaaagtttgttttaagtctttaacttctactgtagctatcttggtcttgtcattagatggaggaggagcaattgttccattgtgagaggttttggaagaatgcttagaggaagctgcaggcagtgggggatcgaataaacacatttcaaagaatccaatagggtctgtccctgaaacctcagcccccataccataaaactggcttaaagaagggaagtggcctagaaaagaggaagaactttgagggttcaagataacaacttgtataggattgcactggtttagctgacagttggagggagtggtgctgtctctctcataaagtgaatgtatggttttaggaaattacaaaaaccggttggggcagtccatccttgctctttagtggtccatagaatgctggaacaactatggcataaaagctctacattggggtgggggcaagactcctggttgacgctggggtctttattgaaatcttcccagatcaaatggtcccaattcactaatgctcagtcttaggagagtcaagggggacagagctacttttctgaagtagagagctgtctttgacttggcaagtccccacagggtataacaaagcaagcatcaaatgcaatagtttgaggcaaaattgacttggttatgttaataactagatggtcagcaatagagtgaggaaagaagaaagagtaatagaatagatgaaagagagttaaatttttcytagctttagtttggtagggttttcccctgggaatatggcccacaaatctgaaaggggcagcactttcttgactcgggtgtgatgagtccatcccctttctgctgtacgaacagcagcagtctccgtggttagcagcacaaggtagggtccttcctaggctggctcgaattttccttctttccaccctttgatgagaacgtgatcctcatactggtgctggtttactggaaattctaggggtggtacctatgctagaggattttagttttgagggaaaggaaagtgtaagataaaccaagtatgtaatttctaagaaactgatcttttgttttaaacgtggggacatcagcagtggactttatgtccttcgtgccttcttactgagaaattttctttagcacttatttttgttagtttttagaccaaagaaagccaaacaccattttatatttgacaatgcttcctgtatgatttttataccaaataagctaaatttcacctttctattagtgtgttactaatgctaaattcaattttaataaaaccttttagacatatttatccaattttaacgtctgaccataaggtaagatttttatagactctttttaatcttttataatttttgttaaagagcaggttagtgctttaagaaaaacctgtggtgcttttattttaatgtccagttcacagaaagagtagatgacacccctctaactttagccaatgtttacacacagagtttcctttacaattaacattttaaagcttgcttaaacctttaaaacaaaattttttaaccttttaatgcaggtaaaaatccacaatcttatgcctccttataatcctttttccaaaagcatattttactttccttgcacaccttgcacataaactgtttcttcaatagttttaccatcaggaggccaaactacttttaaattatacaacatttcttgcataaattcccttttataactcttttttttcacaactttcacaatctttgacatgtctcaaccttctgacttgctgcaaacatccctttctttaaacaaccagttaatttattttaggacaagaatttaccatataacattcctttcatataaattattcccctctccctctttttcccccattcttctccaaagtgaacttccttcatgtctgtggactagactgcctaaggccacaagattagaagttagggtaatacatgttacactgttaacttttagcaaacttcacttttgttgaaaaccttgtaagtttgggatttcaattatcctttgctattaataagaccttgtttattccaaattaacttagaattggtatagatggttccttcctggttctgtaagtactttaaggcttggctgagtgcaagcagctcgcatgtttcagcagaacaattattaggcaattttcctaactctgcctctagaagagtttccctatcaattactgaatacccattgtgtctttttccctcaatcacccaggaggaatcatctatcrtcctgtcctgaagggagctcctcctatgtctggctggacctttgtatagtagttaattaagatttagatcccctgttaggaaacctgctgggttaagagaatttttagtggttaatgttgatcatctttttttttttttttttttttttttttaacagaatagcctcatactttctcctgttagcaaagcagttgttgctacagattgaatgtattcaggccatccgtgcattactgggttaaggatttttgattaggaaggctacgggttgtcagtggcctcagtgctctggggctatgcccttgtttacactgacaacaaggtgatattggagtggtatagggtcatggagaagaccttcaattatcaattataggttttaaatttactctggcttttaagggaatagggtacactgttttctctttactacttctatctctctctttctttctctgtttgactttctgtctctttctctttaactccctctttgtctctctgtctcttcctctctctctgcytctctctttctctctttctccttgactccctatttgtccctctgtctctttctctctctctctttcctctctgcttatctttacctgcctctgccagctgcttatgctgctgttctgccctctccttcccctcccccttcccctagaggagggaccagtgggagtggagatactctttcttccccagagaagaaagaaaagggggggttgtgtgaggttcaacmcttgaaattagtggaaggctcaacccctcaaaccagggatgtcttgccttgccttccctggaagtctcaatccctcaaaccaggggtgtcttgccttacctgccctggaaggctcaacccctcaaaccaggggtgtcttgccttgcctgtcctggaaggttgacctgtctcccccctttctgtctcttaaggtcctttgcacacttcccactcacggggagaaccccttcactccatccagcagaggacttgtcaccatccacacaaacaacactgcaagcagggttgtttgtgatcattcacacacatacacattcagccctccagaatttgaccaccaaggaagtactttacyggctcctgtggcttctctttccttggtcggtgcacagagtcatcrctgcagtatgtgaggatcctttaycctaggttgctggccagtttcttttcatgttgctgagagctcaggttattcctcacactgggtaggtcctgatttctcacccctgaggccgccataaggaggtggggcatgcctcctcaagagagaaccagagaccacccccagaggggaatgtgatcccggatgagcccccaaattcttataaagaaagttttgatgctgcaaaagaaatagcactcaaatataaaattttcttttcaattctcaacaaggcagtgtacttctatagaaaggtacacccttatgggtggagcaatggtgagcacacacttgggcaagggaggggaaaggggtcttatccctgatgaatgtggcccctgctgctatgtcattcccctattggctaggattagaccgcacaggctaattctgattggctaatttaaaggcagtgagggggtgagtggcttggtgggagtcagagtggagcaggtaagggtggagcaggtgctcagaatgagtcagggtggagccagtaatcagaatcagtcagggtggagcaggtgatcaaaaaaggttgctttacaaggaagttaagtttaagagtagaaggcaaagaattgaacatagtgacattgattctttgaagggaaatttagaactcatatctaacactatgttgtcaggaatgtttattataaagatttgcaggagaaaaaaacaaaacctggtctgttctagaatttatgtgtttccttaaagtcttagcagaagcaactccatttttggtttggtttggtctgttggggcctatggcatgagcttagtccaaaaccatggtctcccaggattttctttaaaaaaattccctttttggtcaggttcttacttaggtgagagtatgaccaaaacgtagggccttagcaccactctcagttaccatcattttgggtttccagtcttgrcattttattataggttatggtgtcctcatggttacacatttctttcagctcttgccattccatttgaagagagaccatttgactttctagagatggctgcatgcaagcatttaaagccttgagagaatatagagcaccagggagactattattatgactgttgggaggataatagcaagagttcagagtaggctccttacccaagatccccataaaccaaaccttctaaaatcaaatagatcaaagaatgagctagatagartttactcacttaagtaagcagtctttttgttaatcccctaccactgaatttctataatcctcatttgatgtatttctccataggccacaagtgccagcagctgcacagacactcttctgttcagccaattctatcataactttcacaagagaattcaaagtttgttgtgtaactgtagcctttacagtagaatttgctatagagactatcatggaggatacatttgtattcattgcttcttttactctaaaccatcgaaaaaggacctaacaaatgatgccattctagaagattgaaggcctcctggcaatgttctctttatcccatgatgtgggttaaaaggaatgaatcaatgttttgtttctgacagattatgagccaatgtatgtaccatagtttacaaatgttggagaaagtaggcagagagagagagagagagagagagagagagagaaatatgactcaaatcctgtttatgagagcatacttgacacacttaaagtatcaagaagcttaaaatgcaaaaagttagtttaaggtttaaaggctagtgtgctccattaattcctgtgggcttcagaaaagtagcttaggaattccagataaatgaaacaaatgatggcttgctagaaatgcatagggaacaaaaaaaaatgttcacagaaccaaataagagccttaactatattttttaaaaaattgccaaattgccaatgcatttttttttacaatacttcttattttacttcaattaaaactaagagctttaactatgaaaatgttaattagccaaatgtctataattctgtatcaggtttttaaaaatattttattatttaaactttttccacatctttctctcctaaatggttccttactacattctttcataaataaccttttatctgtaatttgaactatcttttggataatttctgaattagacaaaattatttttcttttcactaataacattaccctttctggcatattttatatacagaattacattttaactaaaattctcatccttagtaacctaaaacttttgtaaaaccctaaaaagcaagaaatcctgaactgtcagatatgggcatttatggataagaaaaattccacaatcctttcttaattggaaatgacccagatagtaaatgagcgtaaaaaataactttaagattttaatttaaaagaccatagaacagtagacattgagttcttcggtaacttctcctgtagttgtaacaggaacagcttcggtgattgctctcaattagtcatagtcaacttctgatggctggccactacactcctcctcatcaaagctgatcctcttacaactacagaagaagttgccaaagaaatcaatatagaccattctatggtcttttagcatttgaagcaaattggatatgtaaaaatctcgataagtgggtgcctcatgagctgagcaaaaagtaaaaaaaaaattgcagttttgaagtgtcatcttctcttattctctgcaacaacaatgaactatttcccgatcgaattgtgacgtgcaatgaaaagtcaattttatacgacaaccagtgataaccagctcaggttgaactgagaagaagttacaaagtactcccaaaagccaaaattgcaccaaaaaaaggtcctggtcactgttcagtggtctgctgctggtctgatccactacagctttctgaatccaggtgaaaccattacacctggggaggtatgctcagtaaattgatgagatgcaccaaaaactgcaatgactgcagcaagcactggtcaacagaaagggcccaattcttctccacaatacccaactacacattgcacaaccaatgcctcaaaagttgaacgaattgggctacaaagttttgcctcgtccattatattcaactgaactcttgccaactgactaccacttcttcaagtatctcgacaagtttttgcagggaaaatgcttccacaaccagcaagatgcagaaaatgctttccaagagttcatcaaatcccaaagcatggatttttatgctacaggagtaaacaagcttatttcttgttggcaaaaatgtgttgactataatggttcctattttgattagtaaagatgtatttgaatctagttattatataatgatttaaaattcatggtccaaaactgcaaatactcttgcaccaacctataggaataggaagccaaatgaggtttacagaattgaatttaagaaactctgagtatggcttatctaaatatatccttatctatatgtatatgttgtaagcctaattctccacccacaaaattaatgtattcaaggttgcctgaagagccttttacagtttctcatttttctattccgttccacctaagtcatttaggagactctcttgaatatttactagcacttagaataaatcttttcttcaagtgactgtgtttttgagctcaactttctcagtaggtattcagagctatgtagagccatggtgaattgaagcactcagatagaaggaaattttttatttcactaaaatatgtaattcagtctttctataatgtgagtgaagctaatgaatacattctagttctgaacaaaaggacaataccaaagttgataatttagtattacatcaaataatttggtgataaaatgaacatatattgttgtctgtgctttcgtatgcaaagatgttgaggtcttttcacatctcactgtgatttctgcagcagtaacccataccttttctgttctccagtagtagatattttagttttccactacttaagtacacaaaatttttagggtgaattgaatattaatgtattaatgtaggacatagtaatgacaattataagagtaacatcttaaaagatcagcatttaatttaactcaaagttattaaaatctcaaagaaaaatgtccagattttatttttgagaaagaatatgacaaagaacaaaaattattttttcgtcaatagtaaatttttcaatttatcttaatgtgacagttttgctagaaaaaaagcttctccaggccaaagaagtaagatactctacatactgcttcttttcgtgaaataaatattatcattcttattaactccaattaacagaaagtcaactgaggtttagagagtaagaaactctgaggatggaactctggcatcatccatgactgtttccagccacatgggataagtcaggttgtagcaagacagaataagaacaggtaaagggaagagacagagaaatgggagagtacatgcaggaacctgatttggcgagcttccctcttgcttatttcatggtttgtttcagctgtataatttttatgtaatatataagcatactggtaagagtctaatttcagtcactgcaacatagaggccctaaatattcatggattaagcaaataaaagtttgtttcttgattggctctgctctgagaagttataagggaccccttctttcctgtatcaaatcaatgataaagaggtgaaaatataaaggaaaagtagattcagatatttggggctgtgtgagtctgagcaaatcagattttgagttttgcagactttagacacatattcatgatggtgagtagggrcttaactcttcaactcagaaaacggaggctctgagaggcaaaataagatgccaaagtttgtactctccccattgcaagcatatagacaaaaggtaatcaaaactcaggttattctgaccctaagaaccccccataygctttatattctcacagtgaactgaaccattgaacaattagttcaattttgatagaaataggaagaaagatagcattacaggcaaggttaacaatataaaaaatgattgtaacaagtcatattttccacacctcagtgacgtttttagacatgcagcctacagaatctggtacgattccagttctgaaatagcatagtaggaacatttgcagtttgagaaaaaaaaattgtttaaattaggaaacatcaataaaaaagcatactttgccctgaagctatgtgaaattatagtgcttgatggtagttcatgaatccatctactcacatattctaggtcaggtgcatatttcaggacctgctacatattttattctgcctgtttataaaataagaaaatgccaaacatatcatttaaaaggttttcattgccttgcagaagtaaacttaagattctctggaggggagatataatgtaaatcagtatttctgaaatatcgtagcattgtttgaagatcaagaattgcttggtgccctggcacggctctgatttacaacttaacaatttcattttctagaaataaagtggagttcttgtttaaaggctgagatattcctgttttttctggatatcagtaataattaaaattcatgacttctgtattattcatgcagccctttattttattttattttttttgagacagggtctcactctgtcgcccaggctgaagtgggatggatcaatctcagcttactgcaacctctgcctcccaggttcacgcatttctcctgcctcagcctcccgagtatctgagattacaggtgcttgccaccatgyccggctaatttttgtatttttagtagagatggggtttctccactttggccaggctggtctggaactcctgacctcaggtgatccacccacctcggtctcccaaagtgctgggattataggcatgagccactgctctcagccatgcacaatttaataacagtgttttttatgttcaatgtttatgaagggtatgccttaagggtacaccgagctttacaacaaacagatgctagaagtaactatctagtgtgatacccatatgaatcaaagcctaaaatatatgtttttagtaatttgagtacaaaaaagagaatatttttcttgaaataaggaaaatcttagaaaattcaaactttcaacgcaagtatataaaaaggttattgcttactttacaaaaggagtttcatctttatagtgggagtcatattttagaagttgaggtatgttgatagtggatttcttcaattatggcataatgcgtttatcatagagaaacagtgttttagaaaataatactaactaggaaaatactcgactgggaaaaatattaaagcttttaaacatatattattcagtaagaaaatatggcaccttaggatgcaatataagtgcaaactattattttaaatataacactaaaatcgctatataaagagtaggggacatgaattgaggtattgcatgtctattacataaagagagaactcctttgtaaaattatgcttatagaacatttaaatgatgacagtgatttttatttatatgaatttggtatttacatcaaattcatataattggtatttacattcaaatagtacatattagagagatagtatacgcctgtattaatgagtcattaaagttatacaaatttcactgttgccatactgtttcctcatttaattattaaaaaagttaatgaggtatctttgaaggaacatgatattaaaactgctattgatagattagattttacttggaatatgctacttattttcaagaagaaactggtttttagaaataattttggaaactttttagctgttctcaaatatatctgctcaagaatatctgcttgtttaaaattatattctgatgaaggtgaaagtggttaaggagtagttatgtgaaagatttctggtaaccttccaaaggctgtgaatttggcaatgttaaatgtagtttaaaatttaaatttaatacagcttaattaagcaaaatactactactgctaataataagatttgagaattgggtagccccccggaatcacagcagattcagagagactccaaggatgccacatggtcagagcaaatttatgaacagaaaaataatagtgttgtcctgaaaatggaagtgatatacagaaacagccagattggttatagctcagcatttgccttatttgaacacggtttgaacagttggctgtctgtgamtggttaaagtatggctgctgggacagaagcatactcctcagttaggagtatgcctatctactaaattaggttagagttcatccataaggactcaagaataagaatattttctcaggccagattttagtttcatttaacaatccactccttttgctcagcctctcaatttagagagaatggccaaactttaggcaataactttactccctgtcacctctgtaaatgacttattttgtctcaatatgaaattcacaagtgttctgtagtcttaatatgaagttcacaagtcttctttggtgtcagcatggagttcacaagtcacagcttcacatcagctgaatgattcattctgttcttgctgacctagtcaaagtgaaactaactctcaacggatggctgcacagaaaacatttaagatgtgagaggctatagaacacaagagggataattatcatgactatcaaaaagataacatcaaaatacaaaggtgtatttcttaacaagagttgttatgaaatgagccaaaccatgttaaacaaaccaaagctcaggcaatgtaggcagttcaacagcattagtgtctaattggtcacagtcattatttggagtatgatagagattaagaaccatggttgtaacgtggtctgatttaaagaggtatccattttcattgttaccttggtaacacaagtcataataacctggagacctaactagaaaaaataaaaagattagaaacctttggaaatcccaarcttgccatccattatttaggatgtttgcaaaccaaattctaattgctcctgtaaacacatcatttgttcttttgtcttgggaggtttctttaatgtgtttgttggcagtgtctaaggaaacagcagtaccagccacatttttattaataattaagttttctgtagtaacaaaatcaggggagagagaagtataacattgagttttgttaaatgccaaacataggctcctaccttgagtaaaaagatctaaagctgcatgatatttaagtgtttctgttgaacacatatgttactttatatctttcagaaaatggcttctacccacctgaaactatgggaggtttgagtggctgaatgatatggtttggctgtgtccccacccaaatctcatcttgaattgtagctcccataattcccatgtgtcatgggagggaccagtgagaggtaattgaatcacgggcttttcccatgctgttctcgtgacagtgaataagccttaccattcactattaaccgttcttgtgacagtgaataagtctcactataaaatgtgatggctttataaagagaagtttccctgcacatgcactcttgcctgctgccatttaagatgtgactttgctcctcatttgccttccaccacagttgtgaggcctccccagctatgtggaactgagagccctttaaacctctttcctttataaattacccagtcacaggtgtgtccttattagcatcatgagaacagactaatatactgaaaatccaatttttcccaatttatggattagctttaaatttcatacaactggtaccccactactctaagagcgagcccccagaaacctccctagaatctttcctcagtggaaactagcttatctttgtctatttccatgctactgataattttggttattgaccactttggcctctgatcataagacttgctgttatgagaattttcagggaaagctattcraaagcaggccaagtcaaatagtaagatccaaaccaaagaggaagtaaaaaatgaaatatgcagattttctgcagatccaatataggccctcggagactggaaaagagggtcacctagttgcatttgagcaggggtcagttagatttgtttgcccataaatctgcatagttcttgaacaagggccagtaggaaattcgcttttctatggcaccctgtaagtgttagggtgtaagggcatatgtatatgcacactaaatgtggatatatatatatatatatacacacacacacacatacatttatatattcctctatatatacatatatattcctctatacatgtatgtctccacatttatgtgtgtgtatatatagaggaatctatatatgtaatatatatacacacacacataaatgtggagaccatatatatatatgtgtgtgtatatatatatatataaatgtgtagatatatatctccacatttagtgtgcgtgtgtgtgtgtgtgtgtgtgtatatatatattayatatatatatatatatatatatatctccacatttagtaaaaagagacccaactggatttaatccaagcaaataattgtaaccgcatagatgattcccaaatcttgagtgtgtaatgccaggaagcataacataccttttgcaggcatcatttggatttgttttctatattatttattaaaaaataagagtgctatttttagtgaatgcaggaaagcaagtagcaacaatgtttagaatatcaaggatagctttttattcttcccttggagtttcaaggtgattgtcattgcaaatgttgagaggcattggcatcagtgtaattgtttcttgattttttggcattaactaactaacccaacaattaatggttttgtattagagcataatcttgagctaaagccatccattgcgtatggtcccatggattttcctgcaggaaaaggaaagaattagagcaacagaaagtaagaaataggaaaaaaaaaaaaaaagcacataaagttttcatgtttgcagygaagttttgatctgtgatcttgagaaagaagctcatgacttggattctgtctgcttgtatggagagatttccctggtcagctttaccttaaaatctccagcaggcgtacagttccaggagtctgaaggggcgcttttgaggtgtgagatgtggatccaacgtttaaggtcctgaagcttcactgcagtgtgggttgtgagaagaacttggtatggccccttccaacaaggttcaagagcagccttcctgtgatggcatttccagaagacccattctccaggttctagactgtggaaggtttgattgccctcagttggtggatctcaaaaaccttctttatctggtgaaagtacactttggcataatgcattaaagccttacggtatttaggcatagcagagtttaggggagcaggacatgcatgaagttmtattattaggggtatacatcttccagtgtctatttcctaaggggtaattcatgttttccagtgagagtggatatgattgccattaaagccaaaggtattactttgaccaaggcaacccaattgattccattaactttgccaatttcagttttaatatgcatttttttttatttcaaccctttctagaaaactgacagtgactaacaccttatttaactgatttataacttacccagtaaaataagtttccctatcactggagatttttccagggacgytccataaaggaaacgtattttctaataatttcttagctactgtcatagcatcagctttcctacccaggaagacctctactcaatcagaaaacatgcaaatgattacaagaacttactgatatctcactaagggtggcagctgaatgaagtccatctgtaaatgtgctttgttccatcaggtagtggaaatacaccacctaaaattttaattatttttccaggattatgagtttgacaagccaaacattgttatagaccattttagcaattttggaacaatcacctcaactgtacttatttcataatttagattattttgtctgtttagtgataagttgtggaatgcagaacttttaagaacggaagcttcaaaaactcaggaagaaccaggaggctgtctgggccctctgtgagcctgcatttaacattaaatttacattttttaagatacaaattttgtttcttcaaatcaggtacattgcactgcttattaaataggtcaccgcaagggagttggcttggattaatcttatggagtttatttagattgcatatccaaacagttttaagcagtagcagatttagcataaaaatgtgataaattattccctgaaccaaaataggttcagatctataggtatcagcttcaatgttagtaacagtgatctattatggtaacaagatagcaaaaatgagtttatctacttggagtccatttgtgatgggagtcctgctaaaagtgagaaactctcatagttttcatattatgtctaaattgtgaattactccaaaagcatatctgccatccatataaagatttactcacttgtatttacttacatgacaagcttgggtgagggcaaaacgctctgcagcttgagttgacttaaattgaggaagaattccattccctattcatttattataagtggcaacaacacaccctgcctgatattttccttctgagtttttggcatagaacacatgccaatattttaattttaattcaatattacccagtggagcatctcataagtcaacatgagaggtaattatttctgacactactgttacacaattgtggtcttcatcattgttaggcagaggtaatagagtaggagggttaagtgtactgagcattttagacaaagattaggaaactggagaagtattttataagacgttagtctacttactgaaaaatgctgggctttgttggaatttagtagacttgccacaacatgtaggatttgcaaattatgttcatttcctaaaaccagatcagatgaagcttttacagcttggctgctgttgctactgcttttaaacaactaggatatgccttagccactgggtctaattctgggatataatatgcaattggcctatgttttcccccatattcttcactaagaactcctaatgcctgacagttatgttcatgaatgagcaaggtaacaggtttagtgtaatttggaatttctaaagctgaaggcggttgtaaagtcaatttcagttggctgaaagactgctcatgactgtcttcccaagataaagtctctggtacagcatttttagtggactcatacaatgacgagaccattaagaaaaaatttggaactcagaatctgtaacatcctgcaagtccaagaaaacctctcaattgtcttttggttgcaggttgatgaaaactgaatagtttttaccctcttaggtgagagggaaatccctttagcagtcaagtcatgtcccaaatagtgggatctttctctgaaaactgaagtttttccataaaagccttgtgacttttatgtgagagttgctatgaaaggcaaacagtcaatttcagagcactctgctctttagtgggggagtataacaagaaatcacctacctcctgaatgagagtaggattttgaggaaactgtagtataattaagtcctgatgcaatgcctacgaaaaataggaaggggctttggtaaaccccagtggcactatagtccaggggtacagctgatgttttctagtaggcaaacaagtgttgatgctctttatgaacgagcagtctaaagaagactaagcagagatctattgccgtgagccacttggaatcagtgggtacattaaatgatagagtattaggattttggactacagaaaaacttggtattacaattttactgcttgtccgtaaattctgagcaaatctccaacctcatccatttggctttttaactggtaggattcgagtgttacaagggctggtgcatgaaattataagtccttgtttaattaaatcttctataattggtgagagccctgaaattgcttcaggatttagtggatattgtgaaaatttaagcaaaagtgtagaatggtctatttggacttttataggttccacactttaattcttcctacatcaattgaagaaaaggcccatgaagattcaggtatttttgaatgatcaggggtattgcaagcctaagttttgttcttatcaatttctgcctgtagacagcataacaattctggttcaggagactcaggaaactctaagatttttttctccctctgagaaaaattttatgtgccttttagctttgaaagtaagtcttgccctagcaaatttactggagtggtttcacatagtgaaaaggagtgtttttctgaaaagagccccaagttcagatattggaatctacctttctaccccaaggaatttgttggcttattaaagtgggatttattgtagatagaatagctctagtatccatcatgactttacatgactccccatttattttaacctctgtttctccatgtttatttaagggtgtaatggggagcaatttatcacagaatcccttggagccgcatcaatgttatcatcagaacaaaggtctctttggctccctctagtggcaaaacagtttggcctaaagagaggcttatgggtggacggttactaaagggggacaatctcttttccgctgtcctagctgtttgcaaataaagcagacatcttagagtaaagaatttcttgttctaggacctcttggttgtgatttaaaaggagaatgggaaggtctgtttggtcccggcccctgtaactgttgtaattaaagagatttaagtttgttaaccttttgggttttttttttcctggctctagagtcctctcaaaatgttcagttaaggtcactaatttagtcatatctataacttcccatcccagtttatggtttttaattaaattattaagttcaaaatggaatctacttataaatagaccagttaataccatttccgttcctgcaggaaatactccttgctgaactttgagcccagaatgtttcacaaacaagtgtttctaacagtgtttctacagaatttgtaatctgaaactggtccctcatcctgtttttgttttcatgatgtactgatcaactttttgtggaaaatttagaaattgaatttaagaagttttcagcattttttctaacgctttttgttccttctcataaaaaggttttggatgggtctttaacatcgtcctcaggtttgtcccattttkctgctrtaatccatttgcaagctttatcaggcttcaatatcaagtgactaaattgataaaggtcagggagtcctggattataaccttctatgaggatcctaaatttctcagtaaatttttgagaagttcctcttggatcagggaagtactttccaatggctctaagctcagttttagaccatggagtgagagtggttgcagcagacaggcctggctgatcagaaggccttactttgttaggtctctaatttgtcttttttcatcatcttccgagtgaaaaggtaatttagcaaaaaggttagtggtgtcagagtatgcaggcagagatggataaagagaaggaacagttggggttagttcatttgctttttgcaaagaatttttgaaggagaacattttgattcatttagtctcttagaagcctctgcataccaatgaaagaacacattgcaaagtttttgtgggggtttttgatctcctttccttaatatgcctcaaaataaataattttatccaaattaaaagttctccattgtggctatcttgattctaagttttctctaataagattaacccattttcctaatgatgcacacattctgggcccataatttktatatataaaattagctggagtcccagaagttggggtcccagactcattggattgagacaaattcactatcaaaaataagagcatctacctaaggcttcaaactaaatcccatccagttaattatcaagtgtaatttgattctgtacccagttcagtctaaatattgctcagataaattcagcgctcagatcacaaattaacgaagttcagaatcctagagaaatctcatctatgacctccagttacaatcgagggagcagtgagcacaactagtgctgtgggcacctcttctggtcacctagtattcctagaggttgctggaattttgcctcagatcccacttgtgacaccagatctgttcgaagaaaaagtttagagaaatcaaatgcaacaaagtttaattgaacaagaaaaaggaaataatttgtgaattgggcagtcctcagaatcacagcagattgagagagactccatggatgttgcatagttgaagcaaatttatggacagaaaaaggataataatgtatagaaaacagacgtgaggtaaagaaactgctggattggttacagtttggcatttgccttatttgaaaatggtttaaacagtcggctacctatgaatggttgaagtatgtctgctagggttggctgatactaagttgctgttaccgaagcatactccttcattagggtttcagtctgcctatctactaagatgtgttatggcttgtctatagggactcatgcatggaaatacagaggatttctcaggccagatttcagtttgctttaacaataagaatatagacacactgctggacagcaacctatgctcaatcctgaattctttttattgttaactgaaggagtttggtcaagttatttaattgtttaaaacccacattatctgtaaaatggggataaataaaaatgaataactgcacattttttctgtggagtaaatgaggtaatctgcattagggcttgatttgtaactagtattcacaaaatattgttaaactgctattagttttctttcattcaatttttttttccagtttaaaagaatgttgcgataccagcaaaagaaaaataactgcctaagaactctgaagggaaataaaagttgaccgaaaatggagaagtattaacatcttcagcagtaacccaaatagaagtgaattttcttttgtttccctttattctcttgtagctttgaagtgagaacaggtctggttcatgggactgactggtggcatagctgatatttaaatgacgctccacccaacaagagcagaatatactttcctttcagatacacattcaacttccaactaaaccatttaatgagctacaaaaatccttagtaattttaaaataatgaaaattatacaaagtatgagcctgaacaatgataaaattaaactggaaatcagtaacaaaaaaatcttgaaaactgtctatatttaggaaatagtcaacaaactttctcctttgttagaatatcacaagggaaattacacattttttaactgaaacaagtgaaaatacaatatacaaatgtatactattctgttaaagcagtgatttggggaaaatttatagcaaaaaatacttctagtagaaaagaagaaaggactcaaattgatgatctaacttttatcttaagatattggaataagaaaagcaaatgaaagttgaaataagcagaagcaagaaaatctttttttttttttttgagatggagtctcgctgtgtcacctaggctggagtgcagtggcatgatcttggctcactgcaacctccatctcctaggttcaagtgatactcctgccttagcctcttgagtagctgggattacaggtgtgtgccaccacacccagctaatttttgtatttttagtggagacggggtttcaccatgttggccaggctggtctcgaactcctgacctcaggtgatccacctgcctcaacctcccaaagtgctgggatatcaggcgtgaaccactgtgcctgaccacatctttaaaaagattaataaaattggtaaatctgtagccagattgacagaaatagccatataaatagagattttattaggaatgaagacaaagaatcattacagtcattcaaattgataagaaaatattataaacaactttataccaataatttcaaaagcttaaactaaatcaattccttgaaaagacacaaactattaaaattcacttaagaagaaacatacaatgaatagtgttacactgattaaagaaactgaatttgagtttaaaactgaacaaaggaaactccgttcatggatagtctcactgatgaattctttaaaagagttaaataaactgaagataattagaatctttctaactcattgtataaggccaggtttacctaattaccaaaactagataaaaacattgttgtaaccacccaatgggttcaccttgcccactgcctagacagagccwattatcgagacagggaattgcaatagagaaagaataattcacatagagccagctgtgcaggagaccagagttttattaccacacaaatcagtctccccgaacatttggggattggaatttttaaagataatttggtgagcaggggtttgggaagtggggagttctgattggtcagattggagacagaatcatagtggggttgaagtgaggttttcttgctgtcttccctttctgggtgggatcatagaacggttgagtcggattactggtctgagtgatgtcagctgatcaactgagtgcagggtctgcaaaatatctcaagcactgatcttaggttttacaatagtgatgttatccccaggagcaatttggggaggttcagactcttgcagccagaggctgcatgattcctaaaccataatttctaatcttgtagctaatttgttagttttaagaaggcagactggtcccaakgcaagaagggggtcttttcgggaaagcgctattatcaattttatttcagagtcaaactataaactaaattccttccctaggttaatttggcctatggctaggaaagaacaaggacagcttaaaggttagaagaaagatggagtcggttaggtctgatctctttcactgttataatttcctcagttatattttttgcaaaggtagtttcattatgagaaaagaatactgaagaccaatattcctcaaaaacatarggacagaaatctataacgaaatatcagtatatcaaatccaggattacacaaaagacctttggatttggatttgagtttggatttgaatgtaaggtgaattttctcaccagaatgacaggtagatgtctatggttagccaggttgacctatctttctcttcccttgtcttgcaggagagtactctaataacgcaaacatttgcaaatgcttcatctacagattattacattaaaaattttgtaacatttgaaagatcactggacaaggcctctatagataatgaggggaaaatcaaaacaatgcttgtctaccatttctgataaaatagcacaacttattagaggatgctggctgtaatggaaacaaggatctggagaccgaattggagaggacttcaaaaatgggatgaatgtatcttgcattaccttgagtataagtttattcacttggcccaagttgttggtaagcattggaagttcaagcatccctagatatccttaggacagagtggttttgccctctctagatcacctggaattcaggaaagtcacagctattaagtatgagtctcctctatttgccagggttctccagagaaacagagctaataggattagctagctagctagacaaagagatttattttatttattttaggatttggctcacacagtcatgaaggcagagaagtcccacaatctgctgtctgcaagctagagacccacgagagttgatggtataattccagtccaagtgtagaagacatgccccacttcaaaaccaatcaggcagagagagaattcccctgtaccatggcttttgttccatttaggcttccaatggattgaatgaggtccacccacactggggagggtaattgactttactcagtctacttattcaaatgttaatctcatccagaaacacctttacaaacacagcaacaagaacatttaaccaattatcttggcagaccatgtctcactcaagttgatacttaacattaacaatcacctctctcaacagtaggctgagctgcgttttacacatacatgacaagagcttttgaataccaattgaaatttctgagcgtgtttttatttgaattttaaatataaatttttctaaaatatgtaatacgtgcctcaggcttcttgacctattcaacatataatagtataatttaacatgtgcttcaaaaattcaggtatacacacacacacatttacacacacacacatccatgttcattttctgaatggctaagatataatatcaaactttttgtatatttatagctttaggtacagagagataaatgggcacggagaaggctctgtaacttaatttattgaaaaagatcctgatgtagtttcattttctaataatatatcctctccctcaagaaactctgagttgcttatttctgccacctcttcttctttttctcccactccacatactaaatattacaggtatctcttgttattgatttgtctttattgtggaaccctgattatcttagaggcctcttgccctgcttctacatgccaatgtttctaacttttgcttatttattgctgaaccatatttttcctcatctctgtttctgaaagcctcaactgctgctaggtagcactgttttaaatgatcatttctgctgtcatcagatttaaatgaaggtaccttttctattgcttgatctctctttatttctctccattttttccttctcttgtccgcttttgccaataaaaacttcatctatcagatattctagaaagtattttaaatttccaataagcaaattttaaacattgcagtaataataacttccaagtactagcatcgggcaatcaattatttgtggtttaagagtgcagcttttggagttagacctggctgtgttctttccaaacatttattcatttatttaacaaatatttgttgagcttctactatgaacaaaggacagtgctagatgctgcagatacagtgaaaaataggattaaaattttccaccccaatcgaattacggcagaggtgattctgatcgtgctaatgtttgacaattaattacccaaactgttttcttttttttttttttttttgagatggagtcttgatcttgttgtccaggctggagtgcagtggcctgaccttggctcactgcaacctccatctcctagattcaagtgattctcctgccttagcctccgaagtagctgggattacaggcatgtgccaccatactcagctaatttttgtatttgtagtagagacgggatttctccatattggtcaggctggtctcaaactcgcaacctcaggtgatccacctgcctcggcctcccaaagtgctgggattacaggcgtgaaccaccacgcccaaccttatcccagattattttaatagataaatctgttgtggtctgcaaggagaaggaaagtgtgtatgaagttggaattaagagtaaaagtgactagctaagcgaagaggaggaggcaaccattccaagcagaggaaacagtaggtgagatgatctgacatgaaagagctttggtacactgagaagctcatgtgtaaaggccactcacaggtaaggctgaagtgtcaaaaatgagaggggctgggaagataggcagagcagttcatggagggctttgcaggctggattatgggttgggattttcttttaagagcaaagaaatttcaagagttttatatrcaaatcacactacagtcacactcagtttacacctctgtaatggggataataatatgaatcacagggttgtaactggaattatatatgattaaatttaaaaagtgttaattttagtttttaaaatattaatcacttaattatggttattaatttattattgttttatgatgtgcttttacatgcatgatttctaaaccttaaaactatcctaaaagcatggcaatcctctcttaacaggtaagatgatcaaagctcagataaggtgataacttacccaaggttatggtcaaaacattaatacagagtcttgaacaattgtgacctaccaggtggaatgcctctctgcctgaggtcactaaccccgccatgctttgtaacctgcctgtgtctttgcaaaaacttttccctctgtcttcagaacacagatcagatactatctatttaggaagtcttcctgagtcctaggtaaagtaaatctgtttttattctgcataattctgtgcacatatttcagctgcgatattatcatgccctcagattttatttgttcacttacctatgttccttacttgactaggagctttctgctcccctcagtctaattccatatctgtgtctccagtacctttcacaatgcctggcagataatgccttattaataaatgtttgttaaatttagttgaaaataactaagacatttacaactgtaacattttatatattgattaaaagatattatgcatctttgtcatcatggtttactctccccatgtttagatagctacctttttttcctctacattatgtacttgaatgtgagtatattggttcattcataagtatatatatccgatattttgaaatcctgaccttcttttgttccatttttttctacattgtcttttgcttggctgaatcatctcgttatcagtcttgttacagataaataactaaagctagaaacttgtcattgcatcatattgtgccttaaatatctagcctagctgttaaactacttaaaytctgatgagaattcagtttatagcatattatggggcttgcatagtactcatctaccatgaagctggaactttcttaagcttattgtttactagagtgcttgtagaacactacagaggaaaagctttatatagtgctagcttgcccacagagtagcgtgttttttcatatgttagcagaaagatatgatatattaaactgttttgaatttagcgccaatttagctttgaaaatgaatgttttaaagcttagactctacttttactactcatctcttagcatactaacattaacataatacaatttttgacagaagggattctccacgtgtcccctcaatctttaattcaatgtaactgtgatacatcttagaacgaaatcaactttcacttatgtaaaccatgtattttgtatctggccatgctttaaatattatgagatatgtaggaggcagtattcaatttttttgtttgtttgttttgagacggagtctcactctgtcgccaggctggagtgcagtggtacaatgttggctcactgcaagctctgcctcccgggctcaagcaattctcctgcctcagcctcctgagtagctgggactacaggtacgtgccaccacactgggctaatttttgtatttttagtagagayggggtttcaccatgttggccaggatggtctcgatctcttgaccttgtgatgtatctgccttggccttccaaagtgctgggattacaggcataagccaccgtgctgggccctatacaaatattttcaataaaaattctttgtatgtaccatttgattttattttatgtgttataaaattaaaatgcatcctcaaaaaaatacagaaaaataaaaaaagtaaaataaaaaattctctcaaatatatagacaaataatcaagagagaaatgtttacgcataagtatataaacatcacagttttatgcactcatatatgagaatgaacttatccacactgaacaatcagggctacactgattgcaatagtcatactgcatactcctagacacatttcacacaaggaactaataaaatatccctttatcactcttctatttatttctgccgtttagtgctagagcaagtccagcaagaaaggagagagcacttaaaattccctgctacttgaaattttcttaatttttcccctttctatatgtactatgtgtacattttttcttttctgtttgtaatgtaacttatttgtatcataactctttttttctttattttaccaaaggtttaaaatcaggttttaatttttttttaattttcttgttgttcttttaaattaatttatactatttgctttaaatatttttctttcatttttaagtttagatttactcttgttctttttccaagcttcttgtgttgactacttaataatttttcagggtgtcttgttttattaataaacacatttgcaattttacaattttcaccaaaaattatttagctgcattycacgtctattgcaatgcaatgcttctattgtcttcacttttgaagattttgggtaaacattatcttttttttttgagacaggatcttgctctttcacctgggctggagtgcagtggtgtgattactgctcactgcagcctgtaactcccaggctaaagcagtcctcccaactcagcctcctgagtagctgggacaacaggtgcatgccaccatacctggctcatttttgtattttttgttgagacagagtctcactgttacctaggctggtctggaacccctgggttcaagtaatcctcctgccttcggctcctaaattgctggcattacagtcatgagccaccacaccagactcatttttttttaagctatgagagcaggcaaagagccagactaaagaaccatgcatgggctttcgactgcctctgctcagaaggatcacacatctctcatgctcacatttcattgattagaattaatcacagaggagtgactcactgcagaggggagaagtacaaacttcaatgtccagaaagacaggatcaccagctacctgtgagcaccagtgagcccactacaatgtttgaattatgctttttattgttatgtgctgtgtctattcacttctctgatttttatattaaatttaaatttgccctcattttaaagttaatatgtcagttttctaaattgatctatgttatatgttattacatagactcttttaaaaattatttttctggattttttgctgaatatttttatttttcagttttttcagtgagatgtagatttaccatatgtcttgattaggtagatttatcatttgtcttgattcagattaggtctgaagttttattttaattttcttaaataaattgataaataccacttgtttatatttgttgtgtgtgtatgcacacaaacacacacatacttatgttgtgttttttatttcccagttctattttttaaattcctcactttcttttgttttataaatttgtttggacagaatatgtattcttactctctttctcatgcttctgttgttttagaagtgatagagtatttgtctattacaatacttagctttaagtgtggaacatacatatataactaagttctttaacacaacttaaaatcttgcaacattattctctcccatctttaaaagacaagaaacgtcagccctttaactctgaaccattcccctcccagtagtactaattacaatcttagttttatcatttatattttttagtttccaattagctatgctatgattcataaatcaataactaattcaatttgccattttacatcataatattcatatgactactcctatctatcttggctgttttcttcttgtataagtatatatatatatacatatatatatatatatatattttttttttttttttttttttttgagacggagtcttgctctgtcacccaggctagagtgcagtggcatgatctcggctcactgcaacctccgcctcctgggttcaagcgattctcctgcatcagcctcctgagtaggtgggactacaagtgcgtgccatcatgccttgctgattttctgtatttttagtagagatgaggcttcactgtgttagccaggatggtctcgatttcccgacctcgtgatctgcccgccttggcctcccaaagtgcagggattaaaggcatgaagcaccgtgcccggccaagcatatattttaataagcctttcagtgtgaatttggggactatgaattttctcattttttaatacctgaaaatatctttatcagtcttcttgaatgttagtgtggccaaaaatagaaatttcagtggaaagttatttttctttggcacattaagaacatcatacttttgtcttccagtattttttattgctgataagtatattgaaagtctaattgtctctaatttcttttcrgcgatctgactttcttctctatctacatttataattgattatctttaatttctgatgaatgtaagttttctgtcaagactcaagtatttcactgagcttttgtttctttaaatgatttcctaccattcggccacgcttcttggattcctgttagagttgaagactctcaatttattctttatgtctcttagctgctcctttatattttaaaaatttacttgtctctcattactgcacaccaagaaaattcctcattgtcttctattaattatttgattttgttcacatctcttctattgaatgtttttcttctagagataatgtgttgattttttagatattctctctattcactttttatatcatttttaattgccctttttcacttttggagttgattctttaatgattcttttatttagctttctacagactgaacatacttgctcctgtttttatcttttaaaacactttggttgttttcattttatctggtgtgaaagcagctttcaagtgttagtgttttggatcattattctcattgttagatttgattatttattttggaatttttaatttcaggctcagtggagtaggacttttcactttctgtaaactgtgcatatcttttagctttttggttgactgcactcaattgtttaggaattctagtgcagaatgaaatcttagattagcaattctgatttcctgtccaacagtgatactagaaaactttgcatcttcatataattttcagtagcagcagaacatggcaattttatctggcttcatttcataagaaataatttaaggaattgcatggcttgaaataatgagctcagttcccacccttgtcttgcacttcttttgttttttgactacctgatatctttataatttttaactttttataatttatccattactgttacatgtatggtagtgtcttggagtataatatacagttaacttgactgaaagtgcatgctgcctaatgtttcattgttgtttgaagatatagtggagtcataatttacatggatgttaggtcctaaaaaacagcatgcgttttcatgagttacatgcaattacaattcaatgccattctacgtattgtgtaatattggaagggacttccttatttatctttgtatcaccagtgcatagctggtgttgagccaatgaagcaataattttttttttatttgcaacgttctcttttgtttctcctaatataggcagaagttgacattcttttacttgaaaagtaaatatttcattttttaaacctatgggaataaattttctctttcctaaagatagtgatagtttctcataacatggagactatgaattattgttttagataggcgataattttgagtaaaaagtattgtaagtgctaaatatttttctatgcaaaatatagcatgtgacaatggagaaagttaattaactatttttgagattttccaggggagactcttgaactaagtttagaaagacgcgtttataacttccaggcagagagaacaaaatttgccaaggcaggaagttatgaaatagcattacaaatttgagcaatgtacttctgactttgataagtcagatgtagaagttttcaaagggtatccatgaacaataaagttgaagagaaagtctgagataaattcatggagacctttgtgtgctgtgaaaaagtgcttgacatttatccagtaggcaattgcaaggctttaaaaagaggactcttaatgaaatttacgggatagaaagctacttgatggcaatgtggaaaatggattggaaaagagctgggctgtagtagttcaggagctgagacatatggaaakgtactagtgagaatcaagagaagatcacgtttttttcttttcacgtatcaaaacaaatgaaattacatattttatgagctatcaggaatttatggtgaagaaaaaagatatttcctttacaattctgtcaagcctgactattctttgttttccttaatgggcctcaacaccaaaagatccgtgataagaaaacatgacctgggtaccagcagcaatgacaatatcaataataaatatgaccatttctttagcaattaatgtttcccaaggattttagtaagtgctttacatatatagctctgccatttactacctagatgacctcacctgtaaaattgggacatgagtagcatttacctcacaggctatagtggcacttaaactggtttacaaaagtaaaatgaaaagagtacaccatacatggtatgcattatacaagtgtttagtgctactatggttataatgttctgatttgttcatatgggactgtctgttctccctctacctcccctcgaagctcattagttcaatcaatttgagattgcaaatgaaataatgaatcacatttttgtataaactttaaaatgtataataacaagtagaaacttctaatcacactcctatccagaaacctgaatacataaatttagttcttttgaagtttatattacaaaataagcttgattggttagttcagttagttagatcatggcggtaataaagattttataacaaaataaaaccaaaatattgaaacaaaagaggacaatgtaataagcactcatatattaatatctttcactcagcagtgtctaataattatgtcatttctttaaatattgtttgaggagaggttaaacaccccagaattgaagccttccttgactaaacccagtcctatagtttgctattctgagatgtaatcactctcatgaatccagtgcttactaacctgataaatgctttcaaatttttacaatatatttctgtttcctttgcatagatgttctgtaaatatgtgtaatattgcaagctaaaaattttatataaatattattagactatttaactttatgtaatttgtttctgtgatccaatattgaagtgaaggtttaatacgggactctaatttagccacctccactacctctgccccacgactctgtacctctttcattctttactgtttctctacattgtgtgtcattaagaaaaaaaagatagattattctttttttcatatagtctatattcccttactataacatagattgtaagaatagtctgtacttcttttcattcttttttgtttctctacattgtgtatcatttaaaaataaacagatcaattattttattcatatagtgtatattcccttactataacagattataagaatccagaaattgtgtatgttttgttaattgtcctcagcacttagaatacctagcacacaatagcacatcaataaatacttgttaaatgtttgcataaaattcttttgcagctgtaaaatattttagtaagttttagcatttttttgttctatttgtgagaattttggtgtttttttcttgctttctcacttttattatcaacaaggaagggataaatatgtttatacatgtcttgtgaacatgtgcaagacataagaaaatgaagatttttcccccttaatatgaaactgtaagaaatacagtttgaaagggctggaaagggcaaaagtggatgaacattctgtcactgcatggcagaagrgcaaaagagagcaaacccacttcctcacatttttaaataagatccttaattccgtctatgattacactttcctcatgatttaactacctcctaaaggcctcacttatttgccattacattggcaatcaaatttcaacatatgaattttagcggacacattcagatcatagcaataggtcattatacaatttttacatatcacctgaatattcatctagattttaattgttaatatgacattattgccttttaagctctaatatgtttagaaatttgatttaacatagtgaataaatattcccatgcataaactattacagataattctgaatttttaattcatagaaataaaattttttacttaaaaagtctgaatatatttagagttgctttattgagaatattcccaacatgctcagaaaattatattgatttacttttctataccacaaaattctatgaagaaacaatttggtgcaaacaaagtagaaatatggtgataacaaacattaacgagacaagggtttgctttgaatgaggccactgataaccttatggaattttccatctagggccaaggcttgattgctagaaaaggcatgaatttaatcatggatgaagcaataatagaattatcagttatctcattaaaatatttctgaatacacagcaatttaatttttaatatcaagtgcattgaatagttcttactattttacttgacctctttagcattattacgtagttcatcactcttaatttttgacagctcttttttctctgactcctttcttttagaaatatatagctaaaatagaaatatttgaaaagaggaaaacctgaagatcagtaatctaaattaacagcaaaatataatcaaagaaaacaaaagaagaaaaataataaaggtaagagaataaattagtggaagtaagtgaataaattgagaaaattattaatgaattaaattaatgaaatagacaacacaaactagtaaacattaaataaggcaaagtttggttcaaaaaaaggcactaaaacttaataagcctccagatcactagatctggaaaaagagagaaaagaaaacatttttaaattaacatcaagagcataaaaggagacatcaccaaatattattcatttataaagagaattgtatgaacaagtataggttaataaattcggaaatttagataaaatatgcacatttatttaaatatagaacttaaccaaaacagaaataaaaagagttgggaaaatcttgatttaaaaactgttacagaatgaaaccataatgtgagatcttcaaattcaaaaatttcaagacatttccagtgaattgcactgaatatttaaggaaaaaaatgtatcaaacttaaagactttcatagagtagaaaaagagggacagcttttaaactcattaatgagagcagcaaaaccttggtacaatatcctgacaatgacttttcaagaagtaaacatcataggctccttttctttaaaacagaaatgcaaatattttacacaaaatatttttaaaaactctcatcatactatgtttaaaagcataatatataaatgagaaagttgggtttatattgggcaatcaaatttttttttgttttaactaggagtggagagaaactttctttataaaatgtttatgtgaaaacctattgccagtctcatatctaatgttgacacattgatagttttgtctgtaacatattgaataaatgaagactacatgattttcattcatcattgtactgagtgtcctggccagtaaaataagacaaaaaagtaaataaaaaatacagagttgtaagtattaaacaaaataatatattcaataataaaaacaatatacctttgtatgtagactctaaaggtgataattataattgaaagacagtatatcaaagtttatggataccagacaatataaaagtttgctgtattttcatactttagcattgaataattggaaaatgcaatttattagagataatcttgcaatattgaaagatacaactctgcatacctaatcagttaaagattcatttaaaaatactctgagcaacaaaggctgattaaatttcaatctacaaacaaaattcaattcaaggtgtgttcataatgccctttattaaaaacactaaatggatcaacgtgatcctagtaaatgtgtcagttgaggaaaatagctcaaagcaaaatgactaagagtttggctcacccaagaaagcctgatgactttagacagagccttgtcatgaaaataattgtgggtgtttctcttggcacatttccaacacttagacaaataaaatggacaaaagttcaataatgtttgagaggattatactgccaagcacaaccagcccgaattaagagtgtctcttcaagatgtataatggcctaagtttcctacgtgtctgctcacaagaggcattgctcttcagatgtagctgaggagaaaaaaacaaaacaaaacaaaaaacccacaatatccagagaataaaatcaaaagaataaggactgggaggcaactcccaggaaacaagcctaagagtctaaggaacactccttatcatcaagaaaagctctcttgcaaaattgccagcaggaattcacagtcactatggatctgtgtcccttgcttgtttttgacagaagggttggttgggattattattagaactatacttctgaaattgttatgtcatcgtatgcacttaagtttggtaatttaaacatagaaacagtttcacatggtctgttctcattttacttctttggaatttatggtggtatattagtctgagttaaatgcagaaagcagatgcactttatgtattccaagaagtattggctgtaacacaggaaattagaggtttgtgcatccattgaactggactggggagtaaaggtcagaaaaattgctgctagaggctataaaaattacattgcaggccatgttttcagctgcctacaaccctcaaatgtgaaatttgcagaacccccatacaaaatgttattaccttgaacaatcttgggaaaacctgcagatcccaggtgcccgtaagcactgagatgcatgatttacagaaattgttttggatattgctgcaaacctcccatttgctacttagccatatcccttgtttgcaactgtcatcagaaaaaaagccttccgtcttttcttctcagatctcaactgagatcctcccattgtcagattttgacctaggaccatcttggaaagggattcttctgtgattcagaggtgaaggtaaggagtgaagtcggatgcggagttgatgcaggcaagtcaatagacaaaagaacacatccgatgtaatgaggagacatatttaattattttggaatgttttgctagttggaattcttagctgttgacaattataaatatcgtcctgaaacaagtaatttatttaatataaacagaaaccatcaatgtaataatctcttttgatgtgaaaatattttgttattttgatatatactcaaccactctacaatttgttatcaaggacaaccaaaggaagtccaaaaaagaggcaaatacacaatgagaaaaaattttgtgtgtgaatgtaacagacaagccaccataatttgggtagcaaattttaagagtgaaaccttaatgcttgccaaatctctggttgattgacttagtcatagtgctgttttaaaacagctcatagattttaaaaaatataaataggaaaatcactatttaacatgattgcaacagttgcttttgaaatcctttgtttgttttcagaatagtaaaaactttaggttttgctttggaaaaactgaaggtttttaacatttgagttaaagatttgtatgtatagagtaatgtcaccatcttgtggtcttttaagatattgctgctaagaatattgagttagtatccatgaataacatgaaggcactatcttttagtacttttctctcagtaagatcaaatatatataaaaccaatgaatcaacattttttaacgcttatataatgaacaactgctttagaacttatttaattatgatattctgtttttgaaaatatctattaaatggaaggcttttatttagtaagttgaattccacttacaaatcttatttgcttgttcatttatttatgattattgtctgcctctcccataaaaatgtaagttacatgaaaagaggaatttttatcttgttcacagctgaattctagagaaaagaacagtgccgggcacatagctgacctaacaaatacttaatgaatcagtgaatatagatgtgaatgaatggattctatctgttataaatattttaagacaaattagttccagaattttcttggttttgtaacaaaccacacaaattaaaacacagttttgtttaaaccaatcaaatgggtaagctccgagagatactggtgtttggttttgtgttttatcaaagatattgtaaggggacctagctggatgttatatgatcagcttgattttgttctaattcgctacattagtgcatatgtaggtttgtaagttaattaatttggctcactatggctgatgcaatgtggtggaaaaggggtagcctttgaagtcagtcaagctaacgttcacttctagctctgccagaaatgtgttttggggaaatgaaagtttctcagcatttatttccttttctgatactggagaaaataataacctccctcgtagcatgtatataactagaaatattaacttttaccattttgaatgtttaattattctaaaccacattttgcctccacaagtggatcagttaccaaacatttaaaggtgaatctatttcatgttaggcataatcagggaaagaacaaacatgtaagacatagtattccttttcaaaagctaatagtcaatggctgttgaatcaaaaatcttatgaaaagcaaattactattcctttgatttgaagctccagttctccagttaagtccgagccctgacattgattaaaatgaatttgtactaatatgataattatggaaatcttgtaatatattttgtttcaggtggattcaccacagttagcttcaattctgtcttccatcacattcagcatagagggagggaggagagggaaagtaatggggtaataatcttcatttgtagattctttctagcttctggggtctggcagatagttaaagagaactctttccgggccttcaggagggatatctgctgggtccctctcccctgaaattgcctgatgtggctgatgatttgtgacccattcctcagcccctaggtatcaagagtcacagctccagcttccttctgctccccagtatgcaagactgtcatccctgggaaacatttatgtaacacgtctgaaaactcctagggtgcagaactatcccatggcaatggtattccttggatctgccactgaaacattccttgttctctagattttccaggtaggagtcatacacccaattcaaaggtgaagcaaaagccctcaccaaagaaaacttctttgtgaaattgctttgattattttattttctcagaataggtgagggggttcacctataggtgaacagactggtcttcgaaccaagtgtcatagctattctttggaaaattatattttggtctggcaatttgtgtcataatttcatatctattgcaacttgtgctttagtgcaaagtcatatttgaacactcagtaaaaagaatactatataaaatcatatttcaacattttctgatctgctataacaaactaagctttgggaaactttaatgccccagtaaacaaaccagccatgtcaatgttacgtcactctacaagatccaaataaaattgtgtttaagggatacaattaatatttactttcattctttagtaatatttatcaatatcactgtatctgcaactgaagtttgatttttacttaaatgatttcatacaccatattaaatatatcttatatgcaaaaaaatcacgtcactgttcatttgaaagaacagatgtattatacaagattatcagaggtcaagtagagaaaacatatctgatgtttttgagactgtccgctgcataagtggacacttagtggtaaatcaagtagcagggatgagaaaattttgtgtgaaatgtagtgttataaattaaattacagaataaaaataaaagggcttaatcagagacatttataagtacaatgagtcattaaactgccaagtgtctgaaagagccaagactgcaaagacatcttttgttctttttatagaattctccaaggatagatttcattgaagagattttagaagaaaacaaatcaatagacttttaaaattccaaagtaattctttggctgaattaatatggctgtctttttaagaatttaaggcaaaagataaggtgacttaattaaatgaccccaagttttcaaaataataaatatgaacaaacactgaaaccatctttattgtcatcatagggccatctttttttttctcttgtggctttttcatattgatccaaatataatttaaggcagctgcactaaatttaggctgcactaaatttttttatgtgtatattttttctgataattaggcccataaatgaggttaaaaggaaattaggtaatagaaaattttagactggagtaagtcctattaggtaaggtctacttattttaacaaaaccaaattaaccctctcgtagtccctgttagtgtaaaaggccctaaagtaaaaacatgatatttatggagtgttactatgaaaatcaacatgaaaaaataaaaaattagcatattcagttgtacaacaactaagtttgattagtcagggggcagctgtctgagctcttgcaaatgaaagtattttatggttgaacactaacatttacaaatgggtcgttcaagtcatctttcatatttaagagaggatctgttatttcttagcataggaaaatcccaatacttgtttaagaagtaaaaaaattagttctctcaggacaactactcttaaaatcaagctaccctttcaaagaacaaaattataatctgttaatggtagcaaagacctcacataatacagttatgactgtttaatggtcaggtttaaaactagtgctggacaattataacacaaatgtgttcaattacttgttacagaatatggttatgcagcctatattctgaccttacagaagtagggaaagcatagagtttcttgccttaattaagataaaatggaggttggagagtccacatgagatcacgcttcatgtctgtgagctacaacaatatgtacctttccaatagaaaaatgtaatggctagaggaatgtagatgaggtcactagctatagtccccagtatattttacttgccataaattgtaaaatcttctgtgggtgagtttaaaatgtgtgacaatagtttcctgcgatcatgcgcagtctataacctttatcctagaaacccagccttctttcatagctgtctcactttctggaatcactgctttctttcctttgtttcaaagaagaaattgtaagtttttacaggtagctacaattcttataggaaccttcctcgatcacaagctttatgtcatcactgcttcattactttaactgacccgtagtttccccccatctgattttcaactccactccaaataatacatgtatattgttttcagattaagttctgttaccaggctactactgttgcaaaaatcctgcctaacagtcacagaatctcattgaaataaaacagtaaggaattatcattaatgtctgcagacttacatctagtaggtagctgtttctcaggctgtatgtctgcttggaattgggtcctcactgctactaatgtgttaattctgtggtccaatctaaaggggcacaactattttctcattacaaagtcagagatgcaagagagcaaaatccaatgtacaagctcatttcacgtcttttctttggccaaagcaaatcttatgactaactttaacatcaatgggcagcaaatatttcctgaataatccggatgatcagagatttcttgttctaattactattgatatatacaaaattcctcgaaaaattagtgattaaaaaactatttgttttgtgcacgattttataggtcacacatttggaaaagccttgcctgcagtgttcatgtttttggtatctgagtcgctgtagtcagatggtagctgaggctgcagtattttagagcccactatgctagatacatatccaagatgactcatttgtatgactggccattaatcttggctgttggctaaaaatttgggcagttaactgaggagcttcctttccagcgtagaagccacgggatagtgagacttcttacatggcagagtccaagcagagtgagagggaattgtagcgagagtggaaaagttcggaacaaaaagtgcctctatcgccttgtgattggatattggagttctccaggcttaacgggtatttaaagctgtcttttttgtgtatggagatattttcagatttttggaggttctctagtgtcagaaacattcttatagttttaaagggcaatgcatagcctctggaatgctcttttcctatcttacttccagtgattctcttctgtaggctgaggacactttctctggaagaaaaacctcctaaatgacctctagacaacctcccataaagtccaaataaggtctacaggaaacaatacctctgacatgcagatgttggacaacacagctggattccattgtaactacgtttaatcactctgttgactccagagaaaactttcctctaattctcaggcatgagttaaatacaaatatttaatgtattctccaaacgtcaagcttctggtcccgttgtctcaggattttgttctctaatttccaagtcctctggcacctgtgaattccaacctgttgtctcctcagaccaataagaccactcatctctgtttgtgccactagaatggaacaaactggaaggtcgcctcaaggacaaatgtggatcaatgtggagcctattgtatgtttcttttgtttcaagcattacagtcactctctttcctgactccatttcctaattgctccccagtgtcatcaagtagttatgtgcccccctctgcttctgtaattgttattaaattgaaaatcagttagattcaaactactccatcatacacaaaagtaaaagctaaacacttatatcctgttatctgtcctttggtattacctaggtaacaactcaagactctattttttttggcaactacagtatacttagtgtttaagttggcactaacatttgcttatctctaggatatcctcatttttctctttcaaaattattgcttttgtttgttaacaatgttatatttttattatattttatttggcactatagtttcttcaatggagagagttgtttggataattcttagtctgctggatactggaaatgaaatgctaagtccacttttccatactcattccagaattgtgatgctaaaaattaaatacaagcatgttatcctctgtttgaactttatcataaccttcccatttcctaaattctaaactcctcaaatggcatacgctgccacacttgaaaagaattggatccttccggccttctcaaattcattttgaccgactctcttttcttctttttcaacagcacaaaattgcttttagcctagacatcccaagctacttcatagcccaatgccttacttttgttgcctcattttccaggagaactttacagttttcaccgtctgcttcagttgataaagctactcctttcaagtactaattctaggaagcgtttcttgacacctttccaatacacacacacacacacacacacacacacacacacacacatctctatcatcatattcagtacaattatagatcctgtgccatggtgccatggagtttctggtctcttttatagcatatgttccttcttcaactagattttatacaccttaaaattctaagatgtttcttttatagtctgctacatattagaagattctgtgcttatagtggggcatcattcagtgctttttggatttacttacaactgtattatacataaaccaaaatactatttgcctttaaatatcagaattgaagcaatattgtctgataataattcagtcattggtcttatcttttaaaattctcttgcttatactgacaaataaaccactcatatctatgtatattaaacatgaaaattattattttttaatggaatagatgtattagtcagttctcacactgctaatgaagacatacccaagactgtgtaatttataaagaaaaagagtttaatggactcacagttccacatggctggagaggcctcaatcatggttgaaggcaaaggagaagaaaggcacatcttacatgatagcaggcaagagagcttgtgcaggggaacgcccatttataaaaccatcagatctcatgagacttattcactagaagaatagtatcggagaacaccaactctcccgtgattcagttatttccacgtggccccacccttgacacatggggattattacaattcaaggtgagatttgggtggggacacagccaaaccatatcaatactgaactgagaaatatagcacagcataatcatcatcaattctttttatcatcaatgctgggctaatctagaggacaattaaacattcagctgtctgattaaaatattttgtaaaatatttaccacgtacaaatataatttaaaaagaaatattacctgtccaatgtatatatttatggtcctaaaggagactttagaagaggtgagagtatctacatagatgaataatttaattgctttatgattacacagaacttacctttatcttgtttaacccatattctctgttttcatagattatcactagatatacattgggaaatttatgccactctcgcaaatttaaactactttagttatctcatgttgtattcaacacagaaagggttacttttagaacatggtttaatatcaatatctatatgaattattttaaacattgttattctcatgtatattctctataatttttggttcccatgtatctcttgtgcataatttttctttatttatttttctttatttatttatttgaggtggagttttgctcttgttgcccaggctggagtgcagtggggtgatctcggcttaccgcaagctctgcctcccacgttcaagcgattctcctgcctcagcttctcaagtagctgggaatacaggcaggcaccaccacacctcgctaattttgtatttttagtagagatggggtttctccatgttggtcaggctggtcttgaactcccaacctcaggtgatctgcccgccttggcctcccaaagtgctgggattaaaggcatgagccaccgtgcccagcaaataatttttaaaataaagcaaatattttggaatatgggttgactgaattatttcaatcatgaccgcattttgcatatttattaaatatttccaaactttgccccaatagctttacattcagaatgcataaatgtaacatatttatcttatgttctttcatggtgattataccctatttaactttttcatctggtacttctacttgatgaatcctatggtagtttgctcttatctaatttctgattgtgcatctttctcaccaatattcttgatccatttttgtcattatggttccattttagttgcttagactatctgtctaagcttccaatactcattagtatctaatttattctattgttacacatagttcagacatttttacactttttaaaacttgaaaacttctattaagtgattttatgctataataatcagttcttataaatagttacctccttttttgtaaattacaagcaaatatgtcatatgcttgcactgataggatggaataattgtgtgaaatgtatgtccatttaaatttgggtaaaataagctagttttatatagaaaggtttttacacttctataaatgtggttttttttccactaacaatgccaggttcttaattttaaatattagaaataagtgctttttcagtagttttatttcgttttatctgtaaaatgtctctttcccactagttcccatccaacccgtgtttctgcttgatatttcattagacaaatataatacaaagtcatggatgtagtaaacatgcttattttttcactaaaacctcaatttctaaaatgaaagatgaaggaaattatgtgaaaattttagtagagccattattttattttatttctactccatgtgcctctttttaaccccaaaatacctcataaggttaagctgaacaattttcacttatgtaaaaaaccatgcaggcatttaataaaaatgtataacttgaaaattttaaatttgaaagtgaaaatagatatgatctagagcaagatgacagcatgtgatgtcttgaaaatggtgcagggatgtaaaattaaaaccaaacagctagttttcagaattatacgttcacggactttacatgatatgtcgtacattaataatgataaaatagctatgcaagccaaataaaagtatagctcagttaaactcctttgattacaaattttgattagtacattggaatggaaaatagaaaccacaaagataaaggtatgaaatttgatatgaacatttaaaacatttgtattcattaaaatattatggattagagatatgtgataagaaactcaaatcaggaatatgagatataaaatgaaaaatatgtagtcattgcaggcacattctcagtaggatttgatgttaggtatctgactaaatgaactgaaactcttttcagacacatgttataaaacaagttcatctacaagtaatttaatttacatatgtgaaaaagctccgcagtgctctgtgtggcattaggtgtcttagtcatatcacaaaagcaattagatcatactgaaaaccagctgtgcatcaagtagattgcttttatctaagtgataaaaaccttgtagagtgtgaacaatacggggtataaaatgtaacattttaatgaacggcgtaaaagatgaatagaatgaacaagagaaacggcacatttgcaggggacatgtacagctggaggaagggaaaaggaaagtgagaaatgtttgtactgggttgaaataaaacgttcacctgtactgacttttaatcagaaagatttcaacatcatttaattaacttatcaaatatataatctcaatttatagtttagccactctgggcaaattcagagtttatagatcatattctgaaagaaggcatacataaggttatcaatatttattctttactagcgaagtttttgcagtacagaaggaatgaaggcagaggcatagatgaagagtaagagagaattgaattattttgaaggacactcctgaccaaaaaaaggcaagttcaggcaggtctgctcatatcatttagaccaagtgctatcatattgtcatcacttaataaaagttggatgaatgaatggatagatgggatacatttacctgagtagaagtacgttgaaagccaagaaagagaaaaagaataatcgataataccacaaagttttctcagtattattaagaatatgatttrttttactttttaactttctatagtgacttttaacatctatcaagtctacyaagagattttacattttgaatagtctcaaacatttttagaatacaagaacacaattgtaaactgcatctgattacaggaactcacatatctgggggaattacagtattatttcccactctaaattatttataattgctgccacttactgagcatttactatatgccaagccgtctgtaaaccatattaggtttaattcattttatttagtcaactctcttgaagacttaaattgaattttaatagcaatatctaagacatgacattttaaagctgtcatatgaccctatgaattacatacatamttgttttcaacatttcctcaaaatatatgtaaatatgcaaatatattaagaataatagtcactagcccaactgaggaagctatgggtgattaaacagacccaatttaaaaaaaaatcaatgttttccttaaaaccaaattcatgttaattcagtgatgtcagtagttaaaatgaaattcttagtagaatagtgtagttacagttatggaacttcttaaaaggaaccaaattttcatataactggttcagaaataacctgaaaatgaaaggaggaaggaagtatatagaaaacaagaatgtataatagtgtttattgttcttaaaatgtaattggtctcttgaaacacaaagccacacaagcattcactctttttattttttccttaatatttgtattctacaattatatacacgtaaaacagttgaaaaagtgaccaaaattgtaagaaaagaaatctaaaagaatattctatgtactttctatgatgattgtaaaagtattttggtcatagaagtaaaatgtactatgaaacttactgatagagacaktttgaaaatgtccatgagtgtgactttaaggtgctgaaaggaagataaatcacaaaaatttctagattccaatgtttcttatttctagatagttcacttttttcaatacatatggtaataattgttgtattagtctgtttcacactgctgattaagacatacccaggactcggtaaattacaaagaaaaagaggtgtattggacttatagttccacatggctggagaggcctcaaaatcatgggagaaggcaaggaggagcaagtcccatcttatgtggatggcagcagggaaagagagaacatktgcagagaaactcccatctttaaaaccatcagttctcgtgagacccattcactaacatgagaacaacacaggaaagacccacccccgtgattcaatcatctcccaccaggtccctctcacaagatgtgggaattatgggagctatagggtgatatttgggtgaggacacagagccaaatcacataattctgccactggcccctcccaaatctcatatcttcacatttcacaaccaatcatgccgtcccaacagtcccccaaagtctcaactcatttcagcattaacttaaaagtccacagtccaaagtctgatctgagacaagtcaagtcccttctgcctataaacttgtaaaatcaaatgcaagttagttactccctagatacattgggactacaggtattgggcaaatgcagtcattccaaatgggagaaattggccaaaatgaagaggctccaggctccaggcaattccgaaatgcagcagggcagtcaaatcttaaagctccaaaatgatctcctttgactccaggtctcacatccaggtcacactgatgcaagatgtgggttcccatggtcttgggcaggtctgctgctgtgactttgcaggttgcagcctccctcttggctgccttcatgtgctagtgctaggtgtctgcggcacgtggtgcaagctgtcagtggatgtaccatactgtggtctggaggatggtggaccgcttctcacagctccactgggcagtgccccagcagggactctttgtgggggctctgaccccacacttcccttctgcactgctctagcagaggttctccatgaggaccctgcccctacagcaaacttctgcctgggcatctaggcatttctacacattttctgaaatctaggtggaggtttccaaacctcagttattgacttctatgcattcacaggctcaacaccacatggaagctggcaaggcttgaggcttgcacctctgaagccacaacccaagttctatgttggcccctttcagccacagctgaagtggctgggatgcagggcaccaagtccctgggatgcacacagcaggaggaccctgggcctggcccatgaaaccactttttcctcctaggcctcagggcctgtgatgggaggggctgctgcaaaggtctctgacatgccttggagacattttccccattgtcttggtgattaacattcggcttattgtaaattatgcaaatatctgcagcaggcctgaatttctccttagaaaatgggtttttcttttctattgcattgtcaggctgcaaattttccaaatttttatgctctgtttcccttttgaaactgaatgcctttaatagcacccaagtcaagtcttcaatgcattgctgcttacagatttcttccactagataccctaaatcatctctctcaagttcaaagttccaaaaatctttagggtggggcaaaatgccaccagtgtctttgctaaaacataataagagtcacctttgctccagttcccaacaagtccctcatctccatcgagaccacttcaccctggatttcattgtccatatcattataagcattttggtcaaagccattcaacaagtctccagggagttccaaactttaccacattttcctatctttttctgagctctccaaactgttccaatctttgcctgttacccagttccaaagtcacctccagattttggggtatcttttcagcagcaccccactctactggtaccaatttactgtattagtctgttttcacactgctaataaagaggtacccaagactgggcaatttacaaaagaaggaggtttaatggacttacagttccacatggctrgggaagtcccacaatcatggcagaagaaaaggaggagcaagtcacattttacatggatggcagcaagcaaagagagagaacttgtgtagagaaacttccatttttaaaaccatcagatctcatgagacccattcactgtcactagaacagcatgggaaagacccgctcccatgattcaacaatctctcactgggttcctcacagcaggtggaattatgggagctacaagataagatttgggtggggacacagagccaaaccataacaattgtattgaccatttcttatctttttctagtattattttcttccaatctctgatgttgtgaccgtcttatggaaaaaaaaaagttttcttacttctattcctccattctgatgactacattctgaacgcacaaaggaaatcccaagcagctgggtgtggtggctcacacctgtaatcccagcactttgggaggctgaggtgggtggatcacgaagtcaggagatcgagaccatcctggccaacatggtgaaaccccatctctactgaaaatacaaaaatcagctgggcatggtgatgtgtgcctgtaatcccagctactcgggaggctgaggcaggagaatcgcttgaaccagggagtcagaggttgcagtgggccaagattgcaccactgcactccagcctagtgacaagagagaggctctgtctcaaaaaaaaagaaaggaaatcctgaatctgtgatataaattaaggaattctatcaactacatgctgaaaccattgtaatagacatgggacagagcttatcaaatagaagcatcttgagccaacttgcaactctttctcctgagtggggaggcagtatccttagaaagtcatattagaaaatccacacgaataattatataatattaatgagtcaaaggataaaagtttctacatttgatatactgtattatctaattttatagtattatttaaaaattaataataaaactaacttttcttaccacagctagaaatcatgacttaacaacttaatcataaaatattaaattttatacttaattttggaacatgaaaatatcattctagagatcatagccaatgcaataaaataggaaaaaatatgcatttataaattttgaataattttataacttacgagttataattatagaaaaataaaagaaaaaacatatttttgtattttttttttattttgagataaataagaaacaggctgggcatggtggctcacacctgtaatcccagcactttgggaggctgaggcaggcagatcacctgaggttgggagtttgagaccagactgaccaacatggagaaaccctgtctctactaaaaatacacaattagccagatgtggtggcacatgcctgtaatcctagctactcaggaggctgagacaggagaattgcttgaacccagaggcagaggttgcagtgatccaagatcacgccgttgtactccagcctgggtaacaagagcaaaactctgtctcaaaaaaaaaagaaaaaagaaaaaaaacaaagtttaaaaaaatctattaattctactgtactgtgttcagtacattgacaaaaatattatccttaccgatatcagaaataactagttagaaaagctgaaagagaaatatgtcaccacaaagtaatggcatgttataaactatctaggaattcattttaaaaacacaatacctgtttaatttaatagtgaaatgctttttataattttaaataaatgaagtaacttgtaagtttcctgtaaggaatgattcaatatttaattatatcagcaccatgcaatatagcaatgggacaaatctgcacatgcatcccctgaatctaaaagttgaaattataaaaaagtctaccttatacattttcaaaaaatgtgattctctaaataaaattctcatcataaaatagagaaaactgaggaaaattcccaaaaagtagaagaaaataagggagcataaaaaccaatattttgtttgggaaataaaggtcaattatttaaactataaaataaaaataaataaatatgttcccagaaacacactcataggcaggcagttctggctttgcttggttctaatatgcattcattttagttactgcagtttagttaaataccaatcccccaacacaattcatattttacttactattttctcttacctgtgggtaattacataaagcacaaactttgctattagtcttacggtccacacattactaaaaaacggatgcacattacaatctctgaccagttgtcacttctttgacagtctgtcagtgatgagtctctgtgtatctgttactcagttcaccctgagacagcaaagtatgtagttgtgttgcctccttatttcccagtgaaaaatctatgtgacatttacaaaagtgggtaactagaaaatggccactggccaaaaagataaaagtgcagcaaataaatgaaaagtgacaaggcaggaaataaaactaaaataggatgcaaatgaagttatagaaaaaaaaaggctgctttcaagaatgttgaaaatactgttgttagtgtagatatgcaggcagacgcttgtagcaaagtcaaatttaccaacagaatgaggcaagatatctcaaaggaactgctgttgataaaaaattcacattagagggactctcagagatatttcatgataataaaagctacagaataaaatgttggaagctgattcaaattttaaaaggagtaattctatttactaaggcatagagaggatgcttgcttgtgttgtaatttatgtgacaaaagaagtcatctttattcaaagtactcttgacaagtatttttttacaaagaaatcaaacactgtaatgtttctaaagttttactttagagtatactaaaaaaaatttgtttaacattttttcattttcttataatcttataactgttaataagaaagtttttaatgttttgtgaaaaacttaatagtcttgggggaaaaaatcacaattttcttattgattattaagattgcctgtattgttccagctggcatggtcattcttagagtmcctcattatcatccaaaatgagcactgcctaccagacaatgagatcatatttaagggtcctcctattatttctgggagtttccaaaggagtgcctcayctatacccacagaacattgctctgtttacagccactttgcagtatcttccaggaaccatctttcctttccaaatccacttctgcctctcgaatgttacaaagacacttaagagtatcatttcttttacagctgtcagctcctgtatgagaataccaacagtagtgacaaggttgctgtccctgcgtgattataaactgcagctatttagatcgtcaaagaggagtaagatgttcacagtgatcatggtgtgggcttttttcacagcartgggctacaagtgatcccttcaagatgacraagcaactctgaccattgcttgggtctctctaattatctcatgacctgtttccatcagatcttggtcatcaacgagtagatagagtccctgctcttcatatttttcctttgtgtaaaccttgctcccctcaacctctatttaccttttcaagataaaaatctaaatcttcacatgtcactctaaagacaactgagtaactcaaggctacttgagttacatgtaggtcctgactaaaccagtcaaaatattttgtaactaaaagtataagaaaattccaataaaacctagagtttttttaaaaatatgacaaattaggtaaatatgaaaaaaataaaaaatgcttcaaaagatgtcagataattggaaactattatcactgtcataattctacttaaatgaagagtgtgatcttgatataagaataactaaaataacacaaagtgtgtgcatgtgtgtttgtgtgtgtatgtatgtatcatgccaactgaggtcatccttctatttactactatctagttggcagtttattgcgtttctttcagtttcaggacttgtgtctcataattacttcagcctcaattcctgtccttgtttttcttttgtaagacaaaaggcccaagaatatgggcctaaccaggtaactcatccctgttgcttgaaatattagaatttgtagcagaatatacaagttggggaatgagagagtgctttaacagggcagcaatggaaacatttgagactgtgtttcttaattacccacctcacctcactttttgcaacaaccatatccattctctgtcttatgttttaaatattggtgtctgaaattcttattgattcacttgattttgtatttattatttttctctcatctaaaatataagcttttgagggatttatgactcaatagccagaataatgtctttgccgtaaacatttagtaaatgtttgtggagtaaaaaaaggaagaaaactccacgtaaatgtccttcagccaccaagcaagttattctccttcatgtgagacttcctctattacttgacgttttcctctctccttcttttactactctcttttttaggaattccctctccttaatttttttttcttatttcttcagagcataaacctcctgccacatggtctcaaaaaatcatctttcatccctaacaatggacaaaatatgtttttcataaaagagagttctatattaaattttgtcaccagtaattgaaataatatatataatttttatcacatgtaaaacaaataagaccccctgtatctaaaataaatgatgaaaatttgaaaacacaaaaaagttgggtaataataacaattatatttcaagcctttgagaaagcattaattgtatatgataattaaaataaataaaattaaaatcattcaacagtagttgtaggattattaattattttgacagaaatttacagaaatacctccaactaggcccagcgcggtggctcacacctgtaatcccagcactttagtaggccgaggagggcagatcacaaggtcaggagatcgagaccagcctggccagcatggtgaaaccccgtctctactaaaaatacaaaaattagatggatatggtggcacgtgcctgtactcccagctactcaggaggctgaggcaggagaattgcttgaacctggcaggcggaggttgcagtgagctgagatcgtgccactgcaccccagcctgggtaacagagcgagacttcatctcaaaaataaatagataaatacatacatatgaaatacctcaaactatgtatcaataaatttcaaatgaattaaggagataaagataaaaatcataaaataatcagatggctagataagtaattatgtttaatctgatggtaaaatatcttacatccattaagatacataaaataaaactattaagaaccatttacaataaattaccatttttgccaataaagtttgtactgagtaaaaataaaataattgtacttagtgcttgtgattgagaactaccatctataaatagctagatgagattccttttctgatgagtgaactgaaacctgtgtatttacataggttgaatccttgctggtcctgactttattaggttggcgctttcaaatttctggtgtactagcactttcagaagaggaatactatggggtgtgtcagtgatgacttctcagtttcaggtatattctccttatcttcattgagtaactctggctccatttcccctgagaaattagaatctgtcataccagccaatacagtgatctctcactttgcctgcagaatcaggaacacggggagcccagaatagccaggagtagtctcagctttcaatttaataggatcatgtgtaccctactggaaacattaaccttttatgaactaaaaccttctgatctactgactgagttcccagatatgtgtaagtggtttacttgttgtcaatgagagaggctgttttcttttcctttgttactaggctagatggctctagagtagatgacaacacatgtggcctctggtttgaggcatatatcacgtattataagagagtgttctgagtgtacagctgttgcatcccagatgatgttataactgagccttcagtaggtgaccccaccatccctttgccatgaaatgagttccctgatgatgtgtggaatgtcaaatcaatcatggaatgtcaaatcatcagttccctgatgatgtgtggaatgtcagtcatgaatggtggtgctgacagaagtgtttcagacaggaaaagcaaatctgtaactgagatatgaatctgttctgagtataaatgattgctcctgtaataatgcaaggaagtaatggaaacaacctgccaccatggctggtactgccaggaaattgtgccagattaggggctcataacttgtcattgcaattgggaccttaatggtagtgggaagatcagccttggtgagacatgttcagtattttgagaccatgcacagcctttcttcttgctgccatggactctgtgaacacatatgatcatgtctgacaggctctcccaggatgggttgtcttactcacttcattatgaagagttccctcttcatggatcctttctagtcagcatgttatagaacacagatttcataaaaaatatgcttatttccagagatatgtacttctgcctgagattactttctcagctatcttttaatattataaaaactgacttcattttaatgtatattactttaatttttatattttatttttgttttttgagacggagtctagctctgttgctcaggctggagtgtgatggcgtgatctcagctcactgcaacctcggctcactgcaatttccgcctcccgggctcaagcgattctcctgccttagcctcctgagtaggtgggattacagatgcctgccaccatgcccggttaatttttgtatttttagtagagacggagtttcaccatgttggtcaggcgggtcttgaactcctgacctcaagtaatgcacccacctcggcctcccaaagtgctgggattgcaggcatgaacaaccgtgcccagccgtatgttactttaaagggcatatcaatccaagactgaatcattataggaaaaacttcaagaaagttatataaattcaaaacagtaaccaaggcataatgtgataaatgctattctggtagagtacacaatgagatcattaaatacatgggggatcaaatatatcagatatacctgggtaaatttgaaggacagagtaaattttgaactgggcttcatgagtacttgaatttcaatagcagaaatattcttgctctttacctaaagaggacgtgcatactccagcttcacaatattctttcaacaatatatttttaaatttcaatagtcttagcaggcaaggacacaccacaatgactatatagtagaaataataatttcgagttgccaggatttgactaaccaatctcgtattcccataatagattttctgtactattttaagaaaagaacattctttagagtttttgccaccaaattgtcaaaataacattgcttttcatcccaccctggctataaaataagaaatgtatggccatcaatcatataaacttgagggtgaaagtttctaatattttaaagtcccaaaagtcatgtgaatgttcccttcaaaacctgtgcctgagaaaggtcagtcctggtctaaaagtagaaacattaaagtcatgagtaggttcagaacttttcaacctctgttctcttgttatggtggaaatgctgatgttttagaataaacttctgcaaatacagttagagcttctttatgtcagaagatcagcgtcaatattagaaagtcaaatcacctgtttcttaatgataataaaatctcatgaaatttagaatacagtcttttgtggattcatgatcatttggctttagtaaaaatgttgaatttataaataagaaggttagttaaaaggctgcagctttttaaaaggtggaaatatataaagtaatttaagaaaatcaaatataaattacactttttacactaatataaaacatttacatgccttttggaaagttttatattatgaaccttgtaactgtaagaaatattttgaactgtgtacaacatttaaaaagaacgatgaacaatctggactaacaaagaaatgattataccttcctctatattgaaaatttattgaaatgccttattatccatttattgcagttagcttaattatttgaaaatatgtgatgcatatttttcagatttcttcaaattatttttttcttaggtttcaccaatgcacctacatatttaagataaaatcacagctgataactttgaaactgcactcctttctctttcccttctaccccacatctgggcaagctgatgagaaagccagagtgcttcctggtgcctgcatgaagttcaaagcccacaggccctggcacatgggcactggacccctcatgccagccccatccctaatcccactaaaagctaagatagtgacaattccctacttatctaaggcatttgggcctccttaggaggctgcactcttcttcccagaaagcctcattatttgagtaataaacctttccatcacctattggtgtgggttacccttttcaatatccaaatcaaaatttgagtagggtacaccccgtgcctgtgggggtgactacaacacttatgaataaaaactttcatgaaatctatagtcattatttaacttagtctgtaactaattacataactactaattacatatataaattttgatatatttaactattccttatactaattgtgtatatatattattcatatatatgcacatacataatagctattcagtgttaaagattagcttttatttaaaggagaatagttttttattaaaatagaacacaatttttaaaattatttatttatttttatatatatttcttatagacagggtctctctctgtcacccaagcagcagtacagtggcatgatcatagctcactgcagccttgagctcctgggctcaagtgatcttcctgtcttggccttccaaagtktttgggttagaggtgtgagacactgtgcccaactggcacacaatttttttttttttttttttttttttgagatggagtctcactctgtctccaggctggagtgcagtggcgccatctcggctcactgcaccctctgcctcccgggttcaagtgatttcctgccttagcctcccaagtagctgggattacaggcacctgccaccatgcctggctaatttcgtaattttagtagagacggggtttcactatgttggccaggatggtctcaatcttctgacctcatgatccacccaccttggcctcccaaagtgctgggattgcaggtatgagccactgcgcctggcccacaatttcttaaagtacatattgtgctataatattaaagagcaataatcaaagtagttcagataaaataatacaacagccataaaacatattgacttaataagacataaaatttcaaagtggtaacttaggaaaaagaagaatagcccagattaaagtttgacaagtttctaagatcaaaacaataaattgggaaagctctgccaggaggaatcctttaaaatacctcttagttaaaagggctgaaatagacaatctctgagatcccactttgttacacatcctgtagatctatcatgaaaagttgctttgaaattagtgacttgccttcacttcctttacttctctctcaaaatattagtcattgacattcacatgtaaatcctggataggtactgagaatacatagatgcaagagatattattcttggtcttagtgaaaactatccacctcttttattgcatagggtgatgaatcgttttggacaatactagtagcagtagcacacagatccctattaaattttgagaagggtttctctaaaacactgaagaccaagtcagtggccctagtttctcatgtataaactagtactgtctttgcttaactcttctgcctcttccgtactgttccataaactaaagtagtactatcttgtactttttttttttttttttggagatggagttttgctcttgtcatctaggctggagcgcaacagcgcgatatctgctcactgaaacctctgcctcccgggatcaagcaattctcctgcctcagcctcccgagtagctgggactgcaggcatgcaccaccacgcccagctaatttttgtatttttagtagagatggggttttgccatgttagccaggctggtcttgaactcctgatttcaggtgatctgcccacctcggcctcccaaagtgctgggattataggtgtgagccacctggcgtcgggcctatcttgtactttaatgtgcataagaataacctagggattttgtttaaagataattactgattccctaaatcgggaatagggcctgtaattctatattctaatatacttccagataatgtcgatgctgctggttaagtggtagaggcagtcacctgtaaaggctttctttagctctaaaaagaaaattcaaaatgattgttttaccctataagttattttataatctgcctcttgtctatttttacatcatttaaaacaacttatcctccttaatttactacagtaaatagtatacattttcagttcctcaaacatgccaaacatacaaarttgttcaccattttgcagggcatggtttatgcttctatcactggcatgattaccatgtaaagtacaatataggggcaccccattccatcaatcaaatgcatcaaatctgggacaatgaccataaaatatactttggcaggcatttgtttggaaactggcaagtatgtatgaatggttgagtgacctctgatgatgctgggctgattaggtgaatagccccattaggcctccctagacatctcttctgcttgggaactttgattttagcaccttgagcttgttttccaattatgttgtaaccattcaccatctacttcaagattatctaggttatttattgaaatgcattttcttggggtagacctccacaaaaattcttatttggtgggtctgtgtgtggccccaaaacctgcattttgacaaattctctaggaatttagatgctctaaagtgttagaactcctaaggggaaactatccttctgggtatactgttagctcaagattgtaactctattgcaaagagactattcctgctctcctattctagattttagaaactaaagtgaatatttgtttgtttgtaactgtatattttgacacaacactttttttccctttgctagaattagagagcaggaataatctcctcagcttatcctaagacactagaggcctaaagaaacatcaagtctctaatttcaaaagcaattgtgagataataatgagatgacacttaagtgcttactttttacaataagttaataatttttccataagatccttgacagtcacaattatcatacccattttatagattaaaaactgaaatgcaaaaaggtgaggccaattatccraaattatatagtaacgattgatggatactgagaattcagagctcaatctgttaaccactacaatttactgtagaattttctattacctcagtggtcattttatcaaatgcagggcgctatagagactgcacctgttatttacaaagtcaactttattatcatattctatgtaaactcatttgacagaacattttccttccacagagcagataatttctctaaaacaggcaagttgctgacttgaaatgacattaacatttttgattcggtttgcaagtcttattgatctatgaaatagaggtcttaaaaataatgttaaagattaaagctgagagataatttagttctaaacacggtggtctgaattgacaaaagtctcatcggggagatcataaactacttgccaaaggccaaagctgacaggtgaattacctgggaatttagttcaaatataaacacactttgaatggagacaatgtatgagccaggagatgaaaattgggtcagaagttatatataccagagccaaggtcagaagcaaaagtatatttttaaaagtgagcaggatactggaaggagcgagtacaagtcgttgtctgaaatagacagagaaagggtaagttgtggataagaatagtgtttttaacgggtctttgaaacaagcattctggaatttatccatgcttgttggctctcccaacaggctgggttggggaattaaagggatcgcctcctaataaaaagtgtagacttttagtccactattcctataaagatgaggttaaaatactcaagataactgaacagaaatcaaactctaaaaattatggaacacatataagacacacatctactgctacaccctcaattttcttttgctatatacaaggatatttcgaaacaaactgaattattctgaaggtcattttgagtgaaatttttactatagttttgaattacaaagattggaattgtaacacataaagactaattttctgggctctaattttttaagaacacaatcaactgaatctaattggcataattatcctttcacagatagctttaaattgtttatttggatcatagctraaatgaacaagggaaggaggaaacagcaattaatttcatgagtccagattttcgactttatgaagcttcaatgaggctgtttaaagattacacttctaaactaatgtatagccacaaactagaagtcagaaaataaaattaattattctacattttttatctgacattattcaatattattttctaactaaagtgtggaaatgctttgcttaactttaaattcagtcacatacagagatttttagagcaatatttttgatgaagagcaagtgaaactaaaaatgacacaagtgactattagaattttatttctttgcaaaagaaactttgccaaattgactccaaaactgagtgcctttgtggataaatatgacttccacttgaggctgagttctttaatgaaccccttgacataagttgtgagtgaaaacatgagactatatcagaattttatccaaaagacaggcaatatcaaatgctggtgaggatatggagcaagcagaacaccccgtgggaatgtaaatttgtagagccactatggagaacaatatggtgtttcctcaaaataataatagaactaccatatgatctagcaatcccactgatggctatatatctaaagaagggaaatcagtacattgaagagatatctgcatccccaccattattacagcacttctaacaatagccaagatttggaatcaacttgtgtccacaccagcagattaatgactaaaaaaaaaagtggtacatacacacaatggaatattattcagctgtaaaaagaatgaaatcgtatcatttgcaacaacatagatggaactggacattacgtgaagtgaaataagccaggcacagaaagacagatagcaaattttcactcctatatggaaacttagaaaattggtttcatggagatagagagtaggatgatagatatcaagggctgttagggatttgtgggtgggttggaaggacgaagacaggttggttaatggatacagacatacagttggatataaggaataagttttaatgttcattagcagagtcaggtgactacaataaacaacaatgtatagtatatttcaaaatagctagaagacaggagttgaaatgttcacaacacatagaattgataaatactcaaggtgatgtatcccctaaatgcatgacttgatcattacaattctgtgcatatgacaaaatatcacatgtaccccacaaatatgtayaaatattatgtatctattttaaaagatagatgctaggggataaaagacagagagaagacatagattaccttcaaagactgatagttgattctgaatagcaataatgaaaggcagaatagaatgggataatcatttcagaggacaaagattaaatatgagccaaccaatatatatccaaagacataatctttcaagaacaagagagaaataaggacacttccagacaaaataagcatagcgcttacttccaacagattgtcaccaggcatttataaagtatatgattttgggagaagaaaattattctgtatggaaggtctgaaatgcaagaggcaatggtaatcatttgtattataagatcaaatttaaaacaagtcagttggactgtgaaaatgaataatggtaatgtctgattttgaaaatttagaaaagtaatttactgtcagcattattgagttttaaattatatggcatttgcagaagttcatgcatatttttacctagcaaagtgttacacaggactacggctctacaatcaggttcctttcaggataagtatatttgttttgttcccatttgttttatttttagtttatttttaaatttattttcaactttatttttggtaatgtattcggtttcttgttttggttttctctgtgagatttttcagtcctggatttgaaccaacaagtagtttgatgacatgaatcttgattttttatgtctgggcacatttaaaattttttaaaaaacataactaagttatgttttataccatgttaaaattgtgaaattcccacaaatctaaaatgtaatcccttatataaarggcttttaaaattgttgttgcagggcacaagttcagttagttttagcttatttcttctgttctaactttgtatttgatcacctttaagtggggtgggaattccttcttcagttaaccaccacgtacagaaacaccttttgtcttatttttggccatttcacccatgtatgttatttgcttgttacttgaatgcatctgagttattgattagtgatttacaatatggcaactacctgaaataggtgtatgccagattttaaaatgttggaaatttcccaaatatgcttgcacttttctaggaaagcccaaagtaattttaataccaagacttgtttaaagcatagatttgccaatttttgatgtataattttttgatgagatagttatttaatctctgtctctgcttcccacctacaaaataaatttaattatccttgccctgctcgtttcagcttactttatagatagatctctgttataaacattttccccctaaaaatgaaagacagtccatctctctatagagactatctaggaaagactagttgatattcacatacaggcaatcttgttttctctttcctgaaactaagaataatatcagtaagattccagccaatgactatttcattatatacacaatgtttcaacataatatatttttttccctaacaaaagcaaattcacctaggctcttgaaaatagctttccatagaggctatcctggttcaagtgcttttcaggtagtttctttcttttcctaaaagccaaagcccaaatgtgtggtgcctttgtaacccctcagttactattgattgctgtccttactaattaaccttggaggtgaggagttttggtcactacatgggccacaggaatggatacaggaaatatatgatattctctgtttctctggatatggtaatacaacctaactgtcaataacctgtttaaaagacatgaaatctaaaatgttccatgtaggcttacgtacaaagcagtttatttaatcaaaaggtcaaaatttttctgtaatagctatctcatataatgctttccattcaccaactatagataaatgtaatatgctgagttgcttgcttcatttcaattaattaaataattaattatttctcattgtatgcttgacttctctgtgttaatgatgtctggccctcatcttactctcaaatataataatattgaarcccaaattatctttccttcccagttttcctgctcctgttactaaggcagttagtgtcctactattccagacctgaaaacttttcatcatcctttaactcattccatttctacaaacaagtttccatgamtgtttctctgaattgcttgttcatcttcattaccaccaatcacccactgaattatttctatccatgcttttcctgaacatctttgaacatattttgtttctctatattaattttgttctgactcagattttatggtattataaaagctgacttggtatcaatgattacagaggaatagggcaccccaggctgaaggatatgcttgcttgagatggagttgagtataaagatgggtctttgcagaggagctggactttccaggtgtaggatccagtggagaaatactgctcaaatttaattccccaaatggtcattattacagttttcaatctggtgtacagggaacagtggtaatgaatccaagttcttaggaacagtcctagtagcaaaatggctttaaaaatgtttccatataggraagaaaaccaatcaagcattggtaatgtggaaaaagcctttgttccttgggaggaaaattgccaacagtgttctttatcaaatatactttgggtgaatattattttaaagattccaataacaaaatacaatttcatttgcaacaygtatggaagaacacagctaaattctggtttcatcgaattaatgaaaacaagtctaagaataaagaccatgagattgcacagatttgcaaaaggaaattctgtttcggattcacatgggaargtttctgttctcagctggagttcctttgggaagaatttaattattaaagtgaaagagaactagtctttgcttagataaataactaaattctatcagagataaatgatttctctataatagaagttataataacaatgtgactatttacatctattaaattaaaattcaggaactaatcttaggttgattgtatgcattcaaagatagccaacaatcaataaatgacaaatggaatatctactatatgttaaattctctgctatgtattataggaatgtaatttgttttaaaatttgatttctgtaacatcttcagttttgttatataacactataagctgattttaaaaaatcaatatgaacaaatgctacgaacaagaatcatttagctttgggaaaagatatctcaatgtcaaggcacagcatggtaggattacgtgtcggagaaattgtagctggaattctagcttctatttcctaagaatatttctcttggctatctacttaaaatgccctctgggcctcagtgtgcatgccaataaactaggaataatattatttataattcttatttacagggttgttaaaataagcaaaagtattttatttgatatattttttaaagtttacaaaatatgtaaggtgctttgacttaagaaactgtttttaaaacaaatgtggaaaagtctatataaacagcattctccttttttccagagatcaaaacaaatgtttttcagaaactctttcactatcaatgtataaccctgttataaaagcaaacttcactcttatcaaaacttgttttgataagacaaactgtatgcctcatcccctctgctttttctcttgctagctttagacttggacagccaactcactactgcacagatgaagttcacagccccaacagtaacttaaatttaacatgtctaaaactggaaacatatcttcctttgaactatttcttgaagtaaaaataagtaamaaaaattaatgcacttaatgacatcactatcaacgtaattatttaagtcagaatttaattaagctcttcccagactgaaccaggtcctgtttcgtgttctcgtagcccaataacgagatgcggaccaactgggaaagaagagagtttatttcagtaaccaggtacagggagaaggtcagagagaattcatcagaccaactcaggattctaaagtttttccagtccttttatatgttttgaactatatgcctatgtgtggtgtcatattcgcctatgtctataggtgatgaattttgttttaactgaaatgtcagaggccagaaatgtcctctaaatctacttaatgcatgaggtctctggtatcgggatgataaagaaatgtcccctaaatctacttaatctattaggcccctgataccaggttgattacttctaccttatgttacctatggtttgggtctagagagttgcttcagacccccagcaaatgtattgaatccaagacgggtgttggtacaaggaatgaagggctgtcttgactcaccccaggttttgtggacccaagacaggacctcgtcaagacaaggaatttatgaaagtttcctttatcttgacttgccctgggcttcagcagaagcccggggaaaggtcttaccgaagatatgtttcattgttgtctttggtgtctgggcattgatttccctaggtttaattattaacttagtgttaaggcagatgccatggaagtttgcctgtataacgggagtgctatggaggcctgtgtgtgtgactgtcagcaagcattggcctaccacaaaacaatcaccaaatcttgctgattttcagattttcattggctatttcttcaaaatttttcctttatctcattgttatgcttgtcaagaccctttctgagggtacttagtcttctaagaggtatccctgcttctccttcttcatcctctttttatctcctctctttctacctccaaaccatgttccatgtcactttcagagtagaatatctaatcaaaaacttttgctctcatacttaaaatttcttgatatctcattgtgccctttaggataatgtccatagcgtgccatatgaggtcaccatgatttcccttagtcttgtaaatgcgccccaattcccatgatttcctacctaattcttggctctcaatcaatgcagaggcatttcagtgcccaggatttaccatactgctttctaccttcatgattttgctcaagctgttctctctctctgcaataccttcagtattagttttctatgtcctgtgacaagttgctgcaaactttgcagtttaaaaccacacccatctattcttttagagttctggagatgagagttcagttttactatgttgaaatcaaggcatcagtggggtctcaccctcagcaacaccaggggagaatttttttcttgcctttttcagcttctggtggctccagtgtcccttggcatgtggccacataatttcagtctctgcctctgtggtcatattgccttttcttctgtgtcaaatctccttctatctcttttttgtaaggacacttttcattgcatctagggctcacactggcaatctaatataatcttcctgttttactcagctcaggctgttacaacaaaataccataaactggatggcttaaatagcagacacttatttctctcagtctggaggctgggaaatccaacatcaaggtgccagcagactcagtgatttgttagggtgctcttcctggcttgtagaaagccaccttcttgctgtctgcacacatggcctttccttagtgagagctcaagatggcatagagagacagatctgtcttcctctacttacaagggcactgattccaatgtgaaggtcccaccttgtgagytaatctaatcctaattacctatgaaaagctccacctctaaataccatcacattgggagtctggacttcgacacatgaatttttggaggacttgaacattcagcccatgacgttcccatctcaagacttttaacttagtgacatttaaaaatagcctttatctatataaagcaacattcataggttccaggttaggttctaatatctttggaggccattatttagcctactgctgctttcttttagaatttagcaaggtttctcttattgataacccttggcaccctatgcttacctctgaatttacacttattacataaatattaaatctttctacctagaatgaacacttctcaagggcagaggatgtacattttattcatttttcctttgttactgtcaataccctgggatggtgtctggcacatagtaggtgttcagcatgtatttattgaacttttgaaatgatgacatctctgattttaatgtttcaaaataaatgacttagccagtgggaatgaacaagaaaggtaacatatggttgtctcactctctggagcacctcatgggcaatgtggcttgcttcctgaccctatccagtgaaatacaggttttcctcacttcactgtgtttattgtattgtgcttctcagatactgcatccttcacaaattgaaggtttgtgggaactcggcatcaagcaagtctgttgacaccattttttttccaacagcaggtgctcactttgtatctttgtgtcagcatttttgggcaatgaaacacttgtaaattaaggtatgcacattgatattttttgtatgtcattgtatgacacacttaatcaattaaagtaaaaatgtaacttttatatgcactgacaaaccaaaaaattggtatgccttgctctattgccatggtccagaaccaaacccacaatatcgcagaagtatgcctgtaatacaaatataaatacttcatttttcaaatgctggtttgttaattcacttttttagggcaaaaattttatgacataatggccaatgagattatagggagatttctgactcagactatcacattgaacactaattatggccacagatgattatctattaatgtaaaatgtgatcattttaccatcgataatactttttttggtgaatggaacaaaataaaggtatatcttgttcagaagaactgtcaaataaaaagttaaggcatgtaacatacacacctttaagcgatcccaagaatcttagtttattttgtgctgccataaacagcagaacacctgagccaggataatttataaagaacagaagtctattaactcacaggctgggaagtcgaaggttaaggtgccatgaagtttggtgtttgatgaagccattatcttcttccaaaatgaacccttgcacactgcatccttttggggatggagcactagatcttcacatggtggaaggcagaagggccaagactaagagcctactcctaaaacccctttatataatgacataatccatttatgagggtagagctcttacggccaatcacctcttaaggtaccaacatcccaatgctattagattggtaattaaattccaacatcagttttaaagggggaacaaacattcaaaccatagcaccaagtgagccacactgttgtataatctccaaccctggactgctgacaggaccaatgacttgcttctaaccactagagtatggcatatggcaaaagtgatggaatgtgacttttgtgaaatacacatacacacaaacacaaccatatttatattcaatacatgcatgtttacagtgttttacatatgcatatggcagattttatttatgtatacattcaatgtattatatatatgaattatctatctatctatctgtctatctgtctatctatccatccatctrtccatcctatctttcttgtgcttgctaacatgcatgagagagattccccttcgttactggctttgaagcagtaagctgtcacattgtgcaagggcatatgaacaaggccaagcggcaaggaactgtaggaatcctccaggagctgaaccaggctgcgggccaacagccagcaagaaaacagtagtcagaatcctacaatcacaaaaggaggggaagtggctgttttaccagttggtcctcagagaagatcataggcccacctcacccttgggttgcagcctggtaaggctcttccaggctgcaactcagaatcacaaaaccctctttagctgtgctccctggacttttggcctgtagaaagtgtgagataataatgtgtgttactttaagtcactcagttgtgttaagggattatgcagcaataacaaactaatccaggacacaacagtctgtgatgtagatttggtggaaatgtaagggagttactgcagaaaattagagtagtaaaaattatagaagaaaatgcttcatataaagcaaaaccaacaattcaattgcttttacttccaataagaaaaaatagaaggaaacctaaaaaaacacggctttatgcttatgaatataaatagagagctccctaaagggctcaatttttggaaaaatagtcaagaagatggtaagaaataaaacaaatataaatatatactgcaaaccttttagaataatgtctttgcggctaaagcacaggtgattataattttacaaaaaatgtcaaagaaggaaaaataaatgttttatataaaaatgataagccaaaaatggtggctggcagtgtgttatagtggaaagactgggcttgtattaatttggcttctatatttactatttgagtaatcttgaggaaattgcattttgaaatatttgattagtgataaatctctttagaaattttatttctcagtgttctccagtaaaccctagagacatatatatgtatgtatatccatttatttacccatctatctacagagatttgtaataggaagttggattatgcagttatagaggctgggaactcccaaggtttgaagttggcaagctggagatccagaaaagccaatggtgtagttccagttcaattctgaaggcctgagaaccaaagctaatggtatagtttcaatatgaaggtgggcaggtgatgtggttttgctctgtgtccccacctaaatctcatctggaattgtaatccccacatgttgagaaagggacctggtgggaggtgattggatcatgggggtggtttcttccatgttcttctcatgagagtgagtgaattcttatgagctctggtggtttaaaagcatgtggtggttctctcctctctctctctctcaccaccatgttagacgtaccttgcttccccttctccttccatcataattgtgagtttcctggggcctccccagccgtgtggaactgtaagtctattgaacctcttttatttataaattacgtagtctcaggtagttctttacagcagtgtggaaatggactaatacagaaaattggtgctggaagtttagggcactgctataaaaatactttaaaatgtggaagcgactttggaactgggtaatggacagaggttggaacagtttggagggctcagcagatgacaggaagatgtggagaagtttggaacttcctagatatctgttgaatcaccacaatgctaatagtgatatggacaattaagttcagactaaggtggtctcaaatggagatgagcttattgggaactggagcaaaggttactcttgctatgctttagcaaagagactggcagcattttgcccctgtcctggaaatctgtggaactttggacttgagagaagttgatttagagtgcctggcagaagaaatttctaagcagcaaagcattcaagatatgacctggctttttctgaaaccgtacagtcatatgtgttcacaaagagatgatctgcaattgcaacttatgtttaaaagggaagcagagcataaacatttggaaaatttgcagcctgtccatgcggtagaaaagaaaaactcattttctggggagaaattgaagcccaagccactgcagacatttgcataagtaatgaggagcccagtgttaatggccaagacaatgaggtacatgtctccagggcatttagagatttcacagcagcccctcccatcacaggcctggaggctcagggggaaaaaatagtttcctgggccaggcccagcacccagctgctctgtgcagcctcaggacatagtgccctgtgtcccagttgccccagctcccaccataattaaaaggggccaagacacagttcaggaccatggcttcagaggatgcaagtcccttgggagattccacatagtgttgggcctgcagatatacagaagacaatagttgaggtttgggaacctctgcctagatttcaaaggatatgtggaaatgcctggatgtcgaggcagaagtttgctgcaggggcaaatccctcacggaaaacctctactaaagcaagcagaggagaaatgtggggttggagcccccacacagtctctactggggcactgcttagtatcactgtaagaagagggccactgtcctccagaacccagaatggaagttccaccgacagcttgtatcacgtgcttggaaaaggtgcaggcactcaatgtcagcctgtgaaagcagttgcaggggctctaccctgcagagccatagggatggagctgctgaaggctttgggagcccacctcttgcatcagcatgccctgtatgtgagacattgtgtcaaaagacattattttgcagctttaagatttaatgactaccctgctgggttttggacttgcatggggcctgtagcccttttgtgttggccaatttctcccatgtggaatggtttacccaatgcctgtaccccactgtatcgtggaagtaattaacttgctttagattttgcaggctcagaggcagaagggatttgccatgtctcagatgagattttgyacttggaattttgtgttaatgcttgattgagttaagactttgagggactgttgttaaggcatgtttggtttttaartgtgtaaaggatgtggtattttgttggggctgtggcaaaatgttatggttggactctgtgtccccacccaaatctcatctgtaattgtaatccttatgcattgagggagagacttggtgagaggtgattggaccatgggagtgattttccctatgctgttctcgtgagggtgagtgagttctcacaagctctgatgatttaaaagtatatggtggttccctcaccttgctctcttccaatgccatataagacatgccttgttttcccttctccttccaccatgattgtaagtttcccgaggcctccccagccatgcagaacrctgagtcaattaaacgtcttttgtttataaattacccagtcttaggtagttctttataggatgtgaaaatggactaatacagcaggcttgagacaccagaagaggcaatgtttcagttcaagtctgaaggcatgaaaagactgatgatccagcttaatgaagccacacagaaggaaattccctgttacttgcaggaggtggtcagccttttgttctgttcagtcccttcagctgatttgatgaggcccactcacatgaggaaggaccatatgctttactaggtctaacaatgaaaacatttatattatccaaaaacaccctcataggcccacccagaataatgattgatcaggtatctgggtgctctgtggccaagtcaatttgaagtggacaggttttgagacaagcaacctttaacctttaaatgcgctttaaagactgagcatttatctcttgtcacaaagaatgaatgtcacatctccaataaaaccagtcctcrcttttcatcctccctaccatttagtattgccataaggttaagttctaaccaacagcttgtgaacaaaataaacctcttccaggctagcccaccaaacctcctgcacatgatttgtcatgctcttccccttctaccactgtgatgaagagtgttcagaagccagacactgaagactttgagagagatgtccacttatcagaaacatctatataaaattttatgtgagcaagaaatatgcctatcttctttatgaaccattgcatacattaaggtctatttaaaaggcttccaaaaaatcaaacttctttatacattctatcctatgtaattgtagaaataagcttgaatactgagtttattttgaaatatttatttctagagtaataaaatgagcagaaaaataagagtaacatatccttaccacatttgcattgttcagccttttaaaaatcatgtttctgcataacttgcacgcactgaagtgttgctccctcaaacttcctgttccagcagctgcactacagaaggaagagcgtttttaaagatcaaagtaacttctgtagtattgaccaaccacaagtgattaagaaggagctaactagaatagtagcctatttttgagaaaaactatattagcttagaagaaaatcacttagtgtctacagaaagactaacataatttttacagaaggcaaaaaggatgaatagctgagtcgtaattactgttagtgataattttaaaggtattataaaatattggaaaactaaaaccttaaggaacaataaacacctcaagaataatttaaaagagtaaagtaaataccaaatcattacctgctgaggtattcatcattttatttttcaaaaaaataggcccgtgtactttagttaattactaacattacatatcaaaaatgatatttcttcaaatatgatacctaaatgaaagattatctttcaaagcatgttctaaaagtatttagagttatgaagacatacttctgtaggttaattctattaatgatgacagtttttaacttgcttgggaatgatagaaacatctctatcctcttcacatgaaatttatacacagacacagatatgtattatatcacaaaaatcatacatggtatattgaagtgtaacacagaacaattctggtttgtgaaagtgaatttaaatatgggaattatgtacagttcaaaattttactgcagatgttattaattaacttttcctcgaaacaaattaacatatacagtatttcaatacaatagcagcacacaagaaaacactcttaaattgatatgtattataaatgtaatacatacatcacatatataacatatgtatatacacatatcacatatacagtatatatagtatatacatacatatgtatcacacatacgttatatgtgtgataatctctatatgtcacacacatatacttatatagtatatacagctatacacatatataaaaaacgtaaaaatacaagtatatatcacatatatagtgatatatacttgatacatatacatgtatatatgtgatatatacatgcatttttatatatttgtataaaatactttatattttgtatttgtatattgtataatataaaatattaaaatatataaaatacattaaaatatatgcatgtattatatatatatatatawcccataagtatatatatactacaaaggtgaagttaaagatatagagtagggcaataggagagaaagagtcagagtcattgggaatcaatcttgtaggttcaactgatgtaagagttttggacaggcagaacacagaagatagatttggataaattgttaaggggataatacaataaaatttcccagaactgaaaaacaggaatctccacatttaagaggcgaagtgaacactggcacaattaatgaaaaaagcgacttgcgacaaggaataacattgtgaaattttagaataccactgatacagaaaaactcctaaaagaacccagaataaaatgacgaaaggaaaagggaaagaagataaggagaaaaaagacagagagagataaagaaagaagagacagagagagaggagtaaagacacagagatagaaatagtcacagaaagaaggaaaggggaaggaaggaaaagagggtgatggggaggggaggagagagaaaagaaaagaaagatcagtagcagttttcatagtagagtggtgytcagtattcagatatgatttatcacatttgaagtaggacttccaagtagctgtaagccaaatctaataccacgaataggatagaccctaaaaacattcttcccagaacaaataatgtgggaagtacacttgttccaaaatgatcagtttcacatgttcagatgaaaaaacaatccatcaaaactaatcacataaaaaagtattctacgtgggcaatctgatgttgcatgtatagtttaaactgatgttgaactgttaggacattgttgaaataagcaattattagttttatgaaacacatattgtagccaaaataatactgggttgtgggttaagagaaccttttgtattttagtagccattattataatagcttcatcatttggttaggtaaatgtccagatgkgaataatttatctggaagagatattggaggatttgtgatacctctagctgaattcctttagtaacttggattagaggtgaaacaaataattcagatttataatcatctatttgcgtataagttttcattttgttgtgaataaacatgcaaataaatatactttgataactactcccatgagactaacataaccaatgcagtttaattatgattactgggtaaagaaaatatgctgtatatgtacatatacacacatattattatatacacaccatatatatacacacacacaatattttctatattttatatatagaaaattttatatatacacatatttttatatatacatatattttatatatacacattgcatatgtgggtatatatatgtattatagtatatatatgtgtgtgtatatatacacacacatatatatggtatacacataccatatatctctacataccatatatatatcccatatataccccatatatatgccatatatatcatatatatacgccatatatatataccatatatgtatatatatttacaaatatatgtgtacatatatatgtgtacacatatatacttatatatgtaattatatatggtttatatgctatatatataccttatatatggtatatatatatactatgtgctatacatagtatatatactatgtgctatacatagtatatatactatatgctatatatcatatatgctatatatactatactatatatactatatatactatactgtatatattatatatactatatatactatactgtatatattatatatactatatatacactatatatagtatatatacactttttctatagtgtatatataaatagtatagtatatatactatatagtatatatatactatacatagtgtatatagtatatagtatatataccatacatagtatatatactatatactatatatactatacatagtatatatatagtatatagtatatatatactatacatagtatacatagtatatagtatatatatactatacatagtatatatagtatatagtatacatatactatacatagtatatatagtatatagtatacatatactatacacagtatatatagtatacacatactatacacagtatatatagtatacacatactatacacagtatatatagtatatagtatacacatactatacacagtatatatagtatatagtatacacatactgtacacagtatatatagtatatagtatacacatactgtacacagtatatatagtatatagtatacacatactgtacacagtatatataaaggatacacatactgtacacagtatatataaagtatacacatactgtacacagtatatataaagtatacacatactctacagtatatataaagtatacacatactatacagtatatataaagtatatgtagtacatacatattatagtatatatagtatatatagtatatatcgkatatatagtatatagtatacagtatatatagtatatatagtttatagtatatagtatatatagtatagtatatagtatacagtgtagtatagtatagtwtatcctatataggatatatagtatatagtatatatagtatatgtagtatataggatatatagtatatgtagtatatagtatataggatatatagtatatgtagtatatagtatatacagtatatgtagtatatagtatatgtagtatatggtatatacgtatatatgtatgtatatatgtgtttatacacgtataaatacacacatacatatacacacatgtatacttacatgtatacatacacacgtgcatacatacatacatgtacacagacacgtatacacacatgtatacacacatgcatgcacacatacatgcatgcatacatgcatgcatacacacatgcatacacacatacatacatgcatgcacacatgtatacatacatgtacacaggcatgcacatgtatacgtacatgcatacatacacgtatacatgcatacatgcatacatacacgtatacatgcatacatgcatacatacacgtatacatgcatacatgcatacatacacgtatacatgcatacatgcatacatacacgtatacatgcatacatgcatacatacacgtatacatgcatacatgcatacatactagtataaacacatggatacacacctgcatacatacatacatgcatacacatgcatacacacatgcatacacatgcatacatacatacatgtatacacacatgcatacatggaggcatacatacacgcatacatgcctacatgcatgtatacatacatgcctacatgcatgtatacatacatgcccacatacatgcatacatacgtgcatacatgcacgcatacgtgcagatacgtacatacatgcacgcatacgtgcagatacgtacataagtgcatacatacgtgcatacatgcatgcacacatgcactcatgcatgcatacacacatgtacacacacatgtatacacacatgtgtacatacacatgcatacacacatgcatacacacatgtatacatacacacatgcatacacacgtttgcatacacgcatgaacacacatttatacatgcacacatgtatgcacacatgcatacacgcatgtatgcatacatgtatacgtgtatatacatgtatatacgtatatatgtatgcatgtatatatgtatatgtatacgtgtatatacatatatgtatatgtgtgtatacatatatatactacatatatgtatatatttactgcatatatacatatatgctatacatatatactgtttataatatatatactatatatagtgtatatatactacatatatggtatatatactatatgtaatatatagtctatatagtatatagtatgtatagtatatagtatatatagtatatatatcgtatatagtatatatagtgtatatggtatactatgtagtatatagtgtgtatatatagtatatatatacacacaatatatgtatatatagtatatatggtatagtatagtatatatatagtataccatatatagtatactatacatatactatgtatatatggtatatatataatgtatatatactatgtagagtatagtatatatagtactatactatacacacacacacatatatatacacacacacacacatatatatacacacacacacacacacaccattgaatattaagccataaaaaggaatgaaatcatgtcttttgaagtaacatgcatgtagctgtaggccattatcttaagtgaaataatttagaaacagtaagtcaaatactgcatgttctcacttataagtgggagctaaataatgtgtacacatggaaatacagagtgaagtagaggatatcaggatccccaaatggtggagggcaggagaggggtgagggatgaaaaattacctattgggtacaatgtattacgattcagtaatacactaaaaactcagacttcaatatttattttataatcagcagtaggcattagagaatcctttatattaaaaattaaccgtacattcaatttcagttatattctttgcattcttatctccctgggtcccccatcttccttccttccttctttccttccttccttccttcctgaaaaggcctatatttctatcatattataagttagtaacgggacctacctcataaataaaggaataaaatgatttggttttggatgtgaatgagtatttctttagagagctgtaagaaaaatttaagtagtataacaatgtggctaatagaatattaatatttagcacccatcatctgaagcaaaaaaaaaaaaatggcacttctggttcttaagaaaatatgtacatgctttttttctttcagttcaggtttacaacttcactctatttcagtgccaggctgctttcttgttagagcctcttttggaatccaagtgaaagtacggaggaagaggacatgagaaaagaacgcctgtatattgataacaaaaatttatatgttgttttcaatatcctctattttatgaagttaaatcttgccttaggttgagaggagctcaacctaattttaattggctctaaacctaaggcaagggtgaggaactcaacctctaaaaacatcagaagtttcttaagaagacaaaaataacatttctccaaatagagaaaaaacatctaattccatggtataataagtcggctggcaaatttccttttaaaaaattcattcttgttactatttatacagttgcagaaattaaagagatcatatctatttctttcaaatttgtaataaagaaaaaatgcaatttggttcagcagttaccttgctgatctcacaaactgtcatactctctcttgtcccttttcctttatggagtctgtttcttcttttggaatagacacatctccttaatcactagtcactttttcctccttctctctatgtttaaagacttatctactttttgaagacctttatatccacatgttctgctttccccggtcctattttagcaacaactctatttactgtaatttcaattgtttccattttctcttagtagagtgtagactttatcggcaggaaattcatgatttaacaatagtgagtcattaaacctaacatagttttaaaatatacttgctataaaatgttggttaaataaatgcacttttaaaaaagtaaatggtctaaaattctctttttttgttgtgcctttgccaggctttggtatcaagatgatgctggcttcataaaatgagttagggaggattccctctttttctattgattggaacgggtttcagaaggaatggtaccagctcctccttgtacctctggtagaattcagctgtgaatccatttggtcctggactttttttggttggtagrctattaattattgcctcaatttcagaacctgttattggtctattcagagattcaacttcttcctggtttagtcttggaagggtgtatgtgttgaggaatttatccatttcttctagattttctagtttatttgcatagaggtgtttacagtattctctgatggtagtttctatttctgtgggattggtggtgatatccccttcatcattttttattgcgtctatttgattcttctctcttttcttctttattggtcttgctagcggtctatcaattttgttgatcttttcaaaaagccagttcctggattcattgattttttgaagggttttttgtgtctctatctccttcagttctgctctgatcttagttatttcttgccttctgctagcttttgaatgtgtttgctcttgcttctctagttcttttaattgtgatgttagggtgtccattttagatctttcctgctttctcttgtgagcgtttagtgccataaatttccctctacacactgctttgaatgtgtcccagagattctggtatgttgtgtctttgttctcgttggtttcaaagaacatctttatttctgccttcatttcattatgtacccagtagtcattcaggagcaggttgttcaggttccatggagttgagcggttttgagtgagtttcttaatcctgagttctagtttgattgcactgtggtctgagagacagcttgttataacttctgtccttttacatttgctgaggagtgctttacttccaagtatgtggtcaattttggaataggtgtggtgtggtgctgagaagaatgtatattctgttgatttggggtgcagggttctgtagatgtctattagttctgcttggtgcagagctgagttcaactcctggatattcttgttaactttctgtctcgttgatctgtctaatgttgacagtggggtgttaaagcctcccattattattgtttgggagtctaagtctctctgtaagtctctaaggacttgctttatgaatctgggtgctcctgtattgggtgcatatatatttaggatagttagttcttcttgttgaattgatccgtttaccattatgtaatgcccttctttatctcttttgatctttgttggtttaaagtctgttttatcagagactaggattgcaacccctgcctttttttgttttccatttgcttggtagatcttcctccatccctttattttgagcctatgtgtgtctctgcatgtgaggtgggtttcttgaatacagcacactgatgggtcttgactctttatccaatttgccagtctgtgtcttttaattggagcatttagtccatttacatttaaggttaatatggttatgtgtgaatttgatcctgtcattatgatgttagctggttattttgctcattagttgatgcagtttcttcctagcctcaatggtctttacaatttggtatgtttttgcaatggctggtaccagttgttccttcccatgttgagtgcttccttcaggagctcttttagggcaggcctagtggtgacaaagtctctcagcatttgcttgtctgtaaagtattttatttctccttcacttatgaagcttagtttggctggatatgtgacaaaaacaagaaatggagaaaggattccctatttaataaatggtgctaggaaaactggctagccatatgtagaaagctgaaactggatcccttccttacaccttatacaaaaattaattcaagatggattaaagacttaaatgttagacctaaaaccataaaaaccctagaaggaaacctaagcaataccattcaggacataagcatgggcaagggcttcatgtctaaaacaccaaaagcaatgacaacaaaagccaaaattgacgaatgggatctaattaaactaaagagcttctgcacagcaaaagaaactaccgtcagagtgaacaggcaacctacagagtgggaaaaaatttttgcaatctactcatctgacaaagggctaatatccagaatctacaaagaacttaaacaaatttacaagaaaaaaacaaccccatcaaaaagtgggcgaggatatgaacagacacttctcaaaagaaggcatttatgcagctggaacacacatgaaaaaatgctcatcatcactggccatcagagaaatgcaaatcaaatccacaatgagataccatctcaaaccagttagaatggcgatcattaaaaagtcaggaaacaacaggtgctggagaggatgtggagaaataggaacacttttacactgttggtgggactgtaaactagttcaaccattgtggaagtcagtgtggcgattcctcagggatctagaactagaaataccatktgacccagccatcccattactaggtatatacccaaaggattataaatcatgctgctataaagatacatgcacatgtatgtgtattgcggcactattcacaatagcaaagacttggaaccagcccaaatgtccaacaacgatagactggattaagaaaatgtggcacatatataccatggaatactatgcagccataaaaaatgatgagttcatgtcctttgtagggacatggttgaagctggaaaccatcattctcagcaaactatcgcaaggacaaaaaaccaaacactgcatgttctcactcataggtgggaattgaacaatgagaacacatggacatgggaaggggaacatcacacaccagggcctgttgtggggtggggggagggggagggctagcattaggagatatacctaatgttaaatgacaagttaatgagtgcagcacaccaacatggcacatgtacacatatgtaactaacctgcacgttgtgcacatgtaccctaaaacttaaagtaaaataaaaaagaaaagaaatgtaaatgattactcctgtgatcaacttagtctggaaatgaaactttttcacttgggcctcaaaatttagtacacacatgtagacttattgtatttgttgtagaatttctacatatctaaattgggagataaaagagaaagacagtaatggggcagtagggaaatctgacaaaaagaaatatgaaaaactcatcattttgcatactaaatttatctctttattataaagcaggaatgaatcatgccagaataccccttccaaattttctttcctttatcatttctcttttctaatttcaatgtactacagaaggaaatatgacaggtttatatttatttttctaacaaatgacattgattgctttatttttctccagaaatattgctgttttctattgacaaaacatttttaaaggagaaattacttattaaataagacattggataagttaaaactctgtactgcccatttttgcttcttgagaatctcatatgattcacaaacatggtctagatatttatttgcattggtatccaacctaaacttctaaatcctagatagttgtgctctttttatgattgaatgaatggatttcccttttttttcacagaagaaaccctagcagatataggctcagatactaataaaacaaagaaaccaatccaatcaaagtaaatttacagagatgtttacccatcctctaaaaattttctaaatgaaaagagattatacttttttttaggtcctaggagaaggtagattccaggtacacaaaaatagagacttgtaaactaaggttctgttataaatatatacatattttcttcataagcctttgtgtctaaasagtaactccagttttttttttaaatgttatatgaaaactgagttgaaaactactctaggaaaacatttttaaagttattgttggctggcaggaatatggggcggagttgagaaatgagagcagcaataaaaaggaagttaaaaaaaagcttgtcacagggcagtgtagttccagaaaataggactgaccaagaagcagaaaagcaagatgaatgatgtgaagcttgctgtcttgggtggtgaaggaacaggcaaatctggtgagtggtgacatcttctctgttatcatagagtgtagaaagagtgagaaacattgacatgttaaccattaaccacgtatttcatatatatttcatatatatgaaaatatatctataataacattatctcactgggatgataggcacattatctttcattaggasttttcatttttataggtaagtaactgtatgtttatagaatatataggcaggcatagcaagataaatatctgaaatgttaatttgtatattgttctactgatgtttacaattcataggaataacaggaaatttctrcatcactatcccacctacttctcacttcaacacacttgccttatacccactagttcccaaacaatggccttgatagaactcatctgctctgaaactggggtagggagatgtttggaggtttgtggattgtattttaaatgtagcattactaagatgaaggaactttgtggggcgcatggcttggtggatgttctggaactgagcaataatgtgctctaactttggaagtcatgcttttgttttgctgtgttttgctttggtttcggtcacattataatggtgacatgctaccaatagggtcacttgagcctaaagaatcatagcatcttaactggccaaacccaggagctgtgacatgatgaatggataccagaggttctttttctatttcctggattygtaggtccctacatccttaaataactgcaaatacttggtagtgtctttgtgactattacacatagtaccttgaagccagactgagtttgacagagaaaataaacagatgtcaaacttcttgcatctcaaatataatgagaaatctgtttctgttacaaaaggtaagtggccttatgtttttgtggtaatgaattaactgcatagtgatttagatgtgaagcactttaagatcacttcctttctaactttctaatcatttgtttgtaccatggaaatattgttaactactatttagaacagaatttggtctaattttaaagtctttattaattcttgaatatttttggtttaagaactaaagccttatgcacataaccamattagctgtttcctaaaatataacagccctaaatctagattgtttgctttgcagcccttacagtgaggtttcttactaagcgattcattggagaatatgcttctaattttggtaagtcactactctagacatttttaccttaaaacttttaacatcgtaattaaatcccacttaagtacagagatgcattttgatagactataccatttttatgcatatgaaacaatttatttattcacatattctgawtagaactgccaaaataggtacttgaattaaatgttcttttatggtaaaattcacccaatttgatgttaagtaagacagttggtttcaaagtctggaactggaaaaacattaaaactaagatcctctcttcaaaatattgtagaagatgtaactgaatatttcttgtaaggtataaaacaactttgaaattcaacattctttaaaaaataagagaaaattaatactaaaaccacaactaacaaaggagtaaagtttatttttattgtaaaaccataagaaaataataggaaaattatgccttgattaaatatcctatcattatctaagtcatttatataaatgtagaaaaattctaaaacacatgctggggcattttgatataattttaagattatttctcgaactcttctataaatttctgttttttgactagaattagcataatatatgggaaatagtacaacacaaaaagtgagaaattttgccataattttgagcatatttttggctcaccaattaaacaatataatggtgctaatatcttacccaattgaagaaatgaaatgaggagatgaatttttttcttttttaaaaaataagaatggcagattacagaaaatacaaaaattgagagaaaggagaatgtttttgttgattattagttatttagactaagaggaatttatgattgcaagtgtatttttccatgagaaacaaaaatctttagcattcaatcatgaagtagcataattggagtatctcagaaaatagctttaatatattacattgtgtttttccctacatgaattcaacatagtatttcagtccctatgacattatgaacattttagggcaagagcttgaaagctgattatagaaagttgaaaaygtaaaaagaaaaattcctgttgtttcatttgtgaaggcaacgacatcagtcaaaaaggtcaacataacatacaagttaggactcgggcatgagaaaatgtcccagaactaaaaaataaaacaaacacagaacgatatgctatccaaataacaacaaaagccctcaacttaaactttgatataatatagttgtataaattaatgaaatgtttacatatttctggctgttacctctcgatgaaaaataaaagacctagaggcatttttgaaaagctaatcaaatgatcaaaagctcattaactctatgagggcaaactagcaaaaatgactccacyttgtatattaaaactagaaggggaaataatacaattctaaaaatgtgagaattgatgacacttgctggcagtttttgagatttgagagtggatagttttaattggctagaaggaaatagtgtggtttggagtcaagaataaacctataaagtttagaagaaactggctgaaaacataatttaaggtttcaagaaactgtaacaaatttccttaaatataacctggtaggagttaagaagtcaaccctaatcctctgagagatggggagtcattgaagaaatttgatcagataagtgatgtgatctggccacaaggttcacttttacttctgtgttgagaatacaccagaaacaggaagggtgttagaggaaggatggaaacagaaagatgacttaggaggctttgtgataaattaggcaagtaatgatggtggtcgagactagagtgttagcaatggagatggtgagatacagacaaattcaaaatatattttgaaggtagactaaaaaggaattttagaataaatatgtgacataagacaaataaataatcaaggataatcctagggttttttgcctgagaagctggagttatggatatgccatttaacaaaatggaaaattgtagaaggtgcagcctttgcagggatatcaggggttcagcttgaagtgtgttaaggttgagatagctatcaagtatctaaatggagatgttcattagtaagttatttgtgtccggagttcagggatgaggtctgggcttcagacataagttgggttcatcagaaataattggcatgtaaaggcctgggactagaagagatctgaaaaggaatgtaagaagagaagaaacctatgaacttgatccatgtttgaaatgtgagaagtcagtgggggcggggagaggtgaacaaaaaaagattaagacggagcaacaaggaattaaaaaacaaaaacaaaaactggagacagtgttgccttgaaggtcacgtaaaggaaatactttaaggaggtaggaatgatcaactacattaatgctaccaataaggcgaataaaatcaagatacagaattaaccattaagtcataatacatttaagttagaagaaatttttcatgtttgtaagatgttgctaattgtatggtaaagaggaaaaaattatgatatataagagggaagtagaattgctgaagccatgtctttcagtgggtgaggggaaatcatcactagctgagagtgaatggatttactttagatggaaacacagatgttccatccacagtaataggatggaatataagtatatgagcaaaaaggtatgtaggtgaatatagatagtggtgagattcatttgtaagaaacatattggctgggcgcggtggctcacgcctgtagtcccagcactttgggaggccgaggcaggtggattacgaggtcaggagattgagaccatcctggctaacacggtgaaaccccgtctctactaaaaatacaaaaaaaaaaaaaaaaaaaaaattggccaggcgtggtggcgagcccctgtagtcccagctactcgggaggctgaggcaggagaacggcgtgaacccaggaggcggagcttgcggtgagccgagatcgcgccactgcactccagcccaggtgacagagacagactgtggctgtggctcaaaaaaaaaaaaaaaaaaaaagaaacatatctgagtaaatacaacaaatacatgctttcagtcaccagcaatataaaaagagcacaatacgattccactaaaatgtgagtggttgaatttatcagttcacgtttggagtattttcatactgacagtggatatgcatatttttgcagaatctatctataagaagcacttgtgtttggaaaggaaacaactaaatctagaaatatatgacccttgttctcaagtaagtaaaacaaaacaccttttttattgatttatttattgattgattttttagcaattatgatttgaagattatatgggggtaagtgaaaaaagtgaaaagttgcggtgttaaaaccgaagtttcttctcattttaattatcawaaatttaagagattactttctagtgttgtcagttccatcatctagcacgtctgtaagttcatgtcgaaaatgatcatatcacaaatatctttaaaattgcaacattaggctgtttctatatttctatcaggttacagtgtcactgtcagaagttaataagtgacttatcaattcacttcttattttcactaattgcacttataactaaccagttgtcaatagaacataataaataaaatagattttaagtacaaacctccttgtctattcatatgggaaaacagttaaaatgggattatacacgtaagagaaaagtggccatttattcagggtttcaaaacaactgtatgagacagatcattttaggtaaatcaaaatgtatcttaaatattttagctaaacccttataatatttttgatttttattgatttaaatctagtaccaaaaatcaatagatattccatttactaacagataaatgatatattttcacaacaaatatgtggatattattcaaaagacaattattgtagctcatcaaattttctgaaaaagtggagatgttttcttccggaaaagttataaaattagatagatataactttattatagttctgttttacatttagtcacttttaattaaggacaaagcaataagagagaaacagaactatattttagaaaatatcaatatttaacacattgatgtatcttccagcggaagtgggtctccattagttaactgtttaaagtataaaaacacaggtattagatcccaccacttttaatgcacttggtttattttcagacacagaaagcaaaattctccctcacaagtgagcttcactgggcagatgggtttgttattgtgtatgacatcagtgataggtcttcatttgcttttgcaaaagcgctgatctacagaatccgggagccacaaactagtcattgtaaaaggtaaggtatttttcattcctttctcctttctttttagtaaatcatcatatagctgtaagcatcattaggaagagtttaatacagccttccaattacaaaatttaacagccctgaacaattcaccttcctattccacaggagttacacatgtagtaaaaagaataagatgagaatgctttatatcctcgctgacataaacagttacttgccccgagtaaatggctattttacaagacagcttctattgttaacatgacactcccttgcaaaataatggtcctttgtatataagatagttatctttccaaccttttcttttcattctcacaaaaatgttaaggatactaaataaattcagatttattacgtttggcaccacatgaaatccaattcctagtcactgagttgttcaatctatcaaagcaaaatagactgagtaatcaaactgtttacaaattctaaatatgagaatacatttttctccattttacctcctaaagggctgatcaacaattcctttttcttaattgtcttgacacaaggaactatgaaggaagacatgattgtaccttaagctactgtttcattagtagatcaaagtttaagcatctgagttttccattttagttttccctatttttcagtcattttggccttttccattgaaagtatttatttttgctcaacatgctgattgtaaaagagtctttgtgcttttaaccagttttgcccttagaatctaaatagtattctaatctggtaagtaagaaaagcacaatattattactgagaattggtatgtgtacttttaataactattttaaatgcccactataaagaaatcatggataataattgataaagtgtatttccctggagttagatgatgtacattcttgctttcctttgatttgccttaagtaagccactttaatctctagagctcatttttctaattatttaactggtggaagcaggataggagaaacagatgtgattttactaaggtgcctcatagctcttacttcctataatattactgatattttagaactccattgtttcaatcattaaatatcttatatttaagcatcatggtgtaggtaagggacaggactaaaaawttctgacatttcttcaaatcagagtaatcactcaagaacacttaaaaacatactgaaagtataaacatttgtattggacatttttcaggaaatatttctagtttattgactagataatcctttgaatattcccagctctcaatctgtaaaaagactaggaaagcaaaatatatcactatttcattaaattatatctgatatttgtgtcccacccttgaaaatacatgtatatatccttcctcatttacccttttcaataattttataaactagactaaaaaaagaccttagcaacatttttaaaagttcaccacacattgtcatttgaatgaaaccaacttttagtggaatcagggccaataagagttgaagactgactgtgtgcacccatttttttccttatagtagatayatttgcagtgttctatgccatttaaagcctagtgattttaatatattcttcaactcaaactctatttttatattgtttctttataaccaaggaagacatactgatattttcagagacattttatcttaacaaagacacatttcttaaacaggagagttggacaagtccatgagattatacaattttctctagagcatgctataatggatattagcagagcaaaaacagcaataaatattgaataatatttttgcttatgaaaatattgtctaaattgttcaattatagtaactgtataagtaaagagacatttgctagctcttcccttgcaattgataaggaacatgaaaaacaatacttagtaagcatctttcattgcctgggcctgtgttaggtatttttatgtacatcatttaatgtatacaatctccatgagctttaacctctgtgagaattctgtgtgaggaggattattttaccatttttaaaactttgaatttaggttcagggtacatgtgcaggttttttacacaagtaaacgtgtgtcatggaggtttgttgtacagattatttcatcacccaggtatgaagcctagaacccgttagttaatttttcctgatcctcttcctcctcccaccctcgaccttccaataggcaccattgtgtgttgttcccctctatgtgtccatatgttctcatcatttaggtctcacttatgagtgagaacatgcagtatttggttttctgttcttgcatcagtttactaaagataatggcctccagctccatccatgtccccgcaaagggcatgctctcattcttttttttttttttttggttgagacaaagtcttgctctgttacccaggctggagtgcagtggcacaatcttggctcacggcaacctctgactcctggattcaagtgattctcctgcctcagcctcctgagtagctgggactacaagtgcgtgcaaccacgccaggctaattttttgtacttttagtagagatgaagtttcaccgtgttagccaggatggtctcgatctcctgacctcatgatctgcccgccttggcctcccaaagtgctgagattacaggcgtgagccaccgcacccagccactctcattcttttttatggctacatagtattccatgatgaatatgtacctcatttttacattaaaagaaactgaaagtggaaaaggtaacaatcatacttggttagtagacagcaccagaattcaataataggtccatgttacttcaattcctgtgctttaagagacttgttgcttctgtgccatttactacattttatctaaaatgattttaagtaattggggctatgtgtaactgtatacacacatgaccataagtaacatacacacaatattttttcttttttgatttataatccyttggttataaatctgttttttttttttttttwaaaaaaagagttgttaaaacaatcttgctaaaaattgtktatctctatttcagagctgtggaatcagcagtgtttttggttggcaacaaacgagatctttgtcatgtgcgagaggttggctgggaagaagggcaaaagctggcactggaaaaccgatgccaattctgtgaactgtctgcagcagagcagtctctggaggtggaartgatgtttatcagaattatcaaggacatcctgataaacttcaaactcaaagaaaagagacgtcccagtggatctaaatcaatggccaaattgatcaataatgtatttggaaagagaaggaaatctgtttagtagacaggtaatcctgrgagatttcctrtatcagagagtttcaaacattcacatgataattaaactaacctttgtatgcaatttttttttggtaaaaagaattmtcttggagatatgaaatgattgagtatgaaccacagctgtgttttcaaatatgtagtttgcctttttggttgttgtaccctgctcactctccttcacacagaacctttcatttattgtacaacatcacactcaccctaacctactggcggacagcgatcccagtttgccttgccaaataaactctgtttatgtgaatttattaaacgaccatgccatagtttgtggtttacctttattttatatagttatttggaatgaaatgggtatttatattcatacagttaataggtcacagagcttagtttatcaatctatgaaagttcttcatttatttaatagaattgcatgcatttattttaatcatgtctttacaataattcagtagcttacataatattatgcatataacttaggcccctaagcaaattccttccccaacagtatatatattctgtagttgacgtgatgatgaaaaagtctactcttccccatttccatgtatcacgctatgttagcaaggatcattatcacatattattttatagagctaaggtcctttttagatcaaaagatttagaaactcatacatcataggatggaaagaagtaaaaacttatcggggaatttataaccttaaaggcttttttgccctgaaataagtatttgtggattaggtacaaacattttggttcttctcaggttactctaattactgtttctttccaaagagaagcatccacctcgtagaccacagtaccactcccacagcccctgtggacctttgacgcaagatgtgtttcaagttgagacccaaggcttaattttggccaaattgctgacaaagttaggtctcaggcacaggaaattacgacaacaagcaatgccacatgtacacacttggttaataagtattgtcaagaccctggggaccaatgtgatgaagatctttaatagagagtgttagagtggccttggagaggggtgaaacagaatattaagctcgataggagaaaatttactgacatgagatcattcaccatgagtcacaatgcaacattgtaagagtgacacctacagctggtctaaatagatttgctgttccctagaagtctgaccttgacaatataactaacgtaaaagtagtgggaaaacggaaattaatgtggtagtgtacaaaattggtttagaatgtttataaggacatgaaggaggaatttagggttaatatattaaactagtcccaagaacccagtgtttgactatgatccctgggagaattcaggggaacttcgtttactcaggaagtagggatgcactgatgagtaggcacagacagctctgagaagcttagtggtgactctgctctatgggtcagagttaacagtagatccactccgttgttttacatcagtgggtgctaccactgaactgtgctgccccatatcaatgcagatcataggatcctggaacagcaaaatctggatgctagcatttaacctgcagcttgttatctactctcccagcaacctaagaaatggtgccacgcccggggtggaggttttacttcagaaactgactggttggatacttagaagtgatgtcctcaatcagccacattgaggaaaagtccatattgtagacccatgcattgcttccatctctgccaccatggccactgttatcgtgggtcagttacataaggagagatggccagaaaaaagagtcaggtggatatctggtggccaagtcatcctgtccagctcgttgtaaagttatatctctgctgggcattaacatgatacacaaagatctgtgtattttatgattcctctgagagttatcctttcacatacttttcctttaaaacttattgtcatgggtattccagcttaaccttttacatacttctgaccaactggaaaaactattaatcactgcctagaaatagtgtattacatgctacttttcttaccctacatttttaaagtggtgaacttttaaaaatgttactaaggtcttttttagtctagtttattaaattattgaaaagggtaaatgaggaaggatacatacaaatgttttcaatggtgagtcacaaatatcatatataatttaatgaaatagtgatatattttgctttcctagtcttttgtagacaacaaagtgtatttcttgaaattctgccaactgagataatttctttctgttaataaacttcatggtcatctctgtaagactgtaatgacacacaggcttcttctggctggcactaatatatcatgtttaagtgaggacagcttcccatcaactaggaacatttatattagatagctatgtgagtgaaaaataaacttctattgtacaaagttatcttagcaaatttaatgatacactcttactgtcaactgtttataaaaattgtattaatctttgatagttttaatattggctatatatacatatatatttataagtacaagtagttatacttgaatatggtttttgtttgttttgtttttcttctggatcatctcatttttagagatttggttttcattccttagaatcatttttccagttaaagaaagatttggggacaattttgccttaaaaataacatatttatctatgttaaatgtaagaactctaatgttaaatggtaatttttaatagtttaattcaggcatatgtacctgtgataagtcagagatcaaaatttttctgtcaaagataccacttatatttccatatgtttaaaatttttaattagacgctgatgttttagaaaattgaccttggatgacacaccttgtcataaggaatatatggaatgtagtaacaagaacaagaatttatattaagatttttttgatgcagtaattttagaaacgaacagctaattattttttcagagtgatatttgaaattattagattaattccacctttgataatgtgacaattttaaaacacataaacacattttttgatacttctcccatcaaaagattgttccaattcccttcctactgatgtagatcagttttacggactcgtcttaacaaacagattgaggcagaagtaacgtgtatgacttacgaagccaggttagaaaaggagacacagctcccatctgtttctctctcccatgttaactctgctttggaagctatgagtcaacatgtatgaatccagctacctggaaggtgccaggctggagatagcacatagagttaatgaccacacaaccaccagatagatatacaagcaaatctttgggtgatgccagcctacaacctttgggctactccagctgatggcaagtgaaacagagataggtgactgccacagaactctacccaaactacagatttgtgagcatagtaaatattgtttttattttggaattgtcgcatggcaatagataaccagaaaaaataattcattaaaaccctcagcaactcagccaatatgaaatatttggctttcttactagggaaaaatgaggtgttaaaaggaattctccaaccagattcaaaattgtttagaacatgatattgtcccaatatcagttttcttgtgaacataattcacttgtaaaacaacttgaaaaaccttaaaaataataagttgcatttttctaaagtgagcaaaaaccacatatacctacagagaaacaaatacatcaacactaagcaatagaatgttgtagtttgaggacagcaagtgtgtctgtaaatctcagagctagccaagctgtatcactaggctgggaattgcctatgctgcttctagtaagaaagatgctgtcattcattttggataagcttcagtgagatgacatataatgaggggcaacagctgaggaagggaatgccaaaggggaggggtctttaaagtggttttgatttaatacaaggcatgcactattaataaagaggttgaatgatacctgtatgttttataggtttataaattggctgtagtaaaatgttttacatcttagatcactaggtattgtttcagcttattatgggagatatctatctagagttgactgaattgtattaatctgaacctagtttaatgatgccttaacatttttatggggcaatttaatgtttgcaatatccatgttccttatttgaaagcgtgacttataggtttctcatcttccttaaattataaaatccttcagctaataaaggaaaatgattatagtttgcaaaaaaggcaaagtcatttaacaatccatataactgtctattgtagggctttgcataataattgtaatttagctattaaggattctaaaggcagttatcagtcatactctacaattctggggaatcaggcaaagcccaaaaattatttaaagtattttaaattcccaaagaaatagaggcacaccataaatttgaaatatagtctatagtgacaagatattatttcataagaaaagaaaaaaattcatcataattttcaaatatataaaccaccaaacattatttttcttccttttggatatagatgtaacacaagtttatgtttaataatggaaatataaattactctaagaagcaaatttgcagactataaagtatcagtgtcaatgtaaaacttgaccaacattttagtggtcctggagcagctaaggcataatgaattaagaaaaatgtgagtgatggaatcacttgacattacatgaaagaaagtgtaaccatgagttgcctgtatgatttttgactgtttcatgggactcaacatgagcatttaacaactagacacatgaaaacttgtaaaaacacatatgtaaaatcaagctgatatatgctttttcaactgtaaatttcaaggtaatataatatttaagttcataaaacttagaggtatttctatataaaaacacgttcaaaggttaacttttttttgattgagtcatgggtagtatgtttaattaactcaaacagtaactataactgtaatgaaaaaccagttgtttgatttgatcagaagattttgaagccttcagtgaaataagtctgtatgtcatgcaaagtttgttttccacagtacatagctcattaacctgcttaaaaatagtatagcattatggaattagatcattattaatgaagtaatttttaaataaacatattattacagttatttgtttgcagactaagacagaaacatgtgtacacatattcttaggtaaaatagtggttctttatatgaacttaatctctcagaaagaatacaaaatatgaagtgaattaaaggcagagaaagaacagagatagcaaaataagagaagaaagaagtatgatcagatgtgagaaatgttacattcaaaatcataaacttggaaaaaggtaaattcccagatgggttcctttaggacagaaagaaaaaagtgcaattataaaatggggaataagtggatatatacaaatattatagcaattgatttgaaattacaaaaaaatgagtaggagctcagtaatttagcatgataattacttgagtgggcatgaccgaaacatgtgagtgaatagtttagaagaaagaggaatataattgaaatattatgaggtaattttcctgttgttctcagcaaacatcagaattgcgagaagaattagtagtcatgtatgaaatgttagaaaagtaaacgtgaataaaggtttataaatggaggattttgtgtcaaaaggaaaaacaatttgataaaaccatcttcaaaaatagatgtatattcactatagactgcataaaatgggcttaaattgtgacttgtgaaattcagattattttaagaaaaatattcctgaaagtgaggactatagtgcagtgaggtggaatttaagatgactgtgggcttccttttctgatagctgtgtgaatgcatgtggagatgtggagatgggaaagaaaataactcaagggtcttttcaactctttgggcatcttataacagtgaatagcatgtaactaagaaactactaaaaatgagaaaatgatttttgaaaaaataacttctacatttttcattttaaaacataaatacaatagtttgtgttattcaatattgtaaactgtcaggtatagagccgtaattgtgtatattactttattattatttttctttgagtaacacttctgtgtcagtcccctactagagaaccttcacaaaactgtgttgacaaaaaatgm

SEQ ID NO: 96359 - DNA, 25612 bp, Homo sapiens
tcacaagtgtaaatttctttagttttaaatattcatacaagttctactggaagataaatatattagagtaattttaatatggtttaaactatgtaatgttaaataacttttccaaaaaaagatttcaagtaaaatgtatggtccatgaatagaaactatgttttatcctgtggtttcagacccctcctggcacaccaccatgtatcccaggcagtggagttggagaagttttgctgggagtggggagatctattacagtgcagaaaatatgtgactccccatcttccaattcgcaaacaaatgagcaacacacacatgcacaaggctacattatctagtatccagtaaaataaatcaaatggctaattacaatactacatttactatactgtcagtatctagaggccaggaattgtgctgtaatttgtgctctagtggcagacatgtaggaggtttgctgaatgaattactgaacacctagagttgactcctggataagcacactagggaaagctatggtctggttacataccacacactcacacacgcacgcagacacacagtgggtgagattcagtttggttaaaaatattcagtagctctgactgccctggcaatggtttacaacagccatttggtggcctatagagaaaaaaggtgcacttctcagtctaatttctgacaaaggaaacccagcttctactgagtgggttagatcgagggataaacgcatgacagaccactttcctgaaacttttatctttgaatatactgttgtttcctctctctgaatctggtttgcataactgactgtaacacctggttatgtatgttcactgccctatctcccaaaatttgctccctcaagggagtaaacagggtacacaatgctatatctacaatttctatataaactatgtaaaataaagtaggttaactaatatttctttaatattcaaatattggtatatagtttctacagatatatctatagattctacatggtctcaaagttaaagtttcgctcaacaaatcccaggcaaggacttaaattactttataatgacaaaatgtaggtaatggtgtggatacacatgtatcctaaaatggctacgcctataacaaggattccaaaattgccataaactagtcgtaagtatttttgctcattacaacggcataaaaagtcaaagattaggacttccattcatttttacatgctaattttattttttggattctgaggattttagctgattcattccatttgcagtaagacaaatgaggaggttcctggttagggctcaggttttagactctaataaatctgagttcaaatgtggatggtaacatttaacagctgtgtgatactgggcaattacttaatttctctaagcttcagtttcctaaagtataaaatggggttaaaaactatgtagaaattagaatgaagataaaaatcagataatctacaaaatgtgctttaaaaagtagtaagtcttgataattttaatactataatgcttgctgatccaagcaacatttaaaatataaatattgcaaaatattaacgagataaaaaggtgggaagaagcttcactctttaacaataagcaaagctttcaggagaatgaatgcaagcaattagtacacaataacgattcatcattcattcagttctgactaaattgtcctgaagtgacacatgaaaataaaccggcaggttttattcagtgactatggaaggtgattaagtgctatgctattgcacttaaaaaagagagaggaaaaaaaggagtaagtgacgaatgcaactgaagtatccttcatgcaacccttgacaagctgtgtttccctaggaaacaaagggtttacagctgcctatcttccacagcacttagtgacaatttgggacaatctcagcaaaaagaaatgagcagacaaagacgctagaagggctttgggatcccaaaagttaatgaaagaccaagtgtaagaagagaaataaagtaattccctccaagcctaaagtctctcccgctccaatgccccctgtaccctctcggaaaatggaaaatccctaaggagtctacatcattcctctgcccgttccccctactctcccccaacccttcacggattcccagtgaatacctggcctcgggcaagctccgttacctctgtgaaccagagaatcccagctgtaaaatgagatcttgatggtttcctgcggggttgccatgagaaagaatcaacatgtacgcaggtaaagcaggcaatacagttccagggagtcaaaaacgggagaaatcgtcccacgacctggggcttgggtctagatgaagagcacagcatcaggaggccaggcttctaatgcggcgcagtctacagcgctgtggactcggcaactcccatcacctgccgctgcacaaacaccctgcttgctgcccccatagaccgacccccgcctgacgcctcccagacccccccacctgacgcccctcaggccccccgcctgacgtcccagacacccccacgaccggatcccccagacccccaatctgacgccccacttcccctacttgactccccacacatcccccgcctgacgaccccccgacccccgcctgacgtcccagacaccacccatctgatcccccagacccccaatctgacgccccacaccccccacttgactctccacacaccccacacctgccaccccacgtaaaccccgcctgacacctcacagaccctaacctgacgccccacagacctcccccgcctcctgccgccacacacaccccaaaccccgccccgaacaccccccacctgccgccccacagattcccccctctgacgccccacagacccccaacgtgacgccctacagaccccaacctgacgtcccacagataccccgcctgacgccccacagaccttcccccggtctgttgccccacagacttctcgccgcctgctggaccacaccttccacttgactccccccacaccgtcaatctgccaccccccacccccccgcccctacctcccaaccccccccaacctcccccccctccacctgccaccccacacccttcccacctgacgtcaagcctgaagctcagccgctaagccggaagctggcgccagaagatgccggttccgccagctgctcgccgcgcaggcgcaggggagacccggggccttgcagtcaccgggctcaagcacgccggcgcagccaggctcgcgatgggaggtgggggggccggcagccccgtggggctgcggaggcgggacctgcaggatcctggttagggtcttgagtacacacggctcctattggcctcggcagcagatgctctctgcaagcagttgatccacacgccagtggattttgtctcgagggagacctaagatcactttgtgctctggctagtgatagcctctaattcttgttctctgtacgtaaaacagtggtaactatactgatttcgctggttgtgaaaactcccaagagagaacaggacatcctcccaactcaaaacgttggttgtttcatttaaacttttaaaaaataggcttttgcaaactatatagagctgtttttttttttaaatgatgtttgctactgtggtctcagttctcttaatacagaaataatacataacaatacataacttacaatatagaaataaaccgttgcatgaccagaaatcaactatggactcttctagtatctgtttaaggtttaaaaataaagttatttaacaaacctttattgagcacctattattatatagtaatggtgctagatattcagggtggagagattataaacaaccccagtttttgtgttccaggagctgttggtttccaccgaatttttgctgtggtcagtcctctttcgccatggagaagtgagaagttattcataaagaggggtggaaacaacttttagaactattttattttagcataaaatattgctttacaataaaataaattttgctgcagtgggccctgataaaacatattagagctgttaagtgcccttagaggttgtgtaatgtataaaaacctcctttttcaaaactgacacatttcattcagtgctagtttgtagcggaggttccgtctagcccaagaacattcagttatttacttcgtatgtctaattgacctaatatgcctgaatatctaaaatcatctgtgatgttgtaaagtctcatgatattgttttgtgagtatctgctcttcaatttagttatcaatttattttggaggaaaaatgaatagtgttaaggtagaggagcctccacttgcccatcttaggagagggtacctatccgtgtacatttgtagcttgttcaacctctactgagctcctacaatgtcagaagctggactttgtattagttacatgagaagaaccatgaattatgaaaccaggcaaactccaaattgattcaaagcccagtctccatttcatcatgttattttagttgattggttcaaagacaatcaagggtttttttcactaagtatcttctagagttgccatgattattaatttatttatgtaaatggtctactttatatatgcttggcacttattccgtgatcaagattaggaagctatgattcaagaacccagctttgacctggagctctccatctggtagcaagacacatatgttcaataacaacaacaccacaggccgggccagtggctaatgcctgtaatcccagcactttaagaggctgaggtgagcggatcacttgaggtcaggagtttgacaccagcctggccaacatggtgaacccccgtctctactaaaaaatacaaaaattaggccgggcctggtggctcacgcctgtaatcccagcactttgggaggccgaggtgggtggatcaccagaggtggggagtttgagagcagcctggccaacatggtgaaatcccgtctctactgaagaaaaatacaaaattagctgggcgtggtggcgcatgcctgtaatcccagctactccggaggctgaggcaggagaatcgcttgaacccgggaggcgggaggttgcggtgagccgagatcttgccattgcactccagcctgggaaacaagagcgaaactccgtctcaaaacagcaacaaaacaaaaacaaaaagtagcggggcgtggtggcgggcacctgtaatcccagctaggtcagaggctgaggcgagagaatcgcttgaaccagggaggcggaggttgcagtgagccgagatcacgccattgcactccagcctgggcgacaagagcgaggctccatctcaaaaggaaaaaaaaaaaaacccacagatttatgaaatatcctctgtatatataaaataggggacatagaataaggaaagcccaagggaggggaggcacacatctgtaaacaagtgtgtacacttcagtgcacaggggggttgacagcgaagctaatgaagcccaagttttaagggcccatttttgcgaacacttccaaggccttgagaggggccctaacgaggtgttcccatggtcgtgtacctcggtaaaatttgcaaaaataagacaattttacattatttttctttaaaagggctctccaaatggcacaaggttcaggcctcacaaaacctgcattcgcccttgacagtccactctcgtagaggtaaaaggagaaaaatagttatggaagcgctttaaatcgtggacctcattgcgacacccttaacaaccctatcaggcagaacaaattgctccgcaaacctgcggcttgcagagcgatggtggactcccgagctcatcgggtccggcacctcttcaccacggaggcctcgggtacggaactggagggagtcctggtgctcggaggagggtggaaggccaagatccctaggtcctggagcagggagccgggcccacgccgccgaggtatcttttccgtccgggccaccgtcgcgggggctcactggcagcggcttctgcgcatgctcggaagagcgggcagggttcccactccgggagcggagacggagaacaggttatgtgggagccggcgggggcatttgccggcgacacccgagcgggggccggaagtggggccacagctcgcagcaggagctccgggctagaccgtggcgccggcagcggcccctgggctggaggaggatgatgaggagcgacggaagcgacgcgggggtacgctgctgcgcggcgcccggtttcgtgcccgcggccgactgcgcagcctgtccgcgagtctgagtaagtgcggctcggggaccccgagcccgcggggcccgagcgccggtccgctccttctaggagggtcgcggggagccgccggctcctccaggcgggcgcgaaaccctcccgggaggctgtggggggagccccggggctagtgcggcttcccctgggggtcgtgcgggggccgagcgccgggggttgtggaggaccagcccggggtgcagccctgccggccgccccgactccgctcaccactcaccaggggaagcaaactgaagccaaatacctgttttggaaactaaggtgcgcgcattgccagaggctcgccgggtgtcgttttgtaattggaacctaaaacgtatcttagtgttctatgtcaattgtatttccagtaatgtgtacaaacctaagatccctaaaatccaaccctccgctcccccaccctcccacacagacatgaaaagtaaaatagaataattccagctactaggttggagagagggagagccccgatctaatcacgacagtaacaggtttagacctgtgaatatcatgacaggaagttctggggttattcaggaaacatcaaaaaagcaccccatacaatcgaagtcaattttgctgtagattttagtcaacatttaagtaaaatgaattactagtattactacccaaggtatcgaaaccaaaaaaaagtccgtccccatttaacaactcttatttatgtttactatgtgatagtaactggatagaaagagatgagtatattggctttgtgtgttgatattggatttttcactgatctcttttgacgggagggggttcgtggatcaatacttatttgtatgcatgcttagggaaatcactcgtctttgactaaaatatcaaattttattttactgtgtaagatttcttgattgccsatttagtgttaatgtcatgatatcctacctaagacatcagctgctcaattaaataatcgttaatagaggcccactatgcatcaggcactgctgcgtacagaaaatgtagagttgaataggacgaggtctctgtcatcgaggaactcacagcctgtgtaagcaggttaattacgctgtaatagtaacttctgccacgtaagtttgcacaaactacagaatgtggaatgggtggcaggarggaataggggtccaaggaaagctttctagaggatctactacctgagtttggttttaacagagaaagagtgcattgctctgattacttcctgtgttcagatacggtacctctagggaatcatatccattatttgatctaggactaatagggcttctagttgtccttactttcacatactctgctatagtacataattaagtaatttaaattttgtctcatagaagtagctgcacttaacacactattacattttatctcaacagtagttcaatttaatctttcatcctccttttacatacgaggaaatatatatttagagaggctaagtgagttggcaaaagctacctatctcttaacagaccatgacycaaaacactgtctcctttccattgcaccacactgcctcccactgacagttaacttggaatgattaaagcaagccaggtacctacaggtagcccttggcacactgccctcttcttgggcacatcaaagacctcttggcatgtggataagagggtttactaaccaaattgccctgggctaacaatataacttagtgataggtgcaggaaactgttggatctaacattttcccatgatctcttctcataacttatctcaggggaatctatttctgtttctctgtttaatgtattacccagattctgaaatctttctaatccttgtttagttgccccaggaaagtcttaagacctttaaatagccttttttcgtgtggacttaaaagatgctctagttcttctaagtaagatatttttcctcaaatgacagattttgtaatacattattatattttatgtttctgtttcacatggtgtgaactcctacaacagtatattctgctgaaatcccttgcaaagatgtagtatttccagtacagggactacatgcatttatgagctagcctgagaatctagatacttctagtaaggcttctagttgtacttactttcacatactcaatgttatataacactggttttatacaaaacaaatattctaagtttcatccatctagtttataggtaaagttttagaacattgcccatttataaattggaaactttgtgaatttcattatcagtctaacatcactacagttttaggctagtggatttgttttaaacatttcagatatttataatctcagaacaaattgtggttggcttccatagtaacaataatctctcattttacttctgccagagttgactctatttgccaagattttcaagcatgaaaaagctactaagtagctgcctggtataatttttgagctatctgctcatacagatttaaatcctagttaaagaygctgtctgaaccatccagttattatccagcatctccataggcagttactgttcatttgtcccataggactatkaatacacactttttcattattgatggcatgtgggtaaccattagggaaatagataattcattctgtggtgtctccaacaccttgatagcagctatttgtgtttccatttcagctgtgcagctggcatggtttcttaacttcccaatgcttaacagaagaggagagagattgatataagaatactgaatctgagttccacattacttcacatgtgattggaagctgtgattcacccagagtaattaatgagcccatggggtgtggggtcctcattctctgctgggatgtggatgtcggcattgacacacgaactccctttccactttttacagtcttcacttgaacctgcacattttttttaaatgtatgaacrgtttttatttttaaacaagctgttcccaaaattatcaatctaggatggacttaaagatctttaaagaaataatagtgcctttatgacttaggactttttaattgtatttgaaattgtttagccttttgccaaattgtttttyggaaattcattgtaattcactatgggtaatgcacttttttgtatttttaaaagaccatttgctggtggcagaatccgtaactcgatatacaatatgcaaaacaatgtacacttttttttttttttgagacatagtctcactgtgtcacccaggttggagtgcagtggcacgatctcagctccctgcaacctcgactcctgggttcaagtgattctcatgcctcagtctccctagtagctgggattacaggcacgcgccaccatgcccggctaattttttgtaatttttagtagagacggtgttttaccatgttgcccggactagtctcaaactcctgagctcaggcaatccacctgtcttggcttcctaaagcgctaggattacacgcatgagccaccatgcctggcccaatgtacactttttaattaaaaataattagaataactagaatttaatttgtagggcagttctgaccttcattaaaatacaatttttattgtaaaatgttatctatgatacaatagatttgtctaatttattctcctactaaccttacggcaataattacaatgtatttactcctatacttttgagtttcagttcttgatatatataagtttttatttatttttagtttttggagaaaatattactgggtaaaaaccttaaatatatttatatatgttataatgcagaaaggatttaaawaaatgtaatatatctttcttaatttgaagaaggcaagtctctggggcataaggcaatacagttatatggttaaatagtatggaaccgtggttctcaagctttttggtctcagaccgtttacattttagaaatgtaaagatcccaaagatttttttgtatgtatgtggattatatagatatttattgtgttagaaattaaaactggaagtttataaagtgtataaattaaaattggaaaactggaagtttataaagtgtataaattaaaattggaaaactggaagttttaattcatttaaaaatagcagtagtaagttcattacatactcacataaataaaattttatataaaacaattgtaattacaaaaaatagaggtgtgggattatatttttgtaattatctttaatgtctgcctcatagaagacaggcagattattaggctcttaaagtgaaacatgaagaaagtcaggctcacacaaatttgtagttgtaaagggaagagtattgtagtagagaattgtgggtactcgttggtacgactccatcacccaacaggaggcacttccttaaaggtcagttatattgtgccatctgaaacctacatcagagaaattgttgtctcttgttacatcaaaatctgttggtttgtagtgaattttttactcacgtttgcttgattttgtgacaccattcattggtcatttggaatatattggtttatggagttatgcagatttttccaaatggtgacatgtttaatattaatagattaccacagtgccatcaaaaaggtcccttaagtgtctaggagctattggcaacctcattcattttctagtaaatatctgccaaacctctaagtctgaacaaccatagtttgtcagttgtctttttaaataaaaatgttgttacctgaacaaagcagctagttcagctcacaattcaaatgtatttcaatacatagcacaaaatgctttatgtgcacttccagtgttgtcacacatttgtcacacaatgtgttaaaaagatgtgtacttgttagttgagataaaataatttttactgcttcttctttgacattcttaagtaaaactggattattccctcatttaccgtgagctcatggtgataaagaatacagtgactccaacacgtgaggccactaccttgattcttacaaaggcaccagcaattttacccatcattgcttatgcatcattagtgcaagtgtcaaacagtgaaaaaagtaaatgatattttagtattattatgagcataatactgatcttgtggaccccattagagggtcttggggaccctcaggtttctgaccaccttttgagaaccactggcatagaaagatctcagatttaatagagccctcaaagttcatccagtttaacagctctaaattcctctatgctatccttgccaagtatttatttagattatgctgaatacttgcagtttctgtgaataatcgtgctaaatgaataaaaataagtgtcacagacagctgtttgatggaaagtaatagagattcttaatcctggagttatgttttgtcctgcttttaaaacattgcataagtttccacttggtttctctaagtaatcaaccttgatgaaatccagagactactaaaattatgttgtgaaggaaagatacagctaaggttttgattttcctttgctatatgtaatracaattgtcatctttctttgatttttctttgtctkctctataattaaatgaacttaygttaggtatgtagttatttatatccatatctgtctcccgagtacctcaagagttgcttgaacgttactgagtagatcacaagctacttgagagcaaggactstatagtatactaggatgcattggaatctgatgaccatctcttacggaagaggctgggaaatcaactgtaggcctgcttcagtggtccacgctgggtttcacagctcccctgggagcctgcagtgatattctgaggactcataccattcgtagtgggcatgacttcaatattgatctctttttctaaagcatcagtttataaaatagttatttaaatgaaatatttttccttaaaaatggaaccattcgtgatcctatatgaacacaggagatgattagtagacatcagagaagcatggccatcactcatgcccttagytgacttaccatccagctaacactgttagccagcaaggtggtctgagagctttacagttctagacggctcttatttttagtctcaaattgtttattgtatacccgtcatggacttaaatttagagacagtaagtagggagcactagaggtgactacaaccagccaattaggaccataaatcctcaagatgagcaccatatattaaattgcatcagatgatcaaactacttatgtagtatagcaggatgtcactaatactgcaaaaccattcttgtaaaaggaaaacaatcatatctaatttatacagtacatgataataaagattagttatgctttcagtagattattttttgagacacactcactaatatcaatgtgacacctcaaaccacttcatttagaaagcacaaaagttgtttctaaggttgatttttttttcattcaaatacaagactggtacaggttataataaactgtaatacttaaatcttagctacatatcctgggtttttaaaaaatgtatttgtttacacatcatgctttttttgtgtataattagcataaagtctgcaaaacgttgggaagggagcaggatgtgtttagttttggataagtttgaaatatcagtgaagcatcaggtacgtgaggaacaggtaaaytgagattgtagatgaagagtagacttgtagattgggaataattcatacacaggtgtgataattggagccatgaaaaggaatgaaatcactgagggaaagaacatagtatcctaaatgagtggagaagaccttggaaaatgcctgcttttcggggtatagggcagagagaaacagcaatttgagtgtagaggagaagccaatagcagatgacactttgggggtctggtgttgcagtgtggattgagaaaaatccactagatttattttaaagtgaagtttacattgtatgagagatcattatgagaagtcagtcagcaagttctcagatagtaaatggttaaggagttactggcggtggttaaaaccacagattggtgggttttagaaatgtctgacatgtaataccagatctgataacatagcaaacagaaaattgagaaatgggactgtcaggtattcatttaagatgtagacataaggttaaaaatacatacaataatgatgtaaaagaagactggaagatgagaagttattgattatctacatttctatattctacatggaacaggtctaattggctctcctactcagcagcccttctagttggtataagtttgagtgtattaaatgcatcctttttcctgatttttatgatgccaagatgttatcagcaaatggatttcacatgcagaagaacccaacaaataatacatctcctctgaagacacgttttataggtgttttaccacatrggacatacttgattgcttcactcattcttcatgactagtagcagtggtcttggggtcaattggacattgatactcacaagacccagtataccatagtggwccgtactgtgcatcagcctttctgcttttttgaaaacccaacatgtcagtgttaggtatattgttccagatgatagctcaggtctagtggaaaatgacacaagggtgggagtgagcaccaccctggcttagctgcttcatgctccacaggaaacagtgtctttttgtgacagcatgtgagtatagcatccaggactaagcaaatgacaagccaattacaggtcgtattcaattcagaaaagcccctgtttatacttcccactgggcatgtttagccctgctcactgtcctctcagtccagatgtagctcatcagtaggagccatttttactacactgttgcttagaaacacagctgatatcccacctttatcaggtttccagggaaacagtgcaggaaggttaaggagaggtcattttttatctgaagagggagaaaggttttgttaaccgtttactcacactaatttattgacaaaatcaatagaaaacataatgctggctgtaggatccatgcagtcgactttattagaggcagtgtttgtttctattgactgtcataacatctgggtatgaagttgtttttacatctcagcagatggtgcatggtaattatgctttgctgatactttcagcaaattcagtaaattaaaaatccttcctgatattgttcacttgtcctggttcctttaagatcacctttgagatggaaatatatatcatacagactagggaacagagattattagcaagtggggttaggtaaaaataaggcaatccgtgagtggagttcttactctaaaccagcaatataagaatatgttaaggagaaaacacacccatacccacgcactccgccaccccagagcaatttttattaacctgttcttaaaaatgacttccatttgatattactcaagatgaatggacttttattccgacttccatagtgcaacaactgattgtgagattatgattgtttatcacaaaacagtttagttaatgtgacttttcaggaatgttttgtggaaaacggtaagtttatcccttattattcctagccagtaatagacccaaacaaatacgcccatttttctgatgttgttttaaacatatatgcccactgctcagaatactttttttaaaataaattgaataattcgtatatgtaattagattattttaaaaatgttttagtcgtaagtatatataaagtgctgtactagatattagagatgcaatagtgaaaaagagatatacaattcctagtcttataaattttaattcagtatttgctaaaattagatgttagaggctactaaaacgaaaataacttttcaaagttcattagttgaaaatttaactatgtaaattgatataaatgtaaatataagattcaaattttaaaatatgccttattcgtgtatttggagctattttatctggttttatataattttttaagtaagaactaatttgagcagaacacagtaagaaagtagtagagccagaaataccagtcacaaaagcaaataaagttaacatgtctgtaacatttatgaatgatctcattattaatcttacttgatactaatgaccagcctcataggtaagcattttaaaaactcattctactgaaaaggcaattgagactggaaataagtgataaatagttattcagggaggatgtgatactgtaataaaacttgctaccactgggtggcagtgttgatttctgggaaatcagaaaaatgttggtttatgctcaaaaaggttcagttcatttgaataataattcaaatgtaaaagtctatgtttagtgaaataatagaaaaaaatcaaatttgttaaatcatccaactcattatttgtataatcaatctataacctctttatagcagtttggtcagtgggaaagaaggaaatgtagtatttttaaaagttcagtaaataagcataagtagacgaatagtacataagaaaatttgtaacatatctcaattcttttgcctttttaagacaacatgtataaaccttttgataacaaaaaattctcttttaatagtttttactttctttatatcagttacatattttagtaatctttttaagaattgttctccagtgagtcattttactttatttatctctgtttctcagaggatttctgtgtatttgtttcacactgaaccctcaagtatttattgccttatcaatacattttagcaatctattgaccccaggacgtgaaacttcattaaagagtatataaaagatactgccgatctcatgacactagcaatatgatatttatttttaattacatatgaaagataaatcattaataattttcttaaaactaatacaatattagaatctagtgtttaagcaaattatttaagtttagtattaaaacttcgaggtagaggggggatacttttattctttctttccctagttgtttttttttgttttattttgttttgcccaactccttaccctagtttctttagtttttgctaccgtatgtgaaaaaaattgacaaagtatattagattggtcttgctatgttggaatttctgaactgccttttcagtacagtttgccckggacatacgtaacctaacagcagatgtaccacaatctctagaatcatgcttgtttgcctcccagctcttctacattgagaagcagatgatagccagtctacttatgcccctgagcttctgttttctcattaaaaaaaaaaaatgacactatcrcatcaactttttttgggtcaaatccgtgagaacacgtatatgaagaataagcacttgttaaaaatgagttaatttgaagaatattagtgtttcctaaatatgacagtggagggatatggtagaaaggaaactgttgagaacagaaaggacaagggaaattatagcagctacttttgtggatggactgtacctattaccatatttaacaattacatgtggcctagtaccatagtttattatattgtggatttttaaaagaatagatagacgttgaattattgatattctccctctctctctctaggatacttacagagagctacaatggaaaagtcctggatgctgtggaactttgttgaaagatggctaatagccttggcttcatggtcttgggctctctgccgtatttctcttttacctttaatagtgacttttcatctgtatggaggcattatcttacttttgttaatattcatatcaatagcaggtattctgtataaattccaggatgtattgctttattttccagaacagccatcctcttcacgtctttatgttcccatgcccactggcattccacatgaaaacattttcatcagaaccaaagatggaatacgtctgaatcttattttgatacgatacactggagacaattcaccctattccccaactataatttattttcatgggaatgcaggcaacataggtcacaggttgccaaatgcattacttatgttggttaacctcaaagttaaccttttgctggttgattatcgaggatatggaaaaagtgaaggagaagcaagtgaagaaggactctacttagattctgaagctgtgttagactacgtgatgactagacctgaccttgataaaacaaaaatttttctttttggccgttccttgggtggagcagtggctattcatttggcttctgaaaattcacataggatttcagccattatggtggagaacacatttttaagcataccacatatggccagcactttattttcattctttccgatgcgttaccttcctttatggtgctacaaaaataaatttttgtcctacagaaaaatctctcagtgtagaatgccttcacttttcatctctggactctcagatcaattaattccaccagtaatgatgaaacaactttatgaactctccccatctcggactaagagattagccatttttccagatgggactcmcaatgacacatggcagtgccaaggctatttcactgcacttgaacagttcatcaaagaagtcgtaaagagccattctcctgaagaaatggcaaaaacttcatctaatgtaacaattatataatgtttccctttttgattattgcattgtattttaatttgtgcagaatgataaagaatgttccttttagaagtgtgttatgtctgtacctgtctgaagagtgacattaaactttgaaaggacttcactgctcctttacgatattccaaatagttttttacattggaaaaactgtaattcttgggattctttcatacattttcatcaaaactttcagtgtgattatgtattcatatcttcagtttaatatgtcagtataatagatattgttcaaaagtttcttgttgctaaagtggtgtaatctgttacacagatgaatagctagatgtggaaagagatatgtaaacaagaaacctttgggtattgtttcttaagtaaatattgggacaatcatggtaagcaaacttagttctgtaactgcatttttcaccttaaaagttaaatgaaatgcatgatggtattttattccttgaattatgcaatgcaacattttacatgtaaatagcactggtcatatactgatgtatatggttatctgggttatatctatttttatgtaaactctattttgtttttggcaagaagtgaaattgagacttatgtgcaggttgccattgaattttgctctggtgaatgctgagatccagctttttcttacaaataaatgggaccctgttttccaatacaaatgtaccgtgtttttgttaggtacagtctggatcatggcatgtagaaatagaaatttagaattttactgcagctttgatgtgcatatttgaactttttaacatttgtaactttggtggcaaagagaattttagcttctatcgattttgtaagtcttcagctgaaccactaatagcagtcatagtgaagattagcactacttagaattaaattaggaagtcttttatcattgcaggattgtacatactactttataaaaattctcacctttgattttaaatcccagtacctagttatatctaacctatcaaaggcaagatatcatttattggacttcttgaaaataaaagttacaaaatccaacaacaacaacaacaaaacaatgttcttggttttaatgttccagttgctgtgaaatagaactcctacaatcaaaagacagttttaggaagtcttatttattgattttaaaagttttacatgtaggagtgtgggaatgaaggaattctggagctttttgacacaaaacctattaccacatttagcagttaaatggctataggtgggaagtaggatttagatgtatagaaaagtaagaaaatcttacttagaaaaaagccccttgaaacttgcaggatttacttaataaaaatacacgctatgagtcataattgtgccaagttgtttcatgcagtcctcaaaaattagatgtaattgagctttgtgtaatattatgtcagctttaacatataatattttgaatattttagctatatttagtggctttctgcaagcaactagaacagagaagtaatgggtcmataatcttgaccttaatttaaaactttcaatggagatagggctagaaatacttttgccaaatagcattcttattcactttatgccggtatttagaaaaaataaattatagcaagtatgatttctaagwatgtttttctataaattactaattgtaamaagtcttgctttttaaaacaagttggtaatgcatatcatggaaggcatattttgtatgtataaattcaccacaattaaagattattcttgtcagtccttgctatgtagaatgactattctaaatattaatgtattaaaaagaaaatacaacaaaatgtatatttagacacgagcttacatggcataccttatatttgtatcattctttaaagtttacaaaaaaaaaccttatgtttttatgtaatcagtcattacactagggagaaatttatcagctttagttctaaatatgctcatgaggtataaaagctatttcttcatcagtattttgcttttatgctgctttttctttttgatactccaggtttataaactatcttttaaaattttaagccaggacttcaaaaattgtagagtacttgtttggcgttccctaccttcattctcttagggttaaggagcctttctttctgcagctaagggcagaggctgtgcctagggctataccaccactagcatctgtatttgagactgtttccttagatgggtaagaggtggaaaacaaacttagtatcaggggtccatgaagcccatggcatcatttttgaaaatatttctagttttgtagccaaagcaattggttttagtaaaatgagacttcttcaggagtcactcctttactgtggacccattgcttagtgggaatggaagtatatgtatctatcttgtgtattaacttctgacttatttatacaagagcagctataggagtttacaaaagaactttaagttattaagttactataaatttggggatcctagagtgatcttaaatatggcaagatacagctcatttagaataaaatctcacatccattattttaaagggaatgattggggggaaaaactggtgaaaaagaaatataaaaaggaccctaaaaagaattctgcaaaataagagaagaaataatttgtgacaggtaatagaatactagtaggatagaaacaactagaaaggaaagtgtgacacagtttttaaatttagatgtagaaaataatgaattaatgagattggtgaaaggaaatcatgcaaaacatttgaatgcaaagcatttctaacaaaaagtgactggagcacttgccattgcaacaaccctgtttttgcaattaggtttttgactgttaaaatggatattttcataaaaatggtgttctgaattttgctacagggctgcttaaatttatgattacctgtagacacttgatatttacatagattacagctttggtaatatgtcactggagtaattacgctgtaatacctgttgagaattcataccatctgatgcttatatattaatttcttatgtttgtaagtttggctttgtgggaataggtgtggagaaattaaagagtgaaggccatatttcattttttataaattatctttcaagctcagatagcttaagagcagtttatattaaggagacccttttctccttgaggatagggataggtaaggtaaacttgtaaaaaggatgtcacagaagtcactttttaattaagtcatgattgagatactgaactcttccactcattcttctttcccattttcctattatgtttgataattatatgtatttttaaaaactgtgagaggaaaaattagtcataacccttttgggttatccacttaaatttaggtattttcatattactcaggtaaagatggaaatgacagagcacagacatttattttttaaattgatagggtagaaaatgaaatgtacttctgtttattcttaatactatatatatatatacacacatagttttagcaaattggaaataatatattcatttgtatggcaagataaatgcagtcatcttaatactagtctatacatttttgccaaatggcgcaaatatacctccatttatattttgtatcttaaaatgtagtttaaaaataggaccatgtatgagacacttttttacaaaaagtgccgtatatacatatgtaacaggtgagtgtgtgtttaacataatttataattatttctgtcagtacagcgtatatggaaaattcaagttgtttttaacatattcaagtatgttcagtataaaataagttaatcccatttcataatgtaaatcatatttttgttatttgccatattttatttgaagtgataaaattttataactcaaatttgaatgtcatagtacattgtgtgctaaccatggcaagcaaacatttacatttgttttttacaataaatttcttttaaaatatactttctatttttctgtactgacatatgcaataaattggtacattaaaaatttgattaatgtcttcagatagtttgtattcagtctttttttaaaaattgttaatctagaattttatggtaggacattaaaatttcttcaatggttacgtaaaattcctgaatttgcactgaaattaatgaattttattctagtaatggtgtggataaaaaatagaagttagatttatatttccttccccggagagtattatcctcttacatatatttaatttaggctaatattaaaactatacataaaccactggtgaatgactaatccctaatgcatttctttagttaattgaatctaggaatgaatacattttaacttcataattatgttgccttcagatttcataaaatgcttttttttaaaaattctgcttttccccccctcttgtttgtattttagttaatggtttttaatgatcaaaaaatgacctgatactaactcagcctttaggggcctataccttgcttttcctaacaagaaatgtgcatgcttgaatatgtcagaatgagttggatcataggaagtgtaagatgaatcttaaatggtcccctgaaagggaagatgaagaattcacgtattggagcccatctttgtatgggtagatctagtgggagctagggtctctcatgtactaccctgaaagatagccaacttgaatcccagggtgaagtcatttttagattactatttcttaaatttgaaagataagtttttttcacattcccatttcactctccaactctttcattacattctgttacatactaaaaagcatgaacaattagatctggctagagactataactcctatcttactaaggggagaggaaggtaaagaaattttttgagtattttcaaatataaggcccaggtgttgaatgtgttaatgtcattgaatcctcacaacaaaccttagagtgatttgtagtcccattttgtaagaaatggctcggagtggttcagtaacatgctcaaggttacctagagtgaaccaagatgtcaatccaggtctctaattctaaatcgaggacagctattcatttgctaatttacccaaacaatttgaaaattttgttcatgttggaatagattagaaatattgaaatgggttacaagttggtcagttatttaggaatccaaaagaattggctgtgaattgaaataagtattatacagtaaagtacatgttttcaaagtcattaaatgtgtgtttctataggaaaatctagataagagttatcctctcaaaaaatcttggagttgtctttttgttcctgatattttgaaacacatcttgctgtttttccaataagatttattttcccaacatttccactactaccatactagtccctgacattatttcatagtagtcaacatttttattgggtgatttttgtgttcaaagtattgttctgactcctttttgtcgtttattcttaataactgaatatgaactggatcattgccccattctttgtaacttaccagaaaaactccttatcattccctatccagtggttttcagtggctgcatttctcagtagatcaaagtcagagttctcattctatggggtcctttacaaactaaaccttgtaaagggtatccgttctttctctttcttgaatcaaacttactcctcttctgtgcatttatttatatctggtgctttaacctctagatccagtgcctccctcccacctctctaggcctctgagtccctgaccaaatttatggtagctctaccagtagcttttttttttctttttctgaacacccattgcattcaaagcattttgtattttgatacctgattatattcaattcatttctttataatatattgtcttttgatctgacaggaatgtcatgtgattcctgtcttacatggcacctggcacagtgctgagcatgttgtggtactagatacattttctgtatagaatgtgcacactgattataaagtttgtccaaacttccatctttaagaagaaaggcacgaaggccattactttaatactttacatttcttaaaagtttagacctaaaatagcaacaaacctggaagttacacacagcccaaagcaataattaaagtggaaacattggaagttacccgtaattacacgggtctgcagaaaataagaggggcaataattgtgcaggtcgtatgttccctgagggctccttcttaagcagagcagaagagcctagtaacagtaagctcagggaggagaggagcaaagagtacagatggtggatgtgaaacagagatcagtggagatcaacaagtgtggcagtatcaagtagatctgttggataggacaagaagaaccagaaagtcaggtgggcacattagtggaagggcaaagaagcccttgtcgtgggacatccagtttgggagatagtgactgtccccagttttgatttctttccgtaattttttttttttttttttttttttttttgagacggagtcttgctctgtggcccaggctggagtgcagtggcgggatctccgctcactgcaagctccgcctcccgggttcacaccattctgcctcagccttccgagtagctgggattacaggcgcccgccaccaggccggctaattttttgtatttttagtagagacgcggtttcaccatgttagccaggatggtctcgatctcctgacctcgtgatcgcctgtctcggcctctcaaagtgctgggattacaggcatgagccaccgcgcccggcgtcttttaaccctgtacccatggttcccttattaaaaatttatcatcatcattactttttaaacaaatgaaatgacacagacagttgaattaatgtgacactggcatttttcttagccttttgttccagagcctatttcttgaggtatgagtgagttccaggctcctctatgcaaagagcatgcatgtctcaaaacacaggacagactgcattagggagtgtgtgggaagggcaaaatctctggagacagtaaatgctatggaatgactatttgtgctctcccaaaattcatgtgtgagatcctaatccccaaagcagtggtattaggaggtggggatttgcggggcagtgaccttatgagtgtggaggaatgagggctctcatgaaaggaagagggctactcctacctctctctgccatgtgaggatacaaggagatagctgtctaccaatcagtaagagagcccttaccagacatcgggtctgccagcaccttgatcttggactttctagcctccagaaatgtgagaaataaatttctgtttaagccatttagtctctgatacttgttacagcagcccaaagtgagtaagacaataaacaatcctaattctttcttaaaagtggccctggagatgaatgagagctgatttaatagtttttctttttattattattattattatactttaagttttagggtacatgtgcacaatgtgcaggttagttacatacgtatacatgtgccatgctggtgtgctgcacccatcaactcgtcatttggcattaggtacatctcctaatgctatccctcccccctccccccagcccacaacagtccccagagtgtgatgttccccttcctgtgtccatgtgttctcattgttcaattcccacctatgagtgagaatatgcggtgtttggttttttgtccttgcgatagtttactgagaatgatgatttccaatttcatccatgtccctacaaaggacatgaactcatcat

SEQ ID NO: 96360 - DNA, 39500 bp, Homo sapiens
ttgcaatgaacatatgtgtgcatgtgtctttataaaagaatgatttatattttcaggggtatatacacagtaatgggatttttgggttgaatgttatttctatctttctatgcttccaccaatagcctataagtgttcctttttctccacaacctcgccagcatctgttattttttgacttttaaataatagtcattctgacgggtatgagatggaatcttattgtggttttgatttgcatttctctaataacctgtaatgttgagcattttttcatatgattgtagccaaggctgttaaaggacatgctgccacacacctgaactccctggcaattgagatgataaaatcctgaaacaatagaggccagtgggcagtgccaaccagacaacatttattgtaacagaagcactaccaacccagcagatgagataacttagctgaagaccagaccagcagagagtgagggaaatctataatggatggtagagaagagagggagagaaaaggtgatgactgtcagtttggccctgaaactatgagcagtggagactatagttcatttgactatcctttctcttatcaagtttacccagggaaagatggcaaccagaatcctggaggagctgttccaagatggtgtgaactgattatagggagcatgtggatccaaaaggcacaacaggtgaactgtagccagtgctgtcatgtacactccaggttcccccttcacaaatgaggcactcactctcccaggcacctggtgtattagaggctgataacttaaagtctgactccattctctctctaggaattgacttcagccaaagcaaattgccttgcctaaggttaagttccttcccaggggcagctgatatccgatggctggttgaggagggagcacaaaagctcagctaccttgcctcagtttggaataattctgaaaggccatcaagagttcactgtgggatccgctgagccctctgttgcagctatgtcaaacttcaacttctccctttacccaatcctgccgccctcattccgtttcaggatgctgttcccaagaccacttcccagtaaagccccttcaccaaaatctacatctcaaagtctgtttctggggaaacagagtcccaaagaagggtatcccaaataagtcattggaaatcaataccaaggagaatgaaaagttaacaagtgcagtgtaagctacctggattcttcagggggtgcagtcaaacttattctacttattgattagggtctcatttgttctactaggtattagggaaaaaacataaatattattttgagactggtaagtagggacttgttttactagtattcaaatatcactagcacatgaacagtcattcctagaagccagtctaatacaccagttaatatttaatcaaattaaaacacattttgtgcatgagtgagttcaacaaactataaaggcttcttacctcccaaacctcaggacgttgtgtgattttatgtatccgaaaatcaggaagattcttttgtaaatagtctgccacaagttctgttttagcataatatggacaatctgctctacctaaaagagttcaaattagcaatgttttctttcatcatgcagaaattattatgtagttctaagtatttgctatgtaattacagaattagtcatagttatgatataatttgataacataaagttgcagtataaactgctattacataaacttctgatgtttattagattaatacaaataaaataaacttcataggaggtcagaatcttaagtaacaaaatgtggaaagaaaaaaaaccctactgaatatttattcttttctagtaatatgctagacctcacttcctctaggaggctgctaactactactaattcagcatgaattagtactgataatgaactactcactaatggccaccaaaaggtaaagtttgaagtgaggagtggtggtaaagtcacttttggatttgatgtgtgtcaggaagttgtgggggtgggaaagaagaatctgggataacttctattttccggcttgggcagatgatgctgaccttaactagagaaaaatcatgaatgagaaatttaactttagtcaagtgcagttggagatacttgtagtgtgtctaagtggatatgatcagcaagtagctggatatatatgtatatgtatatgtacatgtatatgtatatgtatacatatatatggggtgcaggtgccatgtaagggtttcagacacacaatttgtagccatcaacacccaggaagttaaagccactacaacagatggaattgggcatctgatagagcaggagggatggggaaaaatgcagagccctctctgtagcattcttcctcagttaagataacttaactcctaagttaccaacctgtctgaagctacccctgtctatcagccaccctgtctagttcaaatctatggttcatctcttcaaaccactttctggtccatgtcttaaattatctttctccactatccttttgggaaatgagcctgataaaagccccttatcctggatgaactcaattacttgccttttctgtagctgggtcctacctgctagccaccactacagaaacattgtagaaccaagcggagggcacctttaaaattcatggtcaccagctttaattggccctcaaccctgcgtggagatccctctgtttcccttatcagcactctcttctgttctcctcattactattccagtctttttcctcttcctccaaatcttttccttctccccaacattcctctgcattatcagaacacaacagacaactttgctttttactttacaaaaaccaacccaaacaaaacaaaatggcattagtttggaaaatctccaacctcgtccatcacatctacatgcctgtctgtacttggactcatcctttcctcctttcttcatttcaatggaagaggagtcctacctcctgtctaatctaatcccaccacttatgctctgaatcccatcctcatctgccttcataggaaccttgcttagttaattatcctctctttctagagtcttgtatctgtttctaatagtccctttctgtcatatttaaatatactcattacattatgtttctcctgtcctaagagacaaaaaactcatctccccctctagctattgcctttcgtatgtcctttttgatcaaaatatcttgaaagagttccctatatttgccatcctcagttcttcacttccatttatttctcatccactgcaatgtagcagaccccacaattctcttgaaggtcactgaagacttccatgccactaaatccagcagatactttccgatccttttcttgttgacccttggcagcatttgccaccactgcccccttccaggcttttgaaacactgctatagtgggggcattctcccagttctcctattctatggtcactcctttctatcctttgtaggtttccattcctttatcaacccattaaaaggtatcattctgagaagcatcttgtctttataacttacatattctttttggccaatctgcttcattcccttggcttcaagtagcaatctatatttccagctcagatctccttatctagatgcctacaccctcctgtattttcccatctccttcaaaatgtctcatagacactcagaaggtctatgatgtattttgtcaccattcccctactaaatgtgcttagtcgcttatatttattatgtccatctccctaattatctaagagtagtaagagtatccagagtattaaacctactcatccgcttttttttttttttcagtgactcctaatctctgcaattattcaaacctctgcttgggaacaatgtttaactcctttttctcccttatctgccctcctccagtcaattagacatccagttctatagattctgcctccctaatatctctccaatccattcacttctctccatctccattgtttgccactctaggccaggtcacaatcaactccctcctggactatagcactagtctcctaactggtttcttggtatccagtctttttgtcccacactatagccgtaacattcagataaaattcagatttgattaggccctcctccccttctaaaaacctttcatgtactctggataaagtctaaactactgaatgtggctcaaaagaatctacattatctaactctagcctcaccttatgaaattctcttccttgtactatttgcttcagtcctaataaacttatttcaattttatacttattttatattctcaattgtcaccaaactagttctccttgctctaaccccactcccagttacccatgcctaaattgctcccctcctttctacctcttctctgttaggtaattcattatcatctttcaggtatctgcttaaaatctctccctctgggaaacccttacctgattaagtaaggtccctgctatcgttcctatagaaccctgccctgtcagtgtcatacatgcaacattctctgtgtgttttccactgacttcccaccatgtggttagtcagtgttcaaaaatattcttctgggccaggtgtggtggtgcatgcctgtaatcttggcactttgggaggtcaaggtgggcaaatcacttgagcgtaggagttcaagaccagcgtgggcaacatgacaaaaccccatctctacaaaaatacaaaaattagctgggcatgctggtgtatgcctgtagtcccagctacttgggaggctgaggtgggaggatcgcttgagcccaggaggtcaaagctgctgtgagccacgattgcaccactgcaatccagcctgggtgacaaagtgagagcctgtctcaaaaaaaaaaaaaaatctcctgtggatggtagatgtcaattgtgttcaatgcatcaaagagatcaaataagtcaaagactaaacagcttctataaaagtcagtggtgactttggtgacagcagtttctgtcaggaagcagaagtagaagccttcttccaagactgattggaaggcagaactggagatggaagagcagtctactcttttaagaaactttacgaggagaggaggtaggtaccatggattgttgtaataaaagccttctcagttgagtccttgctgtcaaccagcactttcaatcattctctccgttgctgccaagacaggcttcctaaaatgcaaactcattaagactactctcctgcttaaaatttttctataattcctcattgctttcaggatacagttcaaacacctttgcttgacctacatgaaatgcaaggacctggctcctgctcctgttgtagccccaggtcctgtcacgccccacatatccagatcttctgttaggccaggaagcttcctgcctctctgcttttatttggaatagcctcctcagctcacaccttcacaactcagctcctgtaataccttccccagccagttccttgtgtccacctctccctcatcccccaaacccagattaggagtctacgctcccagaggcctgtgcaggtctccttcatcgcgttaatcacaccgtatcaaaagtacatgttctgtgccccatgagactgaaagctcctctaaggcagggatatgtttccctccattgcatccccagtgtcccacaatgcttggcgcaccgtcacggtccagtaaaaaactttgaataaatctatagcaaagcatggagcggtccgtatagaggctgccaagccgagcggccatgggaggtgagctgttgtcggcgttttgagcaatctgcgggcggacgcggggatcactcacccgcgatgacgaatttggccatggtcgagagagactcagaggcagggaccgcggcttcgcggtttcctggcaaccacgcagccaagggcaaggcgcaggcgcactacaaagtctggcgcccagcagaggttaggtgtttaaagttaggacctgaatgggttacgttgcgatacacgatcaaacatcgcccttataagctctgtggtatccccgagccccactcctgtatgcagggaaattagtcattctccttggtaaactttcttcaagtaagtccttcagctacagccgcgaacatatgctttttgacctttgagggaatccgtaagatctcgtgagaagcgcagcttctcggggaagctgtyatggctgctcctgtacgtagtyacggtcttgtgctctaaggtgagtggaggacgagcttgggcttagcggcrgcccgtatcacatcctagactttttacttcgaggagaagagtctcacgagttgtcctggaagtaagtttaaaggaggtgggttaatgctgggcggcccagctgcggaaggacaggctcttgaagttggttctggggtctggtgaggctggctggttgtataagatcttcctcttaagcgcaggccacgtgcagacatcgctttcgttttctgcttcttccactgagccgttctacctgcccaggtccctattcttgatggtctgggttcggccgttgctaaatcgtcatgttgaaaatgatctatcagccgggcgcggtgactcacgccttgggaggccgaggcgggtggattacctgaggtcaggagttcaggaccagcctggccaacatrgtgaaactccgtctttacaaaaaatacaaaaattagccgggcgtggtggcatacgcctgtaatcccagctacttgggaggctgagacaggagaattgcttgaacctgggaggtggaggttgcagtgagccaagatcgcgccactgcactctagcctgggggacatagcaagactttgtctcaaaaaaaaaaaaaaaaaaaaaaaaaacagagaagagaaaagaaaatgatctatcaatgctaatcccctaattttcaccgaggacatttccataacaatgccaacaaaagtctctcctacagagaaagctttatggaacgcttttgcaccagaaaaatctcattaatacaatgactacttccaaagtgacctggcttctttgaaactggacacattgtggtagattggagggagcccacattggtaaaaaaaacttttactgttttatgtaaatgtttaatggctccataggttccccattttctcttctgttaaatgcatttcatttctttaagtaaaagttttgttttaatttttattcttttcattacttcttcccctacaggaaaacgacagcacgtgttctttttcactagtagaagtgacgttggtttcatgttgacaactttgaagccatttggaagtgtttcagtggagarcaaaatgaataacaaagcgggctcctttttctggaaccttagacaattcagtacattagtttcaacaagcagaactatgaggctatgttgtttgggactttgcaaaccaaaaatagttcattcaaactggaacattttaaataactttcataacagaatgcaatcaactgatatcattagatatctctttcaggatgcattcatttttaaatcagatgttggctttcaaacaaagggcataagcactctaacagcccttagaattgaaagactactttatgctaaaagactgttttttgactcaaagcagtctcttgtccctgttgataaatctgatgatgaattgaagaaagtaaaccttaatcatgaagtctccaatgaagatgttcttaccaaggaaacaaaaccaaaccgtatcagcagtagaaaactgtctgaggaatgtaattccctgagtgatgtgttagatgcattttcaaaagcgcccacatttcctagtagcaactatttcacagcaatgtggacaattgccaaaagactgtctgatgaccagaagcgctttgaaaaacgactgatgtttagccaccctgcatttaatcagctctgtgaacatatgatgagagaagccaagatcatgcagtataagtacctactgttcagtcttcacgccatagtgaagcttggaatccctcagaacactattttggtgcagactttgctgagggtgacccaggtaaaataaaaaggagatttaaacatgcatttacttgatttagaatattttgaaagaatgaagggatatagatatgtagccttcttaaaagagactatcaaatggaatggtagtttcctttatatttatttctgcatatatattatatgatttagaggccttaagttagcdattttcttccttttgctatggaaatttatgaaagccttccacatttaccatccccagggttgagtagtggtgaagaagctaaagtgaggagagatgcaagatatacaaagaaagcctgggtagttgaagaaggagagaagggaaggggaaggaagagaatttagtccatggtagaattggaattcaggcccagtagatgatacctaaactgatgagcagaatgatagtgaaggggatggtgtttcaagtagagaggattgcatgccctactgttcccagaggaaaagtttggcaaatttgaagagctgaaagtagtttggtgtagctgaagcacagaatgatggagttgtatgtttgagtgggtgggaacaagttttgtacatggcgatcaaaggagaggagtgaggggcaagaggcttaggggcagaacaagaggccagaaaaataggaaccaaatcataaagagcctcttacggctagctaaggagtatgcatttatcctgtaggcaatgggaatccgttgaagaattttaagcaatgggttgacgtgctcaaatttgtattttagatcactgaatgagtggaaratgtattggaagaaggttaaaattggatggagggagccatttttagtctraagcaagaatgtcagtgtcctgtttaatgtcactgaaatggtgccaaatgtaaggaaggaaggattagcttgttaatcatttatgttttaagagtgtacacttctgacgtataaactcagtgataatgaagtaatttcttagccaggtgtggtggctcacacctgtaatcccagcactttgggaggccaaggcaggaggatctcttgagcccaggagtttgcgaccagcctgggcaacaaagggagactccatctctacaaaaaatacaaaaattagctgggtgtgatgtacttgcctgtggtcccagctacttgggaggctgaggtgggaatatcacttgagcctgggaggtcgaagctgccgtgagccatgatcgtgccactgcactccagcctgggtgacagagccagaccctgtctgaaaataataataataattttttaaaagacaggaattccttggggataatctggcatatatcctgtcttgctatagaattcaataattgggttcatagctatgggaaagtttttaactttttacattactgtgatttccatatgtccttaaggaataactaatttttatttagtgtatgtgtgtgtatttgtttaaaccacagaatatccctgtttatttgtaggctgtgtattagttcctatgtagttatttaaaagtgactaataaatcaccttacctggtcagtgatgctcttactagattttggacagatatttgcatcgggatgacatctgtgttggtgaggtatgagtagtagatttttgtagtcaaaacatctgtatggatgatggtgtctcactgacctgttggaataatgtaaagacattttagaggtgaaaggacagtgtgccatcaatgaatttgcccttcaaacacatagacaagtggtcttttctttcatagtagatatggatggaatgctgtaaaattgttaaggaaaccctttcataggaaagaaaccttttttttcttctaaccataaccatttcttattattacctggttctgacttaagactttgtgattcattggttatgtaattttagcaaaagagcttctctctcttcaggctaagtttcctcagatgtgattttttgtgaggtttatagactagtgattaaactgtagagtactgctagttaagctgtgttgttactattcactttccagattatgcccactatttctggaatcaaacttagtaccctaagkaaagggacctgaaagaagaatctgtggggtgtaggcttcccttgagacccagatagcagtggtagaatgtggcaggagatgtgaatcagaagactcacaagtaaagtttcagcttgatacccaggaaaggatctagggaaattgtaaaggcacaaccatttaaggatctttagagatgggctagttaccttctgtacttcagtagttcttatattcctgcactttaactgtttttgcctttgtaatgaccttgaattccaagaagaggtaaaaataatgtttaataaaagttgtttcagaagcagtggaatataataaatatcaaatgtgttttcagtgataatggtgaaggtaaaaaagtgttgatgcataaaaggatgtgtatcagtcagctggaaaattcagtaagtatgactttttatttcccaaagatgctgtttattgtggactgactgtaggaattgttggtttgatactcaatcgttttattcagtacatcagttcagtggttttgcttgggtaagatagtttactatgggctcatcacctgtagtgtttttgtaattatatttcaataggaacgtatcaatgagtgtgatgagatatgcctttcagttttgtcaactgttttagaggcaatggaaccatgcaagaatgttcatgttctacgaacgggattcaggtgagaactctcttatgctttcttcatgtggttttctttrttcctcatatatctggaataaaaaaattgagatgaaaactaaactcctttcttgaggggaggaggggttggggaggctttgttggtagttacagtctttcataccttattaagcttaaaatcctgactctggatgacataggctggaaatacttctcttagggtccataataacaaagatgtgagtaacattgaaatctaaattaatttattttaaaacatagtactggccaggcgcagtgactcatgcctgtaatcccagcactttgggaggccgaggcaggcggatcacgaggtcgggagatcgagaccatggtgaaagcccgtctctactaaaaatacaaaaattasccgggtgtggtggtgggtgcctgtagtcccagctgcttgggaggctgaggcaggagaatggcgtgaacccaggaggcagagcttgcagtgagctgagatcgcgccactgcactccagcctgggcaacagagcgagactctgtctcaaaaaaaaaaaaaaaaaatagtactgatgcggggtaggagagaattgatatgtatatttaattcagaatagttattcggggactatgtgagggttgacgttgacccagcttgaaaagggatttataaaattgatataaatkatctaatgtcatagattagtgagagtaaaacttaactccctttgacattgactatgcataggatatgttactataatctcctgacataatttgttctttagtaaagacagcacaataatgtgagagaaaatagcactattaatagattgggtctcgatctttaactacttacactctctcaagcaggtagatcatttctctgggcttcataatccttgcctgtaagaaggggctggaccaaatgaaattttaagatttttcttctgctttgaagattctatgattttaatatttattgtgtttgataacagaatactagttgatcagcaagtttggaaaatagaagatgtcttcacattacaagttgtgatgaagtgtattggaaaagatgcaccgattgctcttaagaggaaactggaggtaaacacatgaattttctctagtggatgagatttgaaaaaatctttcttataacctgctatcactgcctgaagtcaattttctaggaggacattgctgggcttttaggtttagcttcactaaagtgaatgaatagaagtacccttatatttatttatctgtatatatatacatgtatatttatttatctgtctgggtcatattacccaaacttcatcctttttgtttaaaaataaatgtttaggccagacatggtggctcacacctgtaatcccagcactttgggatgtcaagggcagggagatctcttgatcccaggagtttgagaccagcctgggtgactgagcaagaccctgtctctgcaaaaaaaaaaaaaaaaaaaaaaaaaatcaaagaattagccaggcgtggtggtacatgcctgtaggtggtgcatgcctgtaatcccagctacatgggcggctgaggcaggaggatcacttgagcctgggaggttgaggctcyaacctgggtgacagcacaagaccctgtctcaataaaaataaaagtttaatttattttgtcacagatagtaaattaaattaaaatttgttttttctttagatgaaagccttgagggaattagacagattttctgttttgaatagccaacacatgtttgaagtactagctgccatgaatcaccgatctcttatactcctgratgaatgcagtaaggtggtcctaggtaagaggaatttttctttcatcatttgcaatacctgagcttctgttttagactatttttgttttgttttaaaaactttgcttttatatgaaaaaagaataaagcatgttgtattcaaaacaatcaggtaatttttgtttgtttatttaactcattcttcaagataatatccatgggtgtcctttaagaataatgatcaacatattgcagtcctgcaaagacctccagtaccataatttggatctcttcaagggacttgcagattatgtggctgcaactttcgacatctggaagttcagaaaagtgagtacattaacaatttagaataagcctcacaaacttttaaaacactaattcatgtagcattttaagtatttctctttcacctttatagtagttaagataccaaaatattccaatgctgaattgacttttgaaaaattagctccttattattcctgtctgggggctacttgctaatatgaatagtccccaacttaggatggcttgacttaatattttttgactgtttgatgttgcaaaagcaatacgcattcagtagaaaccatactttgaattttgaattttgttgttttgctgggttagtgatatgttgtatgatactctcttttcatgctgagcagtggcagcaagtygcagctcccaatcagctgtgcaatcatgagggtaaacaatgcatattgtattcaataaattacttgagatattcaacacttttattataatataggctttttgttaactcattttgcccaactataggtgaatgtaagtgttctaagcgtgtttaaagtaggctaggctaagctatgatgttcagtaagttggatgtattaaatgcattttgacttaaaatattttcaatttatggtgagtttgttgggatataccccaccgtaagtcaaggacaatctgtatactattctatcctttggtcatctttctatttgaaacaaaaatttgctcttctttttcgttttaaaagggttgtatgggctgggcgcggtggctcacgcctgtaatcccagcactttgggaggccaaggtgggtggatcacctgaggtcaggagttcaagaccagcctggccaacatggtgaaaccccatctctactaaaaatacaaaaagtagccgggcatggtgacgtgtccctgtaatcccagctactaggggggctgaggcaggaggaccacttgaacctgggaggtggaggttgcagtaagctgagattgtgccactgtactccagcctgggcaataaagatcaaaactctgtctcaaaaaaaaaaaaaaaaaaaaagggttgtatggtacttttgttagatatttagcatgatttccgtgtttatactttgttcttgttagatttcaaataataaagatgggtgatgtgacaggcttggggtttttgaagaataaaatgtcactacttaatggtcatgtccattgttttatccagagtaaaagcctttaaaatcaggagctgtgttaagaatataaacatttaatgaagcacctggtaaaaacttctttttgcaatgaaataggtgataactgttagatctctaggttcagtttattttggagagtaaggtaaatattgagtttactgtggaaattggttatagaaagagaagtaataatcctaagtaagaaagattgagaaggaaattggaggtgaacttgaaagtttattttaatcataatgtttcagttccattttcacttataggtatgaatattaaatatagaaattttggggttatgtcttacatgttagaatctaggaagtatttaagtttgggaatgcgagaagttsaagattgagttggtcattttgaaaaccttcagaaaaggcatatttaaaagtaattttcagatatgttgtatgaaaagcatgtaggaagagatttatttttaaatcagatggaaacgtagaaatcattgtatgccctggttctcagcttaaaaaagattgcttattaacttgatacccaattcaagaattaatagaacagattttgtgagagaaagatgattgttccttttcatggaaatattctgtttcaggatatattctgttgatcaggacagttgaattgctgcttagattttttgagatctaawaaattmctattagcatactgtaattattatagagttttccctcaattttctctttttaaggttctttttatcctcattttatttgaaaaccttggctttcgacctgttggtttaatggacctgtttatgaagagaatagtagaggatcctgaatccctaaacatgaaaaacattctatctattcttcatacttactcttctctcaatcatgtctacaaatgccagaacaaagagtatgtacttgtttttttttaccttttttattgccatataacttacaaaaaaggttataaatcataagcttaatgaattattacaagtgaacacacccatagtcatcatccatgccaataaataaaacatagtgttccttactcatttataaggttaaacaaaattttgttttatatttgctgccctttgtcttgtttgtttctttgttctttataatgtattagttaattcattataggagtttgatttcaaaccctcccagcttatcctcgtagctcctaagttcatagtttattttaactgtattaaaaaatggagaaatctgtcttttaaaaaatttgactttttttattatggtaagaacatttagtaaattttaaagtgtgcagtacaatattgctgactttattattaatgatatagttaacaatattgtacagtggatctctaggacttaatcatcttgcatarctgaaactttatacctgttgaatagcaactcccctatttccccctttcctcacccctgacaatcaacattgtaatctctgtttctatgactgacctttttagatactttatataagtggagtcatgcggtatttgtccttctatgactagcttatttcagttagcataatgcccttcaagttgatccacrttgtagcatgtgatgagatttccttctaaggctgaataatattccattatatgtatatatcacattttctttatccattcatctgctgatggatgtttaggttgtttccctatcttggctattgcaaacaatgctgcacttaacatgggagtgcagatgtctctttgagattctcatttcaattcttatgaattgaaatatatccacaagtgagatccctggatcatacagggattctgcttttactaagggttctacttttaccaaatgccttttttttttttagcatcagttgaaatgatcatatggtttttatcctttattctgttgatatgatgtatcatattgattgatttgcatatgttgaaccatcctggcatcccagggataaatcctgcttggtcataatgaataatctttctaatgtattgttgaatttggtttgctagtattttttttgaggatttttgcatcaatcttcatcagagatactgtgctgtagtttttttgtttgttttktgttttttttgatgtgtctttgtctgattttggtatcagggtaatactggacttgtagaatgagtttggaagtattccctccttctctgctttttggaatagtttgagtaggattagtattagttcttccttaaatgtttggtagaattcagcagtgaagcagtttggtcctgggcttttctttactaggtagtagttctacttttacatttttcaaggaagcttcatactgttttccatgcaccattttgtagtcctatcaacattgtgcaagggttccaatttctccacatcttctccaacacttgttagattttgttttgttttgtttttttgataatggccgtcctaacagatgtaaagtgatatctcattgtggttttgatttgcatttccctgatgattagtgatgttgaccatgttttcacatacctgttggccatttgtatgtcttctttggagaaatatttaagtcctttgcctatttttaaatcatattattatttttgctattcagttacagtatgttataatrtgtaaacatactacaaatatatatataatatatatattatgggatgcagaaaaagcaatcctgacaagaaaacttaaagcattaagttttatataaacttatagcaataagcataaatatatgagttacaggaattccttatatattttggataataactgcttatcatatgtatggtttgcaaatattttctcccattctgtaggttgctttttcactttgttgactgtttcctttgctgtgcagctttttagtttgatatagttctccttgtctgtatttgcttttgttgcctgcacttttggtatcatataaaaaaaatcattgcctaactaagccaatgccatcargcttctcctacacattttcttttaggaattttgtagttttaggtcttatgtttaaatctttaatccattttgagttgatttttgtgtatgttataaaataaggttccaatttcattcttttgcatgtggatatccagttttcccaacaccttttgttgaagagcatattcttttactatgtgtagtcttggcagctttgtcttttttatgccagtaccatactgttttaattactgtagctttgtaatatattttgaaatcaggaagtgtgatacttctagctctgttctttttcaaaattgctttggcagttcagattcctttgtggtcctatatgaattttaagttttttttctatttctgtaaaaaaatgccattgggattttgatagtgattgcactgaatccgtagactgcctgggttagtatggacattttaacaggattaagtctttcaatccatgaatgcagactgtccttccatttatttgtgtctttaatttctttcatcaatttctttgtagttttcaatatacmagtctttcacttccttaagtttattcctaagtattttatgctttttgatactattataaacaagattgttttcccaatttcctttttggatagtttgttataagtgtataggaacacagcagatatttttactgcttcctttctgatttggttgtttttctttctttttctttcatttgcataattactctggctaagatttccagtaccttgttgaatagaagtgatgagagtaggcatccttgtcttgttcctggtcttagaagaaaatatttgtttttcatcatcgaatatgatgttagctatggcttttcatatatggtcttacttacggtgaggcacatttcttctatacctaatttgttgagagcccttatcataaaggttgttgaatttcatcaaatggtttttctgcatctaattagatgatcatatgatttttctcctttattttgttaatgtggtgtatctcattaattgacttgcatatactgaaccgtctttgcatcccagggataaacccctttttattcatggtgtatgatccttctaatgctaatattttgttgaggatttttacatctgtgttcatcagggatattggcctgtagctttcttgtgtcataatgcatgtgtctggctttggtatcagggtaatgctggcctcataaaatgagttctctgtcttcaggtgtttggaaaagtttaagcacattagaagtattgttaattcttctcacaatgtttggttgacttcagcaatgaagctatctagtcctggcctttttcattgttgggaagtttttgattactgattaaatttccttattcattattggtttgtttagattttctatttctttatgattcagtcttggtaggttgtatttttctaggaatttattcatttcttcttgattatccaatttgttggcatacagttgttcatgatagtctcttatgagccttttttatttctgtggcattggtttttatttctagttataatgtcttgttcgtctcttatttatttgaatcttctttctttttttgtcagtctagctaaaggtttgtcaattttgttcatcttttcataaacccaagtcttcgttttgttggttttttctacttcttattgtctattttatttatttctgttctaatcttcattatttccttctgctaactttgggcctagtttatttgtcttatttcagttctttgaggtgtaaatttaggttttttatttgatagctttctttttttttaagataggtgtttattgctataagttttcttgttagtactgctttttctgcatcccataattttgggtatgttgtgttttcaattttatttgtcttgaaatattttctaatttcccttttgatttcttctttaacccattgggtgttcaagagtgtgttgtttaatttccacatatttgtgaattttctagttttccctctgttgatttctaattgtatttctttgtgatccgaaaggatacttggtctgatttcagttttcctaaatctgttatgacttgttttgtgacctaacatatagtctgttcttgagaatgatctatgtgcacttgaggaaaatatgtgttctggtgctattggctggaatgttctgtatgtgtctgttatatccatttcatctgtagcaggggaccccagcccccaggccacggactggtaccagtccgtggcctgttaggaactgggccacacagcaggaggtgagtggcaggcgaacattactgcctgagctctgtcagatcagccatggcattaggttctcataggcgcgtgaaccctattgtgaactgtgcatgtgaaggctctaggttgcgtgctccttatgagaatctaatgccttatgaaacacccccctatgcccagtctggaaaaattgtcttccatgaaaccagtgccaaaaagsttggggaccactgatctatagtgttcttcaagtcctttgttttcttactgattttggtctggatgttctataaattattgaaagtggggttattgaagtctcctactgttattgtatcatctgtttctcccttcagatctgttatatcttcctgatgaattggcccttttatcattatgtaatgaccttgtttgtccttgtgacaatttttaacttaaagtatattttgtctgatataagtatggctacctctgctctcttttggttaccatttgcatggaatgtctttatccgtttcttcactatcaaactatgtgtatgtccttaaatctaaagcgagtatcttgtagacaagttatagtttggtctttttttttaatccattcagccattttgtgtcttttaactggggaatgtattagtctattctcacgttgctatactacctaagactgtgtaatttataaagaaaagaggtttaattgaccaacagttccacatgactggggaggcctcaggagacttacaattatggcggaaggcaaaggggaagcagtcaccttcacaaggtaacagaagagagcaagagaaagggcgaggaagtgctacactttaagccatcagctcttgtgagaactccgtcactattacgagaacagcatgggggaaactgcccccatgatccaatcaccttccaacaggtctctcccttaatacatggggattaaaatttgagatgagatttgggtggggatacagagccaaaccatatcagggagtttaatccacttaatgtttagagtaattattgatagagaaggacttactattgccattttgttttctgtcttacagttttttcttctatcttttcctttcttgktatcttcctttgtgacttgttgattcttttgtgagatgtttcaattcctttctgtttttctttggtgtagtctctaaaggtgtttcatttgtggttaccatgggtcttacataaaacatcttattgttttaacagtctattttaagctgaaaacaacttaacttccattgcatacaaaagctgtacacttgtctccccatactttgttattgatgtgacagtttacatctttttatattgtatatccattagcaaatttttatagttacagttattcttgatagtttttttaacatttatactagaactaaagcacaccactattacagtattaccatatcctatatttgtttatgtatttgcctttactagtgagttttatactttcctgtgttttcacattgatgttttgtgttttttcatttcacctgtctttagcgtttagtttaagaaaagactagtaatgacagttttccttggctttcrtttgtttgggagtcttgatctacatttttgaaggayggttttgccaagtataggattattggttggcaatttttctttcagcactttgaatacattatcccagtcccttctctggcctgcaaagtttctgctaagaagttcactgctagtctgatgggggctcccttgtacatgaaaagttgcttttcatccttgtgggagatacgagttgcttttaaagttctttttgtttttgaattttgacagtttgattacaatgtatcttaatgtatgtttctttggattaatcttatttggggtcctttgagctttatgaatctggatgtccattactctttctagatttgtgaagttttcagccactatttccttaaataagctttcagctcctttttttcttctcccgagacacccataatgcrcacattggtttgcttgttggtgtactgtaagtgtcttaggctttcttaactcttcttctttctttgttcttttttctttttggactgggtaatttcacatgacctgcttcaaattctccgattctcttttgcttgctgaaatatgctggtatggccctctagtcaatttttcagttcagttattatattctttagctccagaattgctgtttagttctttctatagtttatcaattctttgttgatactcttattttgctcatatatcattttcctaatttcatttacttttctgtgttcttataagacaattatttttagttctttgttgggcagttcatagatcttcatctctttaatgttgattactggacatttattttggtactttgattgtgttacatttccctgatgctctttcttccttgtagctttgcattggtgtctgcacaattaaagaaacagtctcctctccctgtttttacagactggctttgacagggaaagactcttattaatcagcttagccagagattctgggggcctcttaaactttttctatgatttttttttttttttttttttttttttgagacagagttttgatctttgttgcccaggctggagtgcagtggcacgatctcggcttactgcaacctctgcctcccaggttcaagcgattctcctgtctcagcctcccaagtaggtgggattacaggcacctgccaccacgcctggctaatttttgtagttttggtagagacggggtttcaccattttggccaggctggtctacaactcctgacctcaggtgatccacccaccttggcctcccaaagtgctgggattacaggcatgagccaccatgcctggcctgaatgtgtttatggatttctaagtagagggatttactggtttcttttttttaatttctttttttttttttttttccagtatcagggaatgtcttgctccctctggtgtctgactgctgtactacagtcggggacatagatgctcctctcctttctctccttcgctgtagagaagccttgagttgtgctgtctgctgcaagccactgacccctttttttcctacttaactgctcctgagcattcaaactatgctggtttcgtccgctctccttgtgaggtgagatagaaaccagctccttggacagctcaccaaaaggctaggatgttgaagacatgctccactcctctcatttcctcctgaggctgaatcctcgggttgcgtaccttctctcaatctctcagagctgtgctgagtgcaggaagctgtccaccccttttcctttgttcttaactgctctcaggcatctgaaccctgctggttttgttagtattccacgtgagtttagacagaaatccagcccctagggcagcacagtgaaaagccggatgttggttgcacactctactctctccctccaagggagaagtcctaggccaaggtgatctccttggtgctgagctgtgccggctttggggaggggctgacctgggtaaaatgttcttcttgcctgtttcagtgcaactcttcttggttttgttcttgtctggagtacgacaatatcttaattggtttctggacttttcataaaggtatttttgtctatatgtccttgctaaatcagtgtttctgagaagctgtgagaactggaccttcttctagttcagttttgaccttaactattcatttggtctcaagctactgctttctattcttttcattttaaccacagccatgcattcctactattaaatacagtaattcctcaaatgtgccagcttctttcatacctctgctttctacccagaacatcttttcttactctttggatcagtcagggttcattaaaaatcagaaaagcatataaaatgtcatttgttaaaacagtgattaaaagcatggactctagagctagcttgcttaggtttgagtttcagcattgccatttgttagctgcttgacttttggcaaattacttatctgtgcctcagtttattcacttattaaaatggagatgagctatgtctaatctcattgggttgttattagaattaaatgagttaatctatgtcaagttcttatgacaatgcccagcacatagtaatttttagatttgaaaaaaattagagtgtaggtcacagaggccttgggggaacaaactagggcagttgtgaaggtctcagtggcaagatgcacaggccatctgtttgccatcaaatgacttgactccagctgcttgctttccttttagttttccctccagatttagatttctgaaagagaacatctgattgactgagtttgagtcaaatgcccatcccttaggggcagttaatcaattaagtggtgtcaggccaactaaaaagcagcttcccactgtactgtccactgaatggacagactcagctcatactgcatttcctgtgtcttccctaattgtcaccgtcagagtccctgtgcttgtcatgtcttacccagtctcyggtgcagccttgacaacaggctgcaccggagactgggtaagacatgacaagttgtgtcacatcatttgttgtgtcagtaagtctgtctctgctcctcagttggtaagctctccggagtccgacccagctgcctgtttttctgaacttagtacaggacctgccaaagagtagacatttaataaaggtcgaaaaatatctcccaaattcaatcttcctttactcccctggcttcattttcttctgaggctggctcccattgatgccttgtactttctagacaaataatatcaagctaagtggtaattaaaactccagaaacagccccagagggattaagagagtaagtactgggcgggtaagagtttttcaggtgactccaggcaacctgagagataacttgttccaacaaaattgttacattgaaaatagaggggggataacaaaggtaacaaaggctgggaggacatttaataaaatggcagtagtagaattagtacaggaggagaatcatgaatgttgtctttttgtctgtctattctgctttcatttaacctagtggttttcaaacagggatgattttgcctcccaggggacatttggcaaggtatggagatggtttttagttgccacaacaggagggaggtctgtgctactggcctctagtggacagaggccaggggtgccgctaacatcctactatgcagaagatagcccctcacaataaggaattatccagccccggatgttagtagtgctgagattgagaaacccttacctaattctaagcctcccacctcaacatttctccaaaggagaagtaggggcaatatggcagatatagcaagattaattagtcaccatttcctgaatgcccatgaatgtacaattgcctggatttggtattttgaaggctataaaaaaagaagtttgtattccctgctcttcctagaccatttatgagaacaactctgttgtatatccagaggaaggcagtacatggtaggcaccaagtaagtgctttatggaggaaggagaaaggaagatggcaacttatctggagtagcaaaggttttggaagcagaataactcaaagtatttgggaagagagttgactagaagagatggttagataggagagtggtaggaattctggcttattgtatacccacatgctatacattaatcattatttcatttatgatggcccatcggggagagggtgttaaatccagagtatcttgctgggctttgaacccaaggaacaaatatgtaacgtttaagctctgttgttttggtcctttggtttcttctcttcttgatctgtatttaccaccttatggataatcccacatttgcatctgtggtcatkagtgtgctccttaactccagacctgagtctctgtgggttgcatatggtcactgcacatcccagaagtgtctcaagttcagtaattctggaagtcagctatttttcttgactcatcgttttccaatgacaagctcgtcctcctgtcttcctcatcaaagtttatttgttcgtttagtcagcatttgccaagcacctggacacttaggagaaagatgaataagacagtccttcttgccagaggattctgtgtaatgggtaaggtagatatgtaaattggcagttaaatatagcatgaaaattcgagtgatctagcatattagtctgttttcacgcagctgataaagacatacccgagactgggcactttacaaaagaaagaggtttaatggactcacagttccacatggctggggaggccccacaatcatggcagaagatgaaaggcacatctcacagggcagcagacaagagagacagccaagcaaaaggggtttccccttataaaactatcagatctcgtgagacttattgactaccacaagaagagtatgggggaaaccacccccatgattcagctatctaccactgggtccctcacaacacaagggaattataggagctacaattcaaaatgagatttgggtggggacacagccaaaccatatcatctaggatatttggaaatagaggaaggatatatcaggatgccagcctggtgaagaggagggtcaggggatatcaggcagtgttgcctggaggggttggtatctgagctgatcttaaaagatggagagatggggttttaccatggaaagataagcaggaaagaacattccaagtgaaaggccctctatatgcaagacctggaggaaagaaacagcagagcacatgcagggaacagcacacagtttgggctgctgaagcatgaggtacagggtgaggagtggggcaagagaagaccagaggggggatcattacccaggctcccaacttccttgtccacaccatcccctgcccccgcatcccactgcatgttccaaaagcagtcagtactaatttcagamgtgctgccttgctattgcgtatatgatctgttatattcctcccatttcatcataattcctatcgttttcctggccttatcacagcccttcatcctccccaacacttcttcccctacccrtggacctctcagttgatttcagtctcattgttaacaagggcttgtgtccaggcatatttgccccagctgttaagaaacactcctctgtaccttcatctcaccagytattcactatcaggcaagtagcatgtgctttcagggctgtgctcaaatcttcttcccttattccatcttttccacttattcaaattctcctcccaaaagcttctgtttattttctttcctctgcgagatcacagtactttgcatgtatttctttttttatataactatatgtatcatatgccctgagaatcagattgacgtgtgttcaaagggtatctaccatttattagtggtgtcactctgggcaagcgactgcccctgattttgatcttttctgtcttcatttgtgcttaaccacgttatactgtgtaccattagctgtgggtggtaggattaggcttgcagttcttttaacccatagtattgataactagataattttagttggttataaaactgtagtggtggtccaggcgttatagaaaatctagcataattatgaaaaggttctggagcctgacaccttatgttctaatactgcctttgctacttccttgtctgtgtgttcttagacaagttactcaatctctaagcctgtttacccatttttttaaatgaggagaataatagtaatacccatggagttttttagtgtgagttaaatgagttaaagtctataaaatgtttgtctcgtgcaagacatacagcaatagccaacatttattgaatgtatacacttattatgagataaccaactgtccagaatgatgtgtggatacttacttgcaaggctgattttcttatctcttttctttggaatcgttacagatattggccttctgtatatgttgggaaactgacttttctttgttccccagacagttcgtggaagttatggctagtgctctgactggttatcttcacactatttcttctgaaaacttattggatgcagtatattcattttgcttgatgaattactttcccctggctccttttaatcagcttctgcaaaaagacatcatcagtgagctgctgacatcaggtaggatgttagtgcagaattggtcaccaattgtgaccaattctgcactaccactagctaccatatgactctgaatggggtcttagttggagcagtgttagttgaaatttgcagagcaggtgttgctgtggaaagggctgataatggtgaagtcaaagratagtgcttcaaagcagcaaacctacagacccttctttaatgacaagtcctacatgtagaaaaaaataaggaatgcatcattattccttttatttatactctatccttctatacaaaggctaactgttcaggctgttctttatgctttgatcagagctgttttaattcctaatccttacttatcacatttgaagccaacctaagtcaatttttgcagctgtaaacacttggtcactcctggcctgtgatgagggaacacctgttagatcaagaaaccaaatagccaccaaattaattagttcatttactcttggaaccaaattaactgttgacttttagtctttagtattaaataaggcaaagcaatattcaggtagatgtacaaaatttgacgatgtgtctgagaatagagtagttcagaattaaaacataaataaataaatgttataaaatcccaaagttgagttgtagagagtcagtcaataataccacgtgctggtttttcaggcagtgtaataatggagaaacagccttgaaccttggaaacctggattctagttccaactttgccttaattacgaggctttttaactttcctgggcatttccttatccataaattgaggagtttagactaaatgacctctaaagatatttgaagccttaaaacattatcaagtgcagggctttgatttagaccctgtggaaaccagggagacaaagagagagtccttgtgataagaaagagataattagaaatacaagtgcatttatgtatatatttattattttataactattactaaatatatactaatatagttttttaatgttgcatttatttcttcttaatgatatactctctttttcatcttttagatgacatgaagaatgcttacaagctgcatactttggatacttgtctaaaacttgatgatactgtctatctgagggacatagccttgtcactcccacagctgccgcgggagctgccatcgtcacatacaaatgcaaaggtggcagaggtgctgagcagccttctgggaggtgaaggacacttctcaaaggatgtgcacttgccacacaattatcatattggtatgggacattatatgatttcctttcattttattgtatttattttcctttttttctgaccaaaaaaataggtatttgtggcagcagtttagtgtagtgcagcattgcctctggaactggcctgattcttgcctcataaaattcttgtgaccaataaatgaaattctacacatttttatgtgtctaaaatcccaagactagtatctgacacatggttagctctcaatatattttagctactgctattatcattattggtagtactattaaacattttgaaacagaaaatcacttggggctggtcayggtggcacacgcctgtaatcctagcatgtggagaggccgaggcaggtggatcactggagctcaggagttcaagaccagcctgaccaaatggtaaaatcctgtctctaccaaaaaaatacaaaacttagatgggcgtgatggcatgcccctgtagtcccagctactcaacagggtggggtaaaaggattgcttgaacctgggaagttgctgcagtgagctgagatcacactactgcactccagcctggatgacagagcgagaccacatctcaaaaaaaaaaaaaaaaaggaaaagaaaagaaaaagaaagtcacttggaggaatgtttgaaaaattaatatcaattctttcctttcagattttgaaatcagaatggacactaacaggaatcaagtgctaccactttctgatgtggatacaacttctgctacagatattcaaaggttgcttacatatatttcatttgctrggctttctgaattaaaatcctaattctaaaagacttcatattaaatagcagtagtaratctaagacttgatgtttgtatggagcctgcagcacaccaagagacttgtcatccatcaatgtactccttagaaagtgtaaatgtggacgttatggttgaatacaatggactacagtattggtcatttaatgagacagacatttttttaaaattaggttttgaagctatagttcaataaaacaatattaatataattgaaactatcaatgcagtgtagactttggacaagataatataatagtgatcataaagaataaagactcgaggcttctacaaaaatcaaatacccaataaatattttgctctaccaccaagacttttccagaggtagagaaaccgtagttttttaattaaactgtatttgtatgggttagagcacattgaagctaatcctragttgtttctttggctcacacattacaaatagagtgtctctggggagaaatatgatgctataccatgagagaacatcctgcctcttcagtagatgcataagatcatgccatcattgcacacacccgtgggtcagttaccctttatgtaaaagctctgctacatggatcctgaccccaaggaacttgtatcttctgttaactccactggacacacacacacacataaatatgatagaaacatacaaaaaaatctgtagggatccaagctcttatctgcccatccctcttcattcacacacagttctgtgactttcacctctttctgaatgcatctagcttatttcttggccatcttttcaaccgctgtctttcctattagtgctacccatctcccctcagaagaggctttctctctgacctcattccaagatcagttttctttttcgggtactccgctattctggcataataaaataacagttgttctcagcataaagtcatgagaagtgaagaatgtgagcattcctttaaaaacataaaatttgtcttataacagccagagtatasgtgaaggcagtaaggatataaatgtcttttttttttctttttttctcccagtaaacttagtatttccaaagtgccaggaacaatgaaaaaacaaattacaccttccacattttcgttatatttacagattttattttaacagtcttgcctttctcttggtgttttctttcttgtatttaaactcctatttctgttttttaaatgctgctttctctgggagatgatatgtgtaagaagagcatttactatttggtattatttacaccgttactactactggtagaataaataattatactcagatcagaaatcagcactacacagaaaacccttaaaattggtgctttcatgtctgaaaattttcctcttcaaaaatgtagccatccttaaagggaactgagaggtaactgtgtataatgttgtatatttttgatttataaagtagccttgtatagtggaatatctgcagaggccaagtaaaagaagtgaaggactaagacaggaatatcaaggattgtggtcggtggagagctcaacttggaaatctycagagaacaagaatgcagcaagactaaatagtaatatcaataactgttcttgttttgtttatttttgttttcagagtagctgtgctatgtgtttccagatctgcttattgtttgggttcaagccaccccagaggattccttgctatgaaaatgcggcatttgaatgcaatgggttttcatgtgatcttggtgagaaaaaaatgcaaatgaaatattctttaattactgrtgtacattctaacagctgccaggaatcttgtggttgagactggttactaggactagaggaattgtcagcattattggaatgagtgctttagttactgttttctttgaaaamgaacattgctagtacacgatttgggttctgctcagctgattactgtcattactagagcttttacaaatgttgttctggtcagctttaatccttttttgctaagaagaagaatgcaaataatatattttcatatttaagatacacaaaaccatatttaatttccaggttatcttgaacaagggaaggaaagatgttaaagctttgttttcatggcctgtgtgaagctgttacaggatgtttgttgccagaaaaggctggatggttttaagaagatgggtctttctcttccctcttatgcttcaattttattttgtaccccacagcttctcttgaacagcctcttctgatgtttctaggtagtaggaaccttacaaatacatttatatatatgttgctgttggaatctatctaaatgccactcatttggtcctgcgcataatgtaagatgtaaacattccaagtcttctattattatactttagtattggaaatggattacgtgtggactattgagwttaagatgactcctttctcttagtgggctactatttaagactttgttttttatattgctgattatatatattctaaggaagattttctcaagaaagcagtttttgcaccatttagaggacctttaaaatttgtataattttcacagttaaagctttcttaaaccctagcatgtagtcttattatgcctttaaaatatgagtagttataaggtcacatttgctttcaaaaagctattgtcctcatgttactttactatgtttggatctctaaactagctcttttgttagtatcgtctcacaaactgattattttcctctttctttggtaaggtcaataactgggagatggacaaactagagatggaagatgcagtcacatttttgaagactaaaatctattcagtagaagctcttcctgttgctgctgtaaatgtgcaaagcacacaataaagtgaaaatcaaccttttcatattaggagacatgcatttgtaaaaattaataaagatgacaagtcagttgtcaatggaattgagctatctgctaagacaaaaaatgttacctcagttcactattaaaattaattttaggagtggaagaaatgttgttactgccatttaaaaatatgctgagaaaattccagaagggttatttttccaaccacacctattccctctagtgcccagatatttgatttgtgagctgtacgtttcaccttttcatctttgatctactaaaaactggtttcttagttgtgaggtgtcacaggcaggttgatgygggtagtagtccttgtctttggaatctgaatatttatactcctgctctaagctgttctaagacttggggttatgcctttaaatcattttcaagcattggccaaataataattggacaaagttctaaagttgtcaagtgtgtaagaattagtgaggtagctgttgaaaatgagtgaggatggtatttgtatttgtaataagcactgcaggtagagatatttcatgggttataataagagaaacacagatgagatgtagatggtaaggagtcttactgttgttggggtccttcctttctcyttcttttttcccccttacccctcccacaawttcatgaagtcttttaaattaaatatatagctgaattgtgttgtgaatcagacctgaggactattttttcgattatgtgtgttcattctttgttcaaatatttgtccaaattcaactattttgttcaatatgcctgtctacctagtatttggctcgctggggatatagtgatgaataggcatggtctcttgtggaacttacagcatgggttccatgcaagttggtgttattctgcccccaagcacacagacatgcaattactagacatcttagtatgtgccgggcactgctaagtattcatttgtgtgctgccttttcatgatctgaaccctttgaggtgtagctgctattatgattctctctgtgtcttcacttcctcatctctaaaatcaggataggtatttgcccaaggctacacagagtaggggagggctggagtttgaatgtgagctaacataggcttataagaaaatacaaaaactgggctgggcacggtggctcgtgcttgtcatcccagcacttgggaggccgaggtgggctgatcatgaggtcaggaggtcaagacaatcctggccaacacggtgaaaccccatctctactaaaatacaaaaaattagccgggcatggtggtgcatgcctataatcccagctactggggaggctgaggcaggggaatcgcttgaacccgggaggtggagattgcagtgagccaagatggtcctgctgcactccagcctgaccacagagcgagactctgtctcaaaaaaaaaaaaaaaaaaaaaaaaaaaaaaatacaaaaactatagcaatatgacaacagctgccaggttgtatcaatttatccagcttgcatttagaaaaggttagagctgaaaggaaatttagtgattatttaattgttacttccctcattttatggacgaggaagataaggctcaaagaattttcctttcctgaagtctcagctatgccattggttccacatcatttcatcctcacctgctcttcagcttgtgtcccaggagatcaggcttctggttccagattggacaacctctagttttgtatacttggccaagtgatttaaccttataagcttcagaacaagatgcagatattctgttattaaaggaactaaggttttgtctttaaatgttgagtgtgcatcagttttgagtgtctaattatgactcctcttcaaaggatttgacaaatttgtgaatatttatgaccaccttttagggtagtaattttcagtttgtactagttaacctggcagataaaaaggcatccctcttttactagcattctagtgttagcattcttcattgctttgtgtcaatgaaagaaaaatgggcaaagagctgatgaacatgaaaaaagttcagtctacttgtaaagacatgcacattgaaacagaagagatggttttgcctttcaaattagcagttttttttcttttaagaattacagtgctgatgaaggtataatgaggcaagcacttgcataagctgttggtagactgtaaattaatacctttctggaatgtactttgtggggttttcttctcccataatttaaaaaatagctttattatagtataattgacatacagtaaactgcatatatttaaagtgtaccgttaggtcagttttgacgtacatacacacacacacacatctgtgaaaccacaatcaagataatgaatatatctatcacctctaaaaggttcctgtctttgcttttttctctgtcccctaaacaaccactgatctatggcacacatagaaaaaaattaggaaatatattaaatgctcattttgtgtgagatatccaaatatttttttcagaatccctaatgaaaaggttgatcttgctctagatacaagatataaaattgtattcttgaaatagctacatgcaattcttttttattattttttaattttaatttttagatttttaaagatggggccctgctatgttacccaggctagcttcaaactcctgggctcaagggatcctcctgcctcagcttctcaagtagataggactgattataggtacaggctactgtgcccagctcaattcttgattgagacatttaccagctctccgaattctcagtagttaccactgaatagaaactttctttacacaaagctgattaaacagtttagaacttttaaaaaacattcaaaaattgaaaatttcatatatacatagcctaacaactcttcttgtcattgacaaaatgtgatggtattttttttgtgataatacacatggacctcaaatgcaattgaactattcatatcaagtatttccaaataacaatgacattccaatttatagaatgtcatgtgttgtgagggtagtcaccctgcaactggcttggacatctctaagcaaatagaagtttctgtaagatagagatttggggcatctacttggaactacctatgaggagctggcattcctcaaatcccaactgactgcacttttccatgaaattacccagcagttatgatggtcagtggctcactcagcagcaagccacttaggtagctggcgagggacgtggcacagccttgtcttcacacagcacatcacagccaggcagcaaaggacagatctctctcatactcttcattcacagggcctgagaggtggaccatcagactccaccctgttttgcgctgacttgtagggagacctaggtgtggagcttcctggccaggagggcagtggctgcccagaaggcaggagatggctatctctttttttttcctgagacggagtcgtggtctgtcgcccaggctggagtgctgtggcgtgatctcagctcactgcaagctccgcctcctgggttcaagccattctcctgcctcagcctcccgagtagctgggactacaggtgcccacctccatgcccggctaatttttgtatttttagcagaaacagggtttcaccatgttagccaggatggtctcgatctcctgaccttgcgatctgcccgcctttggccttccaaagtgctgggattataggcgtgagccaccacccccggtccaagatggctatctcttaacacacttgtaacccatttgtgcacacaggtgtgccgtgactcactggtggatccaaaaaaagctgaagcctacatttcccagagcccctttcagcttgaattccaaatgtgacttagcttcctctatgcagatgtacctacttgaaactgggaaggccaaatgagatagaggtaatgtttctgccaacaaacagccacagagcattttatttttctagaagagcaataacagagaccccagggtgtggtgtggcaggacgaggagcatccattttgctggtggggattgtggctaaaataatgtggctctggagccagcaatgggcagcatcttcatgactttccagcttccaggctgtaagcagagatagcatctcttctggacagccagttatgtgatagtgttctgagagtcattcctggaagtcagactaaaggctgctccttcagcctttccattcatcttgtaagcaggaggcttctgtgcatggccagaaactaacaaaagcacattgtgtctaaactaggttgcagtggtttctgttatcagcaagtaaatcctgattgataaagatactacaatatatgcacatatatatgttatagaatcaataaaaattggatactttgctttaaaagtttgtgaattttgcttttaaagaatttccctcagggccgggcacagtggctcacacctgtaatcccagcactttgggaagccaaggcagaaggatcgtttgagcccaggagtttgagaccagcctggcaacatggcaaaaccccacctgtacaaaaaatagaaaaattaactgggtgtggtggcatgcacctgtggtcccaactactcagaaagctggggtgggaggatcgcctgagcctaggaggtcgaagctgcagtgggccaagattgtgccaccgcactccaacctggatatcagagtgaaaccatgtctcaaaaaagaaaaaagaatttaaaaagaatttcactcagggttacagacacttaatgttattaagacccactaggaacacctgtgtatactgctggctggttttacatgtcaccccaccctgagcaggtttctctaggcagcaataaagcttctgaggcagaggaagggagaaaccaacacacctgcctttattttccatttgttctccttgcatccagttttcaccacacttccccatgctttcactacagttctgccaggctcctctcaggcaatctctttacaccaggggccacataatcctaaagagggaagggaagatagcatcaaactttcacccaattatttcaggcaatccatctccttccctcctccttgcttgcttgcttccttgcttaaaaaatgcagaataggccgggcacggtggcttacacctgtaatcccagcactttgggaggccgaggcgggcggatcacgaggtcaggagatgaagaccatcctggctaacatggtgaaaccccgtctctactaaaaatacaaaaaattagctgggcgtggtggcgggtgcctgttgtcccagctacttgggaggctgaggcaggagaatggtgtgaacctgggaggtggagcttgcagtgagtcgagatcatgccactgcactctagcctggacgacagagtgagattctgtctcaaaaaataaataaataagaaagacatgaaatatattaaatatataaatgagctttcacctcgtcataacttttaagttaaattagacaaagagccaatgctattctattcgagaacctttgaagtgctcagatgctgcttacactcatcagaaaaatactccatcttattaaatgtgaggcctgaagaaaacctagtgttaaagaaaatcaattaaagataaataaaacagaggggcaaagccccgttcaccagcttgggttcagatgaagctcccccgacagccactactcctgtgctgttgcaggctattgtaacgggggttccacgtcatccaggccacaggccaagccttggatgcacctgctctttgcccagctgccccagggcagagctctgcacagatcacagtgccttaagacaggatgataacacccctcagtgttttccttagagtgctccatgcaccacagccatttttcaaagcatcccccaggccagggttaaggcagaacaggttttccagtcatagcctcccacttagctgagtaacatttcttgagtgatcttgtaaatgaatagtttgaaagaaaaacaggcaactaaggcagtgcggtcacattgtttgagaatacagatgcaaaattacttgtgaatttacttgctcatttttccaaaggatgtaatctgtacacttagaagtatttcactcacatggggctctttgtagcaacacaaaccgaacaagctatttctgaaactcatatttaactgtgatttgatatcatcttgattttcttaattttttttaaaattgtgataaaatacacaacataatatttaccatcttaaccatttttaaatgtacagttcagtggcagtgagtacattcacattgttatataacaatcactaccctccagctccagaatcttttcaacttgcaaaacggaaatactgacacattaaacagtaactcccatttcccctttcccccagtgcctggcaaccaccatttactttctgtctctatgaattttactactctagacaccttatagagtggaattgctcagtattattctttactgactggcttctttcacttagcgtagtgttttctggctcatccgtgtcatggcatgtggcagtatttctttcgcccgggcactttgggaggctaagatggagaggccgagagttgaagaccagcctgggtaacattgcaagacccccatctctacaagaaaattaaaaaggcttgagcccaggagattgagcctgcagtgagccatgatcatgcccctgcactccagcctggggaaagaatgataccctgtctcaaagaaaaaaaaaagaatttccttccttttaaaaagatggaattatattctattgtatgtatataccacattttgtttatctgcagatgggcccttggattgtttctaccttttgtatcagtgtgtgtgtgtgtgtgtgtgtgtgtgtgtgtgtgtgtgtgtgtgtgtgtgtgtgtgtatttctagaaacttgttattctcctgagtgttaaactgttttaaatgtttggtttttcatttctagaacattttcctatcctaaaatttacctatctggctatctatcatctatcacttttcctaaggatctttagttgtttactttttaatgaagtataatatacgttatgatagtgtattttatgtatcctcatatcctttcactgtggatt

SEQ ID NO: 96361 - DNA, 17670 bp, Homo sapiens
tgtgccattgcactccggcctgggcaacaagagagaaactccgtctcaaaaaaaataaaaataaaaataagaatagaaattgctggtgtggtggctcacgcctgtaatctcaacactttgagaggctgaggcgggagaatcacttgagcccaggagtttgagaccagcctgagcaacatagcaagacctcatctctacaagaaattttaataattacggccgcacacggtggctcatgcctgtaatcccagcacttttggaggccaaggcaggcggatcacctgaggtcaggagtttgagagcagtctggccaacatggtgaaaccccatctctaatgcctgtaatcccaacactctgggggaccgaggtaggaggaggccgaggtaggaggctctcctgaggccaggagatcaggaccagcctgggcaatgtagtaagaccccatctctacaaaaaaattttttaaacttagcctagcacggtggtgcacacctgtagtcacagctactgagaaggctgaggtgggaggattgcttaagccctttagcctgggcgacagagtgagactctggctctaaaataaataaataaataaataaataaaactctacagttaaaaacaatccagttaagacataggcaagaggcgtttcactgaactgaacatatattttactgaggaggatatacagatggcaaacaagcacatgaaaagatgttcaacttcattagcctttaaagaaatgcaaaataaaaacacaatgtgctatcactacatgcctatcagaatggctgaaataaaaaaatagtgatcacagcaaagatacagagacactggatcattcattttttgctggtggaaatgtaaaatgtgcagcccctatgcaaaagaatatgagaggtttttttaaattttttaatttaatttttttttttttgagatggagtctcactctgtcccccaggctggagtgcagtggtgcgatctcagctcactgcaacttctgcctcctggattcaagcaattcttctgcctcagtctcccaagtagagtagctgggattgcaggtgtgcaccaccataccaggttaatttttgtatttttagtagagatggagtttcaccatgttggccaggctggcctcgaactcctcctgaccttaggtgatctgtccgcctcagcctcccaaagtgctgggagaagtgctcagctcactctgttgcagcctgggtggctgggagaacagcgtgagccaccatgaccggctggcagcttctttaaaaacgaaatgtcacttaccatacagcccaacaatttcactcttgggcatttatcccaaagaaataaaggcataggctcacacaaaaagtagcacatgaatcttcatggcatatatatatattctttatatatataatttatttatatgtatatatattttatatatgtatgtatatattttggagacatggtctcactctgtcgcccaggctgcagtgcagtgatgtgatcacagctcactgcagccttgacctcacaggctcctgcctcagtctcccaagtagctaggaccacaggcctgtgccaccaaacccagctgatttttcttttcttttttttttttgtagagacagggtctctctatgttatccagactgactttgaactcctgggttcaagagatcctcctgcttcagcctaccaaagtgccaagattacaggcatgagccactgcacctgacccagctttactcttaatagctttattcttaaaaactggaaatgacccaaatgtccttcagcctgaatggttaaacaaactgtggtacacccataccatggcatgctgctcagcaatccaaaggaacaaactatcgatacatacaacaaccaggatggatctcaagagaattacgcgtagtgaaaaaagccaatctcagaaggttacatactgaaagattccctttctctcccctcccctcccttcccccacccctgctcccccctccccctccttccttttgagacagggtcttgctctgtcacacaggctagagtgcactggcgggatcatggctcactgcagactctgtctcccaggatcaagtgatcctcccacttcaacctaccgagtagctgagactacaggcatgcgccaccacgcctggataacttttgtatttttttgtagagacaggattgcatcatgttgcccaggctagtgtcaaactcctggagtcaaacgatcctcctgcctcggcctctcaaagtgttggaattacaggcgtggccaccgtggctggccaattccatttctctaacatccttgacatgtcaaaattatacagatgaagaacagaggaatggttgtcagggcttagggaggggagaagcaggagaccagtatgcctctaagtgaaccttgtgatgaactgttctgtattttgactatagtggttgtcacataaatatacctgaggcaaggctgcatagaactaaatatacacacacacacacatacccatgaatgcatgttagaatggtgaaatctgagtgagttcagtgggttgtatcaatgccaactttctgattgtgatattgtactatagttacgcaagatgttaccactggagaaaactgggtggaagggatatgggatctctctgtattggtccttaaactgcatgtaaatctacagttatctcaaaaattaaaatgtaatctaggccgggtgtggtggctaacgcctataatctcagcagtttgggaggcagaggcaggcggatagcttgagcacacaagttcaagaccagcctggacaacatggtgaaaccccacctacaaaaaatacaaaaattagctgggtgtggtggcacctgactgaggtcccagtttcttgggaggctgaggtgggaggatggcttgagtctgggaggtagaggttgcagtgagccaagatcatgccactgcattccagccttgtggtagagccagaccttgtctcaaaaaaaaaaaaaaaaaaattaaaccataatctatactacaatacaactattaaaatgacctttttttttttttgagacagagtctcactcttatcacccaggctggagtgcagtggtgcaatctcagctcactgcaacctctgcctcccaggttcaagcgattctcctgcctcagcctcctgagtagctgggattacaggcacatgcccccatgcccagctgatttttgtatttttagtagaaactgggtttcaccatgttgctcaggctggtcttggtgacctcaggtgatccacctgcttcagcctcccaaagtgctgggaatacaggcatgagccaccacacccggccataaaatgactttttaaaaaactgacaataccaactgctggtgaggatatggagcaactagaactctcctaatggagcaactagaactcttgtacattgctagtgtgaatataaaaatagtacagccaccttgaataacagcttgcagttttttatacagttaaacatacacttaccatacgacacagcaataccactctgacatatttacacaagtgaaatgaaaacttatgtttgcacaaaaacctgcacatgaatacagcctgtatttgcaagtgcccagaactggaagcaactcacctgtctttcatctggggaatgaatcaacaaactatagtattcataatataatgtacccggcaatgaaaaagaatgagctactgatacacatatcaatatgaatgaatctcaaatgaatattactaagtgaaagaagacagactcaaagggctacaaagtgtataccgtgatttcatgtatgatatcctgcaaaaggtaaaactcgaaggacaaagaatatgtagaagttgccagaggctggtgtggagggaagggttgattataaaggggcacaagggctttttggggtgatggaaatgttttgtatgttgattgtggtggtgattacatgactttatgcatttgccaaaatccatagaatggtatatggaaaaagtgacttttactttttgtaaaagatacctttatcttttaaaaaattaagaaaaaaatgaagccaggcaaggtggctcacgcctgtaatcccaggactttgggaggctgaggcgggcagatcgcctgaagtcaggagttcatgaccagcctggccaacatggcaaaaacccatctctactaaaaatacaaaaaactagccagatgcggtggcgcgcgccttcaatctcagctactccagaggctgaggcaggagactcgcttgaacccaggaggcagaggttgcagtgagaggagatcgtgccactgcactccagcctaggtcacagagcaagactccatctcaaaaaaaaaagaatgaaaaaatgagatcatatcttattgtaacttcacatcaatttgtgcagaaagacagcatgtccaatttaatttttaaaaatgctcaaaggtaaaatgtacattattttagttctttttaatttcttagatattgattgattgattgattgagacagggtcttgctctgttgcccacgctggagtgcagtggagtgatcatagctcactgcaacctcaacctcctgggctcaagtgatcctcctgcctcagcttcccgagtagctggaactatagacacatgccactatccccagctaatcttattattttttgtagagatggggtctctctgtgttacacaggctgggctggaactcctgggctcaaacaagcctcccaccttggcctcccagagtgctgagattacaggcatcagccaccgcacccggccctagttctgttttttaaaacatgctctaacgaaatccttaggagttttttaagcaatgtaggattacaaggaactataggtttttgaaacagcattgctctacattaagaaaatacatttctttgaatggaaaataaattatttaaaatggaaaataaaatgaccggaagcagggaggacaagatgctagtgtttgttgctttgaattgaagaacccaagggtactttttatattactcttggtacttttccctagtaccatccaccccccacagggctgtcttagggattaatttagatactatagagtgctgagcatagcatctaacccacagtaaagcccaaactattggccaggtgtggtggctcacgcctgtaatcccagcactttgggaggccaaggcaggtggctcacttgaggtcaggatttcaagaccagcctgaccaacatggtgaaagcccatctctaataaaaatacaaaaattagccaggcctggtggagttcacctgtaatcccagctactcgggaggctgaggcacgagaatcgcttgaacctgggaggcagaggttgcagtgagccgagatcgagcctctgcactccagcctgggtgacagagcgaaactccatgtcaaataaataaatgcccgaactctcagcttctcccatcaccccatcccccaagtccagaccatcccttctaagctggtctccactaggaggtcctgatggtctccctttccctaaccaggctgggggctccctgagaaatagccagaggagccccatcaccaggacagggagtggcgcctcaaagggctgggagtgaatgactccacccagggcctggctagcagtgcgcgcccagtaattattctttcgagccattaactgagtacacacaagcgtggcccagatagtgaggctatcccacccagccaggaagaagcttggccaaacgtggggcactaagagaggcaatttcttggccaagggagccccatcctctccattgcaccaccgatttgatggggtgttacaggcctctccaggaggggcagaggtgctcctttcctcgcaggcccctccctctccctccaggcggcagctaggcgatggaatgttgtgtggtcggttgccaggcaaccagagcctgctggtggctgccttctgggccgagctgagcaggcttccacaccacgctccacagracccccagggtctcctaagcttgtgcaaaactccagctggtggaaagaaagctggggcaactgccagaaggatggyggtgccctgggaggaatatttccgactggctttgcaagagaaactgtctacgtgagtgggacgtagagggagggagggctagaaggagggcgggaatgcgtgggctggcccatcctttsttcctcacctcctgggtcctggctttgggcagatcatagtgggggttattgtccccacttcacagaggaggaaactgaggatcagagagaaaccgaggcatcaccatggtctcagggatcgttcctgatcccccacccctagctgacatccggctgagattaaatcattcaaaccaagctgggaaggaattattctatgaaatcctgctccccaatccacccccaaaactgcattttcaggaggaacagaggaagcttgttctgtgtctccttcatgttcagcagcatggcctcaagtcccaacctcagtatcagcatctgtaaaatggggaggggggttttctyctggaccacggctgggaaagccttgctgattacacattagtcattctttctgctctccctttctcccggggcgctggactccagaaccccactgcctcctgggcctctccctgcagaggtctcaggcatctcgggcttggccgtagtagggagctggtctcccccacctgacctgctctcctgcagcctcatccttccggctcctggggtcacctctgacccctttctcactcccctccccactccatcagttctgctctcacctcctgccactgctgccctgctcagaaccacactatctctggaatatcccgtggccccaccactggtctcccgcagctgcccactgtccttgctcctcaaagcagccagaagggcccctcctctgcccaaaacactccctccgctcccacttcacttagagtcaaggccaaagtctccactcaccatggcccaccgcagttggattctcagctcctccctgctcccaattcccatctttttcctcctccctccctcctctgcagccaccctagccacaccagggtcctagaatctgttccctggagatgtccacgtggcttgctccctcttctcctccaggtctctgctcagatgccacctcctctgtgttgaaagattcctttagtccacttaatttttcatctcagtgcctaccatgtcctggcattctttattattattattattattatttattagcttgattttctgtggctcccagaacaatgcaagttcacgagggaacagggatttttgtctgtcctgtttacagctgcacccccagtgcctacaagggtgcctggcccagagtaggtgctcaggacaatttgttcaatgaataaagaattcaaccaggtgcggtggctcacacctgtaatcccggcactttgggatgccaaggtgggtagatcacatgaggtcaggatttcgagaccagcctagccaacatggtgaaaccctgtctctactaaaaatacagaaattagctgggcatggtggcgtgcacctgtaatcccagctacttgggaggctgaggcaggagaactgcttgaacctggaaggcgggaggttgcagtgagccaagatcgtgccactgcactccaacctgaatgacagagcaagactccatctcaaaaactatataataataataataattcaaccagatgtggtggcttatgcctgtaatcccaacactttgggaggctgaggcaggaggattgcttgagtccacgagttcaagaccagcctgggcaataaaacaagacctcatctttacaaaaataaaaaaataaaaattagccgggtgtggtggcacatgcctgcagtcccagctactcaagagacaagatgggaggatcgcttaagcccaggagtgagctatgatgattagaccactgcactccagcctgggtgacaaagcaagacccaaaaacaagtctcaaaaaaaaaaaaaaaaaattaaacagccagcaggtggctaatggggcactccagacacagtggtgagatgtggggccctgaaacatgcttccttcacccccacctcctacttgagcctcttcagaaagctgccagagcaggctgaggatcatgtcccaccagtrctgcgtctcctggagaagaggcaagagctggtagatrcagaccaggccctgcaggcccagaaggaggtgagcccccactactgtaacgaggtggtgagctggtggatgggaagtgatggagccaatttattagtgacaaggtctgagacaagtcatttcaccactccaagccttgatttcctcatcgtcaaatggggatcaaatgagaccagttgttggtgcaaataaatttgtgtgcattgagcatgtgctgggcactgcattaagccctggaggtcttacgatagtccctggccttgtggggctcacagtctagagaggaaaacagataagtgttcaggtggtgactgctacagggaagaagcactgggcaggggctgtggaagcccagaagtccctacctccccatgggggtggtcaaggagggcttcctggaggaagtgatgtcttggggattgctgaagggcaagtcggcttatccagcaaaggtgaaacagatgaggaaggaaaaacaggcagaggaaaaccatacacaaagactggttggaaggcaagaaccaaacacaggtggttgagtggctggaagacagaatatgggagggcagagggtaagatgaggcctgaaggaagggcagggacactggcattcgagggctggaggagggtgtttgggcttcatccctgggtgatgggagccccggatgggtkgagcagggagcagccacagatcagggacaacaggtggaaggggttaggtgtgaacctgacagcatgggaggacccggacccccgaacccacacagacaacccactcctcacccccaggtgttccgcaccaagacggcagccctgaaacagcgttgggaacagctggaacaaaaggagcgggagctaaagggatcgttcatccgctttgacaagtttttgcaggtaggtggagcctcctgggggggaggcggggcctatgggtagcagcccacactcctataggggcccggcaggtaacaaaaataaaagaagtggttttcgtcatgcaaaaggaaacggcgggaaacacacacgcactgcctgaagcaaccgattaaaaaaaaaaaaagcgggcgggggagttgggtgaagagccagcttccgagccaggcctgctggccgcccctggttttgcgagcgaatgtcagggcaggatggaggtgccgaactccccgccagctcctgagtcctgaaggtcgtcttctccccaccgtactccccaggactccgaggcccggcgcaatcgcgcgctgcggagggcggcggaggagaggcaccaggcgggccgtcgggaggtggaggcgctgcgtctgtggacccagctccaggagctacggcgggaacacgcgcggstgcagcgccggcttaagcgcctggagccctgcgcgcgcctgctggagcaagcgctggagctgctgcccggggtgagtccggggcaggaggctgggagctcggcgccaccgcgtggcgctgagtggctcagggacggcttcggaccggcgaactactggttcgctgaactactggagatcttggcatgcatgccgagaactatcacttatggagcgctcactgtaagcaagggatacgctttggtttttgtggttgttagttttggaggttttttgagacagtgtctcgctttgtcaccaggctggagtgcattggcgcgatcacggctcactgcagcctcgacttcctgggctcaagggatcctcctgcctctgcctcccaagtagctgggaccacaggcgcacgccaccacgcctagctatttttttaaattattatttttagtagagacggtggtttctctatgttgcccaggctggtttcgaactcctgggctcaagcgatcctgccacctccgctcccaaagtgctgggattacaggtgtgagccaccgcccacgctttgttcttgaatcctccccaaagtccagtgaagtaagtcctgttattgtcaactgtccaccccattttacagataggagaactgaagattcagaaagctaactctggccgggcgcggtggctcacgcctgtaatcccaacactttggggggccaaggcgggaggattgcttgaagccaggagttcgagaccagtctgggtaacatagagtgacacctgtctctacaaaaaattagtcgggcgtggtggcgtgtgactatagtcccagctactttggagcggagatgggaggatcgcttgagcccaggagttcaagatgacagtgagctatgatcgcgccactgcactccagcccaggtgacagagcgagaccttgtctctaacaaatggaggttgacatttaagtcactttccagaaagattattccaataataaggaacgctggcggccaggtgggatggagagggtaaggcactgcaggcccatgtgagtcccttccccgcccccgactctagttccaagaggttccggagctggtggcgcgcttcgacggcctggccgagacgcaggcggcgctgaggctcagggagcgcgagcagctcgcggagctggaggcggcgcgagcgcggctgcagcagctgcgggacgcctggccggacgaggtgctcgcacagggccagcggcgggcacagctgcaggagcgcctggaggctgccagggagcgtacgctgcagtgggtacgacccgccctaggtggggggcgctccggaccccaggcttccacagccgggcggggaggaacgccagggctgatgaggaccgatggggcaatgcttaccccagagggtccgctgcactaaggaggggaatctcaggcatcaccgagccgtttcgggcatgaggccccgccccatccgcctgcacaaggctcctgcaccccactcccgagagcacctgactgcctgactggcagaggtggatgggaagaatgccgggcgcggtggctcatgcctgtaatcccaacactttgggaggccgaaaggggcggatcacctcaggtcatgagttcgagaccagcctggccaacatggtgaaaccctgtctctactaaaaatacaaaaattagccaggtccactggcgggcgcctgtactcccagctactcgggaggctgaaggaggagaatcgctaggctctgggagccggcggttgcagtgagctgagatcaggccactgcactccagcctgggcgacaaagctagactccatctcaaaaagaaaaaaaaaaaaagtggctgggaagagggggcagcccgccttggcccagttgccataattgggagtggggcgggtgttctccaggaatccaagtggattcagattcagaacacagcagcggagaagactctgctcctgggacgcagcaggatggctgtgctcaacctgttccagctagtgtgccagcatcaggggcagcctcccaccctggacatcgaggacacggagggacagctagagcacgtgaggacccctctttatggcacctccagcccccaaacactccctctttggaaaaatgagcctaaaaccccacagttagtgacaccttctctgggttaagcatggccctctacggtcagagcccttgccccagccgtggctcgattgtcgggcaggcacccggtctaggatggattcctgggtgcatcttggctctgacagtggccagaagaaagccatgcccctctctgcgacaaagctagactctatctcaaaaagaaaaaaaaagtggctggtctcaatgccctccctctaccaggaaggccagggtttgtgctgagtccctcttttctcacaggatccaacagcccacacgtgtcaacacctgtaaaaaatcatgaggtccagactcgctcttcattaatctctggccctctgtctccctgcttcctgcacagagaggcctcagcttccgcagggagggtgagggtggggttaggctgagttgtgtggtgtagaatgtgccataggcttttttttttttttttgagacagagtctagttctgtcacctaggctggagtgcagtgacacgatctcggctcactgcaacctctgcctcctggcgattctcctgcctcagcctctcgagtagttgggattacaggcacacaccacgacacccggctaattttgtatttttagtagagctagggtttcaccaggttggccaggctggtctcgaaatcccaacctcaagttatcctcccgcctcagcctcccaaagtgctaggattacaagtgtgagccaccacacccagcgtgacataggtttacaatggaggaagatttcagacttcaaacacttcttttgtttctagtgggtatacccaaagcatggcccctttgagaactggaggaaaagtaaaggtgtagcaggatgagccacagacaaaactcctcagacaccggattaaagaaggaagaggttttattcggccggagctcggctcttaagacacgagtctgccaatgctcccagccgaataaaaaactcttccttctttaatccggtgtctgaggagttttgtgttaatccggtgtctgaggagttttgtctgcggctcgtcctgctacaaagggaggcatcccaccttttccccaaccgattcccattcctgttctgcccaatggccaggattccaaccgaatgccaagatctgggtcctgggaatccgcttcgcccctcctagttggttggatgcatcgatgccactgttcttccaagcctggcctgttaccttgtggcacatgagactagcagaaacacaggcttgatgtaaacaggcaaaagtcagtgccttttcttttagtccaactggagtagtggaaattaagaagaaacaaaatctgtaaccggttgtaattaattcgttgtaaacaccactgcactaggaccagaccatctcttttcaaaatcaactctctgcccgtcaaggagaaaggctccacggagggacatgatgccttttcccacctcccctaacactccctggcctccgggcctgggactcacactgtcctgcggctgccagaattcagtaacagcttcatttgttcattgcattatttttccagttgccccctagttatgacaaggggtaactatttttttccatttttggtggagataaaaagtttccttctcagctgttgatacggtgatgaatatgagggggagcccacagatggttgtaagttcaccctcaagttctagtttttacaatggatccatggtatttattaagttcatattcataaagaagttaattaaaacaaaaggagagccacccacggagataagagtaggtcacaaaccaatgaatatgactgatccagttacaagaaaataaagctgattgatgtaaatgaaaatactaattggatagtgcaggtgacagcagcgaggaagctgtgaaggtgtctgctcacgcagcagttgggaaggttggcctgaggctttcaaaacccagaacggtttaggatctcagtcaccacctctgggaaccaccatcatcactgttcttttaatgaggggatctccagtccccgccctacctttcggcctcccccgcgtgttgaggggtgggggctggacagtgactctggggctgggatgtgacttcgtgctgggcccccccaggtgaagctgttcatgcaggacctctctgccatgctggccggcctgggtcaggctgagcctgcagcccctgcctcctagccctgacacaggtgagcagcgggagagggaacccctgagagaccctgagataggagggcccacatttccaatggggtgtggactgagtggctcttcctgaatccgtttcctcattgggaagatgggagggctgtgcctgttcagagtgctgtgggcctgccatgaggggcacatagcaagcactccataaatgcaggccctgatgaggaggtgatgggaaggtcaaggggctatgtgtggggcaactgcctctaaaatgagatcagaccaggccctccctgccagggtggttggggcatgaaaaaaaactctttgtcaggtctcagaacagggtccatgctagatgagagatcaccaaggccccctccactatggactctgccaggtgaggggcccagcctgagaatccagctgctggggctgcccttgaccttctcagaacctcaaacagggggtgggtggcaagaagacagaggacaggccaggttctgacctccaggtgtggaggggccgcgttaacctcttcatagccagaggggagcagctgtgtccttgccccctgggctgggcatcctgttcccctcccccagcccactcccagctgcaaccatgtccagtgggaggaagggggaccaactcccgcctctggcacctggtttgtgctctgagcttcactttcctcatcgctaaatggacaaggcagcagaactcaccctcaggagacccgcaactcctctgccacgttagctgggattttagtacctgggtctctccattccagttccccaagtagaccgcactcctggccaccagcagtgctcaataaagatttattacattaaaaattccattgccaaaccctgaggcactcagggctctgaccggtgcagccatgacctctgaacccagaacacatggaagcagcagcagctgagttgccaactcaagtcttggcctgcctggctttgctggcgaactcctgcacacccttcaaggccctgttcaaatgtctctgtcttaggctgacgcagctgctgcccttctgtggccatacagtgctccttttcacagatgatggctcctgcagggagtgcccccagtgcccagcacagggccaggcacacagtggtgcacgggaacgtctgctgatgcccaccctaaggccaatcaaggagccacggggctgggtcctggtcctcacatcctcttccgcatcttgcccttcttggagcgggcaccccggccgaaggcgccctgctgcagctcctggacgcggcggcggttgcgggcagagagctgcttgaggccaccacgctgcaggaagtgcagcttctgggcccggcgccgctgcttcaggatctgctgcttggtcttgagttccgggcggactcggcctgcaggggtgcctggggcgtggggccgggatgcacctgctgggacagggattcagggagctcagctgttgggatcactcccaagatcccctcctcccagaagcttgcagactcctcccctgcccctactcctgttctgtgcttattgctgtggcccagtgtctgtacacagtaggtggctaataaagttttaggcagcctcatggagtggtcaataacacggggccagaaccgctggggttcaaatcccagctgtgacctcttggaccgtgggcaagaagttaacggctctgtgcctcagtttccccatctatgaattataaatcacagcacctccctcatgggtgaagagtaaatgcatttccatggtgtaaagtggtcagaatttcaaggcctgtcccatagtgggagccttttgggcatgactgttactattaaaaattctccaaccaaggagtgtatgtctccacagcacacctacggcacgccaggctctgaggccccccatagtaaccgatacagacctcagcctctgtctccatggacaccatgctctaggcttgttagatgaaaaaagagtgtagatgaaccttcctttaggtgggagaggaatcaaagaaggccagagagggagagggacttatctgagatcacacagcaaagcagcagcagcagcagaggtcagcgaccctgccccagccccacaggtgggcatcaggtagtccattcttctagttctccgggaggcaagcaccaccctccctggctcccactaagccctgtgtcctcctcctcctcttccccattcataacagcagcctccccagggctcctagagggatgaccattaaggtggtcccagctgtctccaatggagccagggtgcctcgcaggacctatcacctccaatgaggacagcaaaggaagaacagctgctttttcccaaagcccacaggtcgcccccgtctccccagcccctgcacgcccactgcacggcaatgctcgcagcagaagctgctgtttcacctaggtaaaaacaggctgagaagtgaggtgtgggtggtccccacccagccatgctgacaaggagacactcccacagatgggagagctggagagggaggagccacagagaacaggcccaggcaaatgcacgcaggctcacagagacacccaggggaggcagtgaccagccccaggaggtggagggacacaagcaggggctaaggccatctgagagagacccaagacatggtcccaaactcccctctccccagggaagactccaggtgggagccttgggcagctgggtgacccaggttcagtcatagccctcataaggcacctgtttcctggcctgtaaaatgggtattcgcagtcaccttgcctcccaggtcatgtgtggccttccaggacagagcctgcctgcacccagcaagcgggagcccctccctgataacagcccttaagcacaggctctggcagacagagccggcttcaaatccaccttagcttgttactggctgagggacccaggccagatcaaagaggtccaagtcctcagatgaccaaatgtaccacttgccaacccacatttcaaggaagtatcttcctcaacatcccctgtgatcgcctcctcccagaaccaaagctgcttctgactgcgtctttggtgacatgaacttccccacagcattgctaaaaagaacgtcactcctaaggatgccacagggaatcaattcatgctcactgtcaggtcgaaccacatgcaaatgccatttttgcaggtgaaaatggcctgcatttgcacaaggttccacctcccgggttctctaggattttacacaatcggcttaattaggtgaacagggcatctaccagaagttatccctgtagcttcatctgtgaagtggaagggggtcggggacaaggcacctgaggggcatggcacttcccagcgcctgtcaggcggtgctcgtgaccatcagaggccgggacagtaggaagggggaaactgtgggtgtgggggttgggtgggggggatcatggagggacccagggttttggcagcataccccaacacacccagctctggggctctgcagtagcccctgcacctgtgcctcagcgttaccctaatctgaccacaactgctctgcctacctgtgcacccacactccccaccctggctctcaccttggccacggtctcgcttcccacctcttcgctctgggcctcgccggtcagatgccccttcttcgtccgagtcacgatcatcaattttctgtttctgtttccacttctgatagctgggaaacctcgttaaggaagctgcgtgaagcccctgggatggg

SEQ ID NO: 96362 - DNA, 117160 bp, Homo sapiens
aacacccagaatagccaaagctatactaagcaaaaaaaaaaaacaacaaaaaaaaactgtaggaatcacttacctgactataaattacactacacagctaaggtaaccaaaaaggcatggtacccacataaataaaaacagacacatagatcactgaaactgaatagaggatccagaggtaaatccatacatacatctacagtgaactcatttttgacgaagtagccatgaacatacattgtggaaaggacaatctctccaataaatgatgccgggcaagctggacatctatatgcaaaagaacaaaactagattcctatctctgaacagatacaaaaatcaaatcaaaatggattaaagattgaaatataagatctcaaatgatgtaactactacatgaaaacattagggaatctccccagaacattggcctgggcaaaggtttcttaagtaataaacacttcacaagcacaggcaacccaaaacaaaaattgacaaatgggatcataccaagttccaaagcttctgcacagcaaaaaaaaaataataataataattaacaaagataaaagccacagaacaggagaaaatactaatttatattcccatcttgcaaactacccatctgacaaaaggttaataaccagaatacataaggagctcaaacaacagtgtaggaaaaacatctagtaatccttttttaaaaaaaatgggcaaaaaatctgaatagacatttctcgaaagaagacaggtatatgaaaaggtgctcaacatcattgctcatcagagaaatgcaaatcaaaactgcaataagatattatctcaccccaggtagaatggcttttatctaatgtctggcaataacaaatgctgacgaggatggagagaaaaggaaagcctcgtacattgttagtgggaatataaattagtacaaccactgtggagaacagtttggaggttcccaaaaaactaaaaatagagccactgtactatccagcaatcctgctgctgggtatataccccaaataaaagaaatcgacatatcaaagaatagttgtagcactgttcacaatagccaaaatttggaagcaatgtaagtgttcatcaacagatgaatgaataaagaaaatgtggttcatatacacaatggagcactaatcagccataaagaagaatgagattctgttttttgcaacaaaatggatggaactggaggtcattttgttaagtgaactaagctagacagagaaggacaaaccttaaatgttctcactgatttgtggaaggtaaaaaggaaagtagttgaactcatggagataagagtagaaggatggttaacagagattgggaagggtagtcagggagtgtgggggaagtagcgatggttaatcagcacaaaaacattgttagaaagaatgaataagacctagtatttgctagcacaaccgtgtgactatagtcaaaaataatttgattgtacattttaaaataactaaaatagcacaattggatcatttgtaacacaaaagatcaatacctgaggtgataggtaccccaattactccgatgtgactattatgcattgcatgcctgttttgaaatatctcctgtatttccttcctgtgcgaggccagctgagggcacttgctcccgttgtttctgctcctgggttaacaatcaagatggtacatgctgatgccttttctcatcctttgagtcacaatgaagttgttggtttaattttccatttgacaatatttggttcagtaacatactttagtatcaaatggatggtagatgcaattgatccaatcagaaagcaaaaagcagaagctcagaaacaggcagaaaaactaatgaagctaattggtgtgaaaaacgtgaagctctcagaatatgaaatgagtgttgctgcccaccagtagaccatcttttcttttcttttctttttttttttgagacagagtcttgctctgtcaccaggctggagtgcaatggcatgatctcggctcactgcaacctctgcctcccgggttcaagcgattctcctgcctcagcctcctgagtagctgggattacagatgtgcgccactacgcccagctaatttttgtatttttgtagagatggggtttcaccatgttgggcaggatggtcttgatctcttgacctcgtgatccacccgcctcagcctcccaaagtgctgggattacaggcatagagccaccgcgcccagcctagtagaccctcttaatatgcatgttacttggaagtgatatagcaggtttagatgaggtcattacggatctgaaagacagtcatcttacctatcaaaaagaaacatttgtttgagaattccaggcttctgcagcctccaaaaggtgttcttctctatgagcctccccaggctgtggtaaaacgttgattgccaaggccacagccaaagaagcaggctgtcgatttattaaccttgagccttcgacactgaccaataagtggtatggagaatctcaaacactggctgctgctgtcttctcccttgccataaagctacaactgtccatcatcattatagacgaaatagactcctttgtacgaaaccgttcagagttctgaccatgaagctacagccataatgaaagctcagtttatgagtctctgggatggactggacactgatcaccgctgccaggtcatagtaatgggagctaccattcatcctcaggacattgacacggctataacgagaagaattcctacaagatttcacatcaaccagcctgctttaaaacagaaagaagcaatcctgaaactcatcttgaaaaatgaaaatgtggataggcatgtagacctgctagaagttgcccaggaaactgatgcgttttcaggaagggacctaaatgcgatgtgttgagatgctgccctcctctgtgttagagaatgttaattctacatcagaagaaagccatgatgaagatgaaattcggcctgttcaacagcaggacctgcatcgggcaattgaaaagattaagaaatcgaaggatgcagcattgaaaaaattaagaaatcaaaggatgcagcatttcagaatgttttaacacaggtttgtttagattaagagtgaagatcatttgcacagttcactgatctagtttggtgtgtcctcttatccgttagtggaagtagaatggaaagagtgctctttaaacaatgagggagttcagtgtttatggttttgtactctgaattctaagttgttgagatacagttgttatataagtggcattactgtttgtcagaaatcatgaggaggaacaatttaatccagcatgaacgtgggtgcttgtgtttgagctctttagccatatgtcgtacagccttatagaatctaagctgctcttacagtcatgaatgattcattgggtcattagtgagaaatagggatgtggttaggcactgtttccttgacatgtgagtatgtgtttgtgtgtgtgcacatatgtgtgtatattaaatgtatatatccacacattttatatggacattctgtagatatgtttgaatacagaaattttttttatcctaactactgaatccagaagtaccgaataatatacagtaaaactaagatttaagattgtgtcaaaaaggtacagtgattcaaccatttccatttgtcatttgtttcaaccttttttaagttgagtgtttttctttctgcagttgattaattggatcctccaccttgcatatatacatcttgcatatatatacacgggctcaattattagatttgtcaggataatcaaataaaaataccaggtcagtgatcagcattgaatggttgttagacagtcatgtcagtcaacactgatttcacctctttctgtaagcatactgagtaaaaactttttttcagtttaaattgatttacgtgaaagtggattaaaaggcctttcaaaagaatgggtttgaaaaacctcagtccgctttaatacacgtacatttctttcctttcttcatttaatgtaacatatgtctgttgtaactacgtttcttaaatattattttaaggttatatgttctttaattatgctccaacataatttggtcaccaaaaatgaaataatagtttaaaacaagtagctgttactaagtgtgctaaaaatactcattttgtaattaatttttaaagttttcttagtatattataaattgttccctggtcaagtacaaacgtacacatcaaaatgcccatattgtgtctatcatttgatgtgaattatatgtgaaatttttcttgttcaaaattttactaaccagaattctgttacaggcacttaaacacgcagcatgaggaaaatggaacaacaatcttgaggtgccttctgaatcatcagattaaattatgcttcgtatgttttgttttactgtatttctttaaaaactctcaatctttattcatgtgttactggattaatttatttgataatgtctcacaagaatctattagatcatttattcttcagttgtgctttgaatggtggggtggaagtttcaggtgaacactgtggataacaaaagcaagttgtggaagactgtgaagaggatggaataattgaatacaagaaaaaaatgaaaaaaattgtcccatttttaataactatattacactattattttataaatgtgtaacaaaggggtccctctttaaaaaaaagaaatatctcacgtaacccataatacatacactgactttgtacccacaaaaattaaaaaatagctccttaataaataaataaataaaagaattcctcatctgtcacctactacccaccaaaattttcaataagtacaactatttgtttggtgaatgaaatagtaatattttccctttgaaccaggtgttttaatgctgtgagctgctaaagatggaaatcagcaaagaaggaaacaagctaggccactactcactccttctccttagcccatggagatatattccacaaagccagctattgattgctaccattagtcggccaggcaaaccagcaataattgctttagcaattttgttcatgaacatttcctgttaatttcccaggagtaaaaccagctcctccccctcttttaacaaaaagtcagagagcaggtggaaattatcatactcataaatgttacaaaagtattatttacttggtttggggtagtgaagaatgcaaagcaaaagatgaagtatttcaagtttttaaaagatttgaatcaaccacatgtatcagtaagtaaagcaaagaccaaaattaaaaagtatatttgattttttatttatggaaactcttcaccattccacttaaaaataagtaatatcccttcagggtttggtacatttcaagatgtctaactttctaattatttagacaaaaaaacaatggtttagctcactaattttcactgcttcttatatcccaaatctttttttttttttttctgagtgggagagaattttcctttgttctgaagtacatcctttcaaacatcatttagtggtggtctcatgtgatcggcttcttggttttgtctgcctaaatatgtctattattttataaatgtgtttataaattaaatgtttaattttctgtgtcaacttggctaggtcatgacacccagatatttggccaaacacatctggatattgctgagaagtgatttttttagatgagattaacatttaaatcagtggactttgagtaaagcagattactctccataatatgggtggccttatccagtcagtcgaaggccttaacccgtttatgccagaggttgcaaattttttgtgtgaaaaatcagaccttggcaatgaccttgagcagtaggatataaataaatcccacaagcttagcgttccaatagtggagcactaggcataaatgccttaaagaaaggactgatctcccctgaagaagagagaattctgcctctagattgcttacaatttgaactggaacatcagctgttctctaggtcttaagtctgctgctctaacctacaaattttggacatgccaatctccacagtcacatgggccaattccttagtttctctggagaatcctgactaatgtatgcaatgtctttatttcatcctcattcttaaaggatattttcatcaggtatgctattttaggttgatggttattttcctagtgcattgaaggtattattttacaggtttrgacttccattgtttctgttaagaaacagcagtttaattgtttttttgttttttctttgaaggtagtctgtagtttttaatgggtacttttatgaactttttttttttgcttttggtggactgtggtttcactagatgtgtgcatgggtagatctcttttttattttgctatttgagatttactgggcttgaatttgtgaattagtgtctttcaacagtcctgggatgttcttagccattgtattgtcagacattgattcttctccattttctctctcttctctttctgaaagttcaaatagatgattgttagatcccactctgtccttcctatgccttaatctctattttgttttctattagttccctcttcagctatatgtcttttttttttaattaatagatttgtttgtttgtttgtttgagacagggtcttgcactgctgcctaggctagagtgcagtggtgcaatcagggctcactgcagcctcactcaacttcccagtctcaagccatcctcctacctcagcctctgttccactaatctacttgtcaatttttccagcaacaccacaccctcctgatcaccatagctttatggtaagtctttatttatttacttattcatatatttattctattttatttgaaatcttttattaaaatataatgtacacacagaaaagtacataaatcagtgaatcttccaaaactcaatataatactatagccagcacccagatcaaggaccagaacattttaccagccccaaggatcttcctcatgtgttctctccaagtccttacctccaccaagggcaatcaggatcccagcttctctcactaaagagcaattttacctgtctctgaacttttagaaattgaattagttatatatgtactctggtatgtttggcttctttccttttctgattatagaaataatttaacctagaaaaaaatccaatacttaaatttatcatcaaaggaagttaaatattacattaagtacataggttttttttttaacttgtattttaggttcaggggtacatgtgcaggttggttatataaattgcatgttgcagaagtttggtgtaccccttattttgtcacccagataaagagttctgctaacaaccctgtgttttttcccttcattcactcctgaattgattattattcttacttgttggattatttatgggataaagaagttctttttttcagattaaaactatgttatccagtatttctaatggttttcagattcgtataaaaaggtaactaccagtttgccagaggattgtacccaaatgctctgtgggcccttagctccacctggagcatgtatggccacagccatggcacctgcacccttggcaagctggccacttctccctggagtagaccgtgtgggagcactctgtgtccctgcccaggaggtcttgagatggactgatgaaaactgaaaggtcatatttgccatgtgctgaggttaaggtggatactagggtgactgtggaaaggcagatgggagtgagggatgttggtgaggatctgcttggtgatgacatcaccatagtctggttgtaacattgcctacagtatagcttggagtgctcttccacagtgcaggcgtccayatcactaatgaaggtcttacaccctatgcattcaggaatggggttgggatgggagagtaggtttggctgctttggggatggggagacccagccctgatagttcaccctcagtacctgcaaaggcctggggaggaaactgtgatatttatttttgacttgagtgtttatattctatttcttttaaaatggtatctgttattcttatgttacttctaggttaacctttggttataaaatggtttttcttttatttctacttctctcgagttattcaattcatttataagattttctagttttgatatatgttttcctttatgccttatgttattttcttaatgactgttttgaagtagacagttccaatttttatctgttatgttaatacatctttctggtataatttcattgtctttaggagatatgatttactatttgttctttcttttctcataataatttttcatgagacttgagagatttaaaaacatggctgcagctctataatcatcctctttatatcttaagcagacaattcatacaataagcattctaagtacattgagttgtggaaattgttttcttgaattggacacagcttgataatagctgctatatattaaagttctcatgctgcytctccttgtagattcatgccttggtactttctgcttttaaagaaactttctcttatatttaatatcatgtcacaaataaacttgatgatttaaggctttaatttattttgtatgtatccgaacctattagaaataatactaggagcatgaattccacgttaaaacacctccggttacttattgcaaaaagttctcccctcatttyggagcaactttcartgtctttccccaagctatatatctttgttaaaattacattggtcatgtcactaaataatgcttggtacctaaagaaataaaagaatttaagtggaaaatatagatattattttgaaaacatttcaaaacaatgaaaatgtgatggatttcccctctcattttgaggacaattttagccttagatggaatcttctaaagtgttgtttaagtaagatgcattgtttctagtctttttttgttgttgttctcttttgagatggagtctcgctctgtcacccaggctggagtgcagaggcgtgatctaggctcactacaagctccgccgcccaggttcacaccattctcctgcctcagcctcccgagtagctgagactataggagcgcaccaccaccacacctggctaattttttgtattttcagcagagacagggtttcaccattttagccaggatggtttcaatctcctgacctcgtgatccacccgccttggcctcccaaagtgctgggattacaggtgtgcaccaccgcacccagctgtttctagtcttaatgatagytatgacagaatcagggttatttttaatggtaaatatttgctttttagagatatttctatatttatttctgtgctcctaagttttattctaaaactcatttacataaaatatgcttatcttaaaaaatgtatttatctattttttaccctctttccccactcaaaagacaaatttatatctacaatctcagacttacataaaaacaagacatcactgaaattttgtaatagctgaaattcatgaagtcttgaaaggtaaaacaaatgtctttatttttacacatttatgttgtcagtaatccacagcgaggcaacagggaataaaaatgtcatagagcaaactacttccagttgtattgttttaacaaaattctggctgattatcagttgtgcaggtttgtctactttagcaaagttctgtttattgacttttcatcaaatatttttaaatgctacatcatattcctttgcccatatacctcagagacctcctttcttagcctgcctattaatgacaattatcttttttaaaatcaattttactaaatgtagttacatacaataaatgcacccatttaaagtattcagtttgaaccactttgacagaccccctcccccccgcaccagtgcaaccactaccaattcaagatttgttatctatcttcatgctaataccatgttttcttgattactacataggtgttgtattaaacttcaaattcaaataagataaaagtgcaattttattcttacatttcaaaattgttttggccgtgcagggtccttcaaatttatatatgaattttagaatcatcttgtctgccaggtttctcaataaagactgctggcgtttgtattgcattaaatttgtagcccccttgggagaactgacatgaaaatattgattcttctagtctttaaattgttatatctttccatttatttagctgttctttttttttattattatactttaagatttagggtacatgtgcacattgtgcaggttagttacatatgtatacatgtgccatgctggtgtgctgcacccactaactcatcatctagcatcaggtatatctcccagtgctatccctccccgctccccccaccccacaacagtccccagagtgtgatattccccttcctgtgtccatgtgatctcattgttcaattcccacctatgagtgagaatatgcggcatttggttttttgttcttgtgatagtttactgagaatgatggtttccagcttcatccatgtccctacaaaggacatgaactcatcattttttatggctgcatagtattccatggtgtatatgtgccatattttcttaatccagtctatcattgttggacatttgggttggttccaagtctttgctatcgtgaataatgccgcaataaacatacgtgtgcatgtgtctttatagcagcatgatttatagtcctttgggtatatacccagtaatgggatggctgggtcaaatggtatttctggttctagatccctgaggaatcgccacactgacttccacaatggttgaactagtttacagtcccaccaacagtgtaaaagtgttcctatttctccacatcctctccagcacctgttgtttcctgactttttaatgattgccattctaactggtgtgagatggtatctcatagtggttttgatttgcatttctctgatggctagtgatgatgagcattttttcatgtgttttttggctgcataaatgtcttcttttgagaagtgtctgttcatgtccttcgcccactttttgatggggttgtttgtttttttcttgtaaatttgtttgagttcattgtagattctggatattagccctttgtcagatgagtaggttgcgaaaattttctcccattttgtatgttgcctgttcactctgacrgtagtttcttttgttcttgaatttttatcagcaatgttataaaacttcaagatatgagtcttatacatatgttaaattcattcctagttagtttatatgttttgatgatattgtaaataaaattttaaaaacttacatttttctattatttattgttagtaaataaaaatacagttgatatttaaatattgatcctgaatcttgtgacttttctaatttaatttatcagttctaatacagttttggtagattatttaggattttctacatatacaatcatgtttcctgtgaataatacaattttatttcttttctaatttatatgtcttttattttaaaaatttttattctctttttttctcctttattgaacacacaaaaatctcccatactgaatggaaatggtaagagtggacacccttgctttgttttgatctttagaggaaagcattcactctttcaccattaagcatgaccttacctgaaaattttttatagttgcccttcactaggccaagaaagatttactgggtttctaatttgtttaattaaaaaaatccaataaatgagtgttgaatttagttaaatgccttttatgctatattaaaagaattatgattatttttatccttcataaatgtgatgtcacattacttgatttttcaaatattaaattaaccttttattactcataggatttcagagcctttcaagagtatacttagaattcttgccttaaatctttgttattgttgttataygttttacttacacgtatatcacaaacctgtaaaacatttttatgttttttaaaggaaatttaaagtcttttatatgtactcatttattatctgttatttttggcattcttttctttgtgcagatctgagctttcatctggtatcatttcctttccgtctgaagaacttgctttccttggtaattaaagtcttctagtgattaattttttaaaaattgttctataaaaatgtgtttatcttaccttcattttttacaatttttcattgttgggaaatacacataacagaatatttaccatcttaactatttttaagtgaatcatttgggtggtactaagtacattcatattattgtgcaaccatcactacccatccatctccagaactcttttcatcttgcaaaactgaaacttcatacccattaaacaattacttctcattcccttctacccccaacctttggcaataaccatctactttctgtctctgtcattttgactactctgagtagcttatataaatgtaatcatatagtatttgcctttttgtagctggcttatttcacttagcatagtgtcttctaggttcatctatgttgtagcatatgtcagaattttctttctttgttaaggcttactggtaaggaaggacttgcttctgtcattttgctatttgttttctatatgtcttatagcatttttgtctaacatttcctacattactttcttctttggggacctgaaggactccctttagcatgttttgcactgatccttttcattgggagaatactttagaggatatagaattctcagttgataaacccactctccaccctagtactgtaaacatatgtttccatccttttatgatctgcattgkttctgatgaaagtcaataataattcctatatttgttcctctgggtgtgtagcataaatatttttttggctggctttaagattattcttctttattactagttttacacaatttgtttatgatgtgatttgggtggttttctttgtgtttatcttgcttgaggttcattgaggttcctgaatctataggttaatattttccatcatatctggaaaaaatcttatcaattatttattcaaattttttctctgccgaattcctctattcctggtactcttttcatacttataataaatttctcattttcatccaagagattactgtgactgtttttkttttttccagcccttttccttcctgtgcttcaatttggaaactttgatttgacttttcttcaaggttattgatckttctctctgtaatccttgcataataatttaattatctcagtcatttggagtctgtttctgttgaaaaaactctttttccatttgtttcttatgggctacagtctagatagtgctccaagacagtaaactgcagtgattatgttgcttacctgatttttcccctactcttatgaattatagttcctatttctcaatgctgaaaaaattgtttcattcattttccccacttttctatttatttaaggtggagtgattagtctagtttatcataacttatactgaaagtcctgacagttatcttttaattttgatgtcttagaatgtttgtttcttttttatgtcatgtggaaaagtaatggaagtaaagcccaaagtctggttgagctggagttaagcactgatttaacatgggtagccagttacatatgatgctctaatgatagctcccatcatttgcttcctaggtttgaattttgctagagtctccatcattccccttaacatttcttttagagaatcagatcatcatacctattttccatttatcaaaagcctcacttgtacttctttagactgcttttgtctactcattcgatttcattttcttttttttcttttttaaaaattattattatactttaagttttagggtacatgtgcacaatatgcaggttagttacatatgtatacatgtgccatgctggtgtgctgctcccactaactcatcatttagcattaggtatatctcctaatgctatccgatttcattttcactgccaaaattatctggggttgtctgtaattatctcagctcttcatgatctcttctcctcatccccattgttgcttcaatagatacctaagaacactggactttgattcataacattgaaatgtgcatcacagcataaccaaatcgctatgactgcttgggaatctctcataacttctctgaacatacttacatggtggaatcagcatgagaatacaacctcttcttgtctcatagatttgacaaaggcaaagcacaagtgtaaagtttacagtgtgttatctttgtactaactcatgtaatacgctctcaaataatttttttaccatctgcgctttttcattagaaaattattttgtgatgtgtcatacataacttaaacattgtttcttaccccgtaaaattgatttaaaaattggctagatgacactgagcagaatgtcaaccctctgtaactcatctggaactcaatgcacatttcacattctttacagaagatttccacacatggcctaagtttgctcagtgggtgggctttcaggagcatgaaggtttktaaattcaggacctctgatttatggtgggtctttattycaaagactttctttaaatttagttttttgagaactgagggattgagaacatatttttcaaaggatgtgttcatttaaattgcaggtagatcagcccacagggctcttctcatacataatgtagctgtgctmtatggattaactgatacaaataaactagaatttgtgtcaaagatatttaagctgtgaagttgaattatagttttagcttaaatacctaaaccagaggtatctctgacagaagtaattttctaggtctgattcacaggtaagtacttgattttcagcagcatgtctttgttgatgagatttttcagattttagctcttgaactcgcaacaaggacattgattgttttcgtttcattctgtatataccctgatatctaaggatgttttactggatattcaatgaggccagaggcttaccagtgatggcattttattttacattccttgaattttctaatctgtacaattatatatatatgtatgtgtgtgtgtgtgtgtatttcttttatgtgccctattgcacataacatgcagtataaatatgtcatatattaagtgtaagttgaataattaagtgaacttgtgtaatataccagctcatctctatcacacatattatttctttctgtcacttcatttttttcctcctcattcacttccatcagcctaratcttgaaaactgaagcaaggcttattttgctctgtctgctctttttggtctgttctttagaacaggatacttgcttttgaaaactgacacttcagaccattgcagtttattcttcatagccatacttttgaataggaaaaaatatgcttcccttggcatgctgaggcttttgtgaagtggagaagacaagcatggagtgagtctgttttgataactatggggagttggttggagagaaaaccgaaacacttactaaacctaaggtgccactccacggggacgaatagtgatgtagattactgctagcagtgttagtgtcatcagataggattttcctggtgattgtgggaattgcagtctgctgaatgaaacacagagaatagtaaaaacaacttactagagctcactaacccacaaaaaacatatatttttgttttttccatcaaacccaagagtcccaacctatttatgtttttgtttcctgactgcattttcaaggtaattgatgcctgcaaaaaggtggatccactacttgttattttactgataagagttttctgttctgcttcagtcttcctttgctcctaaccaactrtttaattctatgcctcccatcttctgtatcctaggtcagctgtgctaacttgatctctgaaaataggctgtggatggtccttgcccttccggactaacttgtgctgccatgttgtttatagtcattagaaatactgtaaaagcatgcactggtattctaaattctatcttctagcatttgagaattttgtccaagacaatatcctgccaaaatgcttcaacaacagaacaagagaagggaaatggaatcctggaaccagtaaggatttctgctgagttacagcatctgtacatagctcaatattaaaatattaaaattaaaatactgtaacttagcaagctaatagataaaaagagaaaatgcgtataattatctctttatagctagaagaaatttgatgaaattcattctctattcttgttaagaactcttaatgcactgcaatgtatttacataaaatatcctgaaaataaaaatataattattatttcatatttttaaaagaactgcatctagaacttctagaaccgttccttttcatttcggagcaagaggaatatgttcattatgacattgttttttaatgaagtctaaagtaataaattagagaaggaaataaagggtataaagttacaaaagagaagggaaaataaatatttgcagtttaatatagttatatcaattacaaactcaagtggatgatctgaaactctcataaaataataagaaaattccatgaggcagcagagtacattaagaaaaaaaggaatagctttctcatatacaaaataaaaacaagatagaaaaacataattaaagggaagcacttactgaccatagccacaaaaaggtgaaatacacagaaataaacttaataagaaatgtagaacacataaataaattaaaattgagaatactatggaggtactcaagaagaattaaatttaaatgcattccccctttttggacatgaaaacttaatatcattttaatgtttattctctcccaataaatctatatgtttaatatgctcctcaataattacagcaagatgacttttaaatgaactacactgattctaatattgatcattacaaaaattctgaaaaacagtgaagttattgctttttgaatgtaccctccaaggggatgagtatttagtcctacaagatattaaatgtattgttataatatagtaatttcaaagttgatgccagcacttacataagtaacgtatgatttaataaaacagagtaaaatgttcagaaaatagctcggtaagtttgtgaatttggtatgtgttaaaggtgacattgaaaaattagtgaaaaaacatgaattattcagtaaatgatgctagaaaaactgcatagccatctgaaaaaagaaatactggttcctactataatttcatatgaagcaaagattttagtgtaaaagaattatccataaaagtatgaaaataaaacatagcaaacatttaaaaagtaattttggaataaaacatttctaaatgtcatacaaagcccagaagccataaaaaaagattcataaacttgactaaaaatagaacatttgcatggcagaaataaccataaataaaatacaaggaatttagaaaaatgtttataatacatatcataggcgaaggctaatttctttaataaacactttctattcatccatgagaaaataataaatgatccaatagaaataaaagcaaaggtcataaatagtttagagaaagaaattacaactgactttcaaactgaagaataaataacttggtacattcaaaatggaagataaatataaattaaaaccacaattaggtaaaaacgctattagattggcaaagataaaatgttagataatggaaactcgtatttgtgtgttacatgggtcaataatagaactaataatgatatttgacatgttttgagtgtttactttttgtcaggtactgttctaagaactttacatgtatttattaactaattcatcacaacaatcctatcaagcaagaacaattattattcctattttcagatggcaaaattgaggtctggaaagataagtaacttgttcagttacacagaaagtagttggcaggagtagaaagtgaacacaggagatcagctaaaagatataagagcagcttatattcagctgtggttgttctataataaaaagtacaaatacagtccctttaatactgaaattccacattcagagttttatcttatagatttactcagacatttacaaaatgatgaatatacatttattgcaaccctttctgcaatagcagtagattggaaatcaaagttcattaccaagaactgattatctatactgtggtacagccatacaatgcatcctaagcaggtgaaaccaaatgaaagttttcagtttcttcatctgtaagtatattatcatttgtgtaccaaaaaagtatcattgtatacccattatttatgtggtakgtgtgtgtgtgtgtgtgtgtgtgtatgtgtgtgtrctcacgttatattaacatatctctgaaaatgatacacaagaaattggtaatagccataggttggtgcaacagtacattaaaagtaatggcaaaaaccgcaattactgtggcaccaacctaatagctgccttggagaggaaaattaagggtgggaatgggggaaaaacttactttattcattgtatattctttaagatatattgtatattctttaagatttctttatattttataccatacgaatgtattgtccattcaaaaatgaaatgcatttattaaattttttatataattttgtttttggaagtggcttcaccaatattctgaaaccctttctctacaggcaggtatctatgtgccyttgtttggcaatagctatctctaatgacaccaggtttgaagggaatgtgttgtatctgcaaatggtgttgaggcagatccaaggtgggcatcgttgagctggatttctttctgctcacagaaacattttccacattcttagaagagatatttaagtgctgttaggattgccttccctcttctcatctgtctccactgcccttataaacaccagagcttgaaccatctatttgtctaaactgttatgcctgggtctcctggacccacattctccaaacaccattcttatgctccattctgcactttgtcattcactggttttgttttaatagcccagaatctttgttatctctttcctcaaaactatagtccccaagcatagaacatcagaatgcttagagattacctaaatcaaaccgtttattccaaagggaaagacattaaggcccagagttgggaagggactttccttctcaaaccttctttgttgcccagtgcttgtggcttcttgtctgtctacccagctactctgcagaygcttctgtcctggctcctttctggatgactttgctctgctagatggaacatagaggagctcccaatcattctatatggaacttttaaaagtattttgtggcatagagatatgatgaactgaataagaaattaaaatatagccaatgwtgcaaataaaggtttattttcttattcagtctaatttcagttggtagggacttttttgatttatgttcgtatttgttacctttgagcaataaagaatagcagaggtgttctggagaaatagttttcctctgtgatcttgctataaatgtctcaattgtagttcttttagtatttgtaatgaagtggaagctatgtttttgagaaaaagatgacaagattttgggctataaaaacatgagatttgacattggcattggtatgtcatttgtgcagatataacatgttttcacataaattaggacacattcgaagtagcatgctatattccaagtagcatttgtcttagtccgtttgctgttgctataatggaatactcagagactggctagtttatttttaaaaagaaattgattttggctcatggttctggaggctgagaagttcaagattggtggctgcatctccatattgtaatatgtataatgtataatgttcataatgatggatgaaccatcataacctgatggagaagtggactgggaagtctatatgtgcaaaaggggcaaaatacaagggstggccttgctttgtaacaattccctctcctggtaactaatctagtctggagagaactaaaactcactcacttccataagaattaaacaagttctgtgagagcagcattaatccattttaatgacttaatcacttcttataggccccatctcacagcattaccacatcagggaccaaattttcaacacataaattctaggggacacagtaaaaaccatagcagcatgcttcttctctgttcttactgcaaaaaatcccactcattgcatttaaaaattccctgatgacttctggctcatttaacatttttaaatagtcaactcctttttaacttaagtttagctggttgatcatgattaacagataagtaaattttttaagttaatgaaaaaatgactgcatcttgttattgccacactgtgttatgaatacaccagtgtgattaatgaagcaagtgctatttgtaacactgaagtacatgggcaaatggtattatctttggtcctgacaatcaaatacttattccacaaatcatcattaaggcctcttacgtgcaaggcactatagaagctgctaaatgcttctttgctactctactcataatcattttatagcatatattttctattattgactaaaactaacttcagatgaattaaagcgtaaaatttttttaagttaatgaagaagaaaatattgctggaaataactccaaataggaagcacgttcagtcatgaaaatgaatactcaatagttgaccaaactaaattactatacttgaaaataattaccttgagccaaattaaaagacaacaaataaaagtggggaaaaagtcaaaacaaatgactagaaaagatttcatcagaagcttatatttaataacaattctactgctgttatccagaatgctataatatatgccatttccaaatcaagagtagtaaaaacgaccattcctaatagtgattacactattagaatctatgcaagaaaaataattagagtaattatttgaaaataaaactatttttatgcagtcctctacatgaaactcttaaatggtttcaggataaagaccaaactccttattttggtttatgaggccctaaacattatatctgttaaaaaataaaaaatcctattaaatctcatttgtagtcactgtttcctagcaccttttctcctacagcatgtagaaagccaagcgtctgtgttctctcttacctctgcctttgtttctgtgtccagaaaaccccaatccttcttgccctgtccagtccagggctagaaagagcatcctgttgttgcaagtccgccagtacctcaaaacactggttggttttcttcattctgtccatacctctttaatagtttcttcactaaaatttcttcartttccaggtgaggttgccatacatttcttgctaggattctaaatgatacaacactcaaaattcaaaattaagaagtgttaatattttgtgtaatgtcttatttaaaaagtttttaaatcagttttattagatatgatttatacataatcagatgcacccattttgatcatataatttgatgaattttggcaaatgtacatgcctgtctaaccaccactacaattaagaaaaaaacacatgtccattaacccccaaaaagtttcctgcgtctttcctctgtcaagttcccattcctatccccaggtaaaatctaatctgctttctgtaactacaggttagatttgtgttctagagtttcatctcaatggaatcatataataggtcctcattggtgtttacttcttttgctcagcataatattttagagttttatccatattgtagcattaatcagtaaatcatttttattgccaagtagtcttcagttgtatagataaattacaatttgtttactcattttcctgctgatgtacactttggttgttttaaggtttggactattataaataaagctatcataaacattcatgtacaagtctttgtgtggatatatattttttatttgcggggataaacacctaggagaaaaattaatgtgtcgtatgtcctctttacaaggaaatgtcatatttctcttcaaaggagagtatccttttatgttcacaccagcaatataccagatttctagctccttcatgttctcacctagcacttattttcatttttaaaaatttagcaattttaatcgattggtggcatttcattgtggtttaatatgcacgtccctgattactaataatgttgagcattttatcatgtgtttagttatccttttgcccatttttttaaactggcttttgttattatttaagacatatattctgtattcaagttctctgtcagatataagcattacaaatattttctctcagtcccctgcctttttattttcttagtaatgattacaatgagcagatattttaaatttcgatgacatccaactcaatatttttttctcttacggtttgtgatttttgtgtcctaagaaatctttgcttccctatattttcttctggaaagttattttacctttgaagcaacaaaccttgtgttgaatgttcccaacacaaagagatgatgaatgtttgaagtgatggatatgctaatcaccctgatttaatcattacacattgtatgtacgtttcaaaatatcatactgaatcacactataccacataaatatgtacaattattatgtgtcaattaagaatgatagtaaaagcaaaaatcttactccatttaatacaagaggatggcagttgagtccaggaacagaggtgataaagacacagaagttctgtaaagagggaaaataaggaaggaggaagggctgcctgaaaccagcttttctgtataagctttgtctacatagagaaatcatatgaaatcaagtgattattgccagtaggtttgatactcaactgcttctcatccctatgaaacttgatggtgatgagatgttttgtattactttccagtagcagcacaccagagactctaaaaatgaccaactatagatggacttggaattgtggatgatttattttgaggtagaaataaatgagaagtaccagtaccatgtgtcaagaaaagagggggaaatcataaatcaaaagttacacaattaaattaacttttagacttgaaccatttgttaaccatgagtttcaggagagaagaaagtggagaagcacagatgaagcacaagtgcacagaaattaatttattggggaatgtgaggctaaaatctctttgtatttcagtgtgacaccaacatgggaagtttaggaaacttttcaagactttcttttggagcaggaacaccttatcctcaacagtctttgcagttctgactctgaaagttgatgttagattttcatagctaatgtctgctgattatatttcctattgtgtccacttccttccccagggctccctaacaggtgtctagcttgtttactgaagattctcacagccttttgacaacattcttagagttgaattattttgccattttgctccttaaacatagaatggatggtgttcgcatcacagtaatcctctaaactcttgcgttcccctaatattccccccagtaaaacttattttaggtaaagaaatatagcttttctgttattaaaaacttaagaataattctattttctgcatgatgcccttatgttatgggatatttattagccaggctctctgtacaggatatttttatattccaaactagaataaaccctcttctattcagaatttttaaaattaagaatttgtgattatttagaaggggctaacatttgttttgaaggcagggwtttgtctattttattcattgcaaaatgaatatctgaatataaacatacaatttttgaagtcttagcattcattatatacaacaaaattcttcaacccacatggcatcataaaggtcaaatatgaagtatttatgttgcctttcacccaacaaattcagtagataatatatctttctgataataatacatccccgaaaactgcagtacagtttaaaagaaacaaaatgaaatagatgtttatgttagttgcagttttcttctttgtatttttctatgttctaaattttctggaaggaaaatgtgttattttattttattttatttattatactttaagttctagggtacatgtacacaatgtgcaggtttgttacatatgtatgcatgtgccatgttggtgtgctgcacccattaacttgtcatttacattaggtatttctcctaatgttatccctcccccatccctccaccccacatcaggccctggtgtgtgatgttccccaacctgtgtccaaatgttctcattgttcaattcccacctatgagtgagaacatgcagtgcttggttttctgtccttaagacagtttgctcagaatgatggtttccagcttcatccatgtccctacaaaggacatgaactcatccttttttatggctgcatagtattccatggtgtatatgtgccacattttcttaatccagtctatcattgttggacatttgarttggttccaagtctttgctattgtgaatagtgctgcartaaacatacgtgtgcatgtgtctttatagcagcatgatttataatcctttgggtatatacccagtaatgggatggctgggtcaaatggtatctctagttctagatccctgaggaatcgccacactgtcttccacaatggttgaactagtttacagtcccaccaacagtgtcaaagtgttcctatttctccacatcctctccagcacctgttgtttcctgactttttagtgatcaccattctaactggtgtgagatggtatctcattgcgattttgatttgcatttctctgatggccagtgatgatgagcattttttcatgtgtctgttggctgcataaatgtcttctttttgagaagtgtctgttcatatcctttgcccactttttgatggggttgtttgattttttttcttgtaaatttrtttctttgtagacgacggatattagccctttgtcagatgagtagattgcaaaaattttctcccattctgtaggttgcctattcactctgatggtagtttcttctgctgtgcagaagctctttagtttaattacatcccatttgtttattttggcttctgttgccattgcttttggtgttttagtcatgaagtccttgcccatgcctatgtcctgaatggtattgcctaggctttcttctagaatttttaggttttgggtctaacatttaagtctttaatccatcttgaattaatttttgtataaggtgtaaggaagggatcgagtttcagctttctacatatggctacccaagttttcccagcaccatttrttaaatagggaatcttttcyccatttcttgtttttgtcaggtttgtcaaagatcagatagttgtagatgtgtggtattatttctgagggctctgttctgttccattggtctatatctctgttttcgtaccagtaccatgctgttttggttactgtagccttgtagtatagtttgaagtcaggtagcatgatgcctccagctttgttctttttgcttaagattgtcttggcaatgtgggctcttttttggttccatatgaactttaaagtagttttttccaattctgtgaagraagtcattggtagcttgatggggatggcattgaatctgtaaattaccttgggcagtatggccattttcaagatattgattcttcctatccttgagcatggaatgttcttccatttgtttgtgtcctcttttatttcattaagcagtggtttgcagttctccttgaagagrcccttcacatcccttgtaagttggattcctaggtattttattctctttgaagcaattatgaatgggagttcactcatgatttggctctctgtttgtctatgattggtgtataggaatgcttgtgatttttgcacattgattttgtatcctgagactttgctgaagttgcttatcagcttaaggagattttgggctgagaccatggggttttctaaatatacaatcatgtcatctgcaaacctgacaatttgatttcctcttttcctaattgaataccctttatttctttcttctgcctgattgccctggccagaacttccaacactatgttgaataggagtggtgagggagggcatccctgtcttgtgccagttttcaaagggaatgcttccagtttttgcccattcagtatgacattggctgtgggtttatcataaatagctcttattattttgagatatatcccatcratacctagtttattaagggtttttagcatgaaggrctgttgaattttgtcaaaggccttttctgcctctattgagataatcatgtgttttttgtctttagttctgtttatatgatggattacgtttattgattcgcatatgttgaaccagccttgcatcccagggatgaagccaacttgatcatggcggataagctttttgatgtgctgctgggttcggtttgccagtattttattgaggctttttgcattgatgttcatcagggatattggtctaaaattctctttttttgttgtgtctctgccaggctttggtatcaggatgatgctggcctcataaaatgagttagggaggattccctctttttctactgattggaatagtttcagaaggaatggtaccagctcctctttgtacctctgatagaattcggctgtgaatctgtctggtcccggtctttttttggttggtggactattaattattgcctcaatttcagagcctgttattggtctattcagagattcaacttcttcctggtttagtcttgggagggtgtatgtgtcgaggaatttatccatttcttctagattttctagtttatttgcatagaggtgtttatagaattttctgatggtagtttgtatttctgtgggatcggtggtgataacctctttatcattttttattgcatctatttgattcttctctcttttcttctttattagtcttgctagcagtctatcaatttcattgatcttttcaaaaaaccatctcctggattcattgattttttggagggttttttgtgtctctatctccttcagttctgctctgatcttagttatttctttccttctgctagcttttgaatgtgttcactcttgcttctctagttcttttaattgtgatgttagggtgtcaattttagatctttcctgctttctcttgtgggcatttagtgctataaatttccctctacacactgctttaaatgtgtcccagagattgtggtacgttgtgtctttgttctcattggtttcaaagaacatctttatttctgccttcatttcgttatgtacccagtagtcattcaggagtaggttgttcagtttccatgtagttgagcagttttgagtgagtttcttaatcctgagttctaatttgattgcactgtggtctgggagacagtttgttataatctctgctctttacatttgctgaggagtgctttactttcaattatgtggtcaattttggaataagtgcaatgtggtgctgagaagaatgtatattctgttgacttggggtgragagttctgtagaagtctattaggtctgctttgtgaagagctgagttcaattcctggatatccttgttaactttctgtctcgtggatctgtctaatgttgacaatggggtgttaaagtctcccattattattgtgtgggagtctaagtctctttgtaggtctctaaggacttgctttatgaatctgggtgctcctgtattgggtgcatatatatttaggatagttagctcttcttgttgaattgatccctttaccattatgtaatggccttctttgtctcttttgatctttgttggtttaaagtctgttttatcagagactaggattgcaacctaccctttttttttgttttccatttgcttggtagatcttcctccatctctttattttgagcctatgtgtgtctctgcacgtgagatggatctcctgaatacagcacattgatgggtcttgactctttatccaatttgccagtctttgtttttaattggagtatttagcccatttacatttaaggttaatattgttatgtgtgaattcgatcctgtcattacgatgttagctggttattttgctcgttagttgatgcaatcttttcctagcatcgatggtctttacaatttggcatgtttttgcagtggctggtaccagttcttcctttccatgtttagtgcttccttcaggagctcttttagggcaggcctggtggtgacaaaatctctcagcatttgcttgtctgtaaagtattttatttctccttcacttatgaagcttagtttggctggatatgaaattctgggttgaaaattcttttctttaagaatgttgaatattggcccccactctcttctgacttgtagagtttctgccgagagatcagctgttagtctgatgggcttcccttagagggtaacccgacctttctctctggctgccctgaacattttttccttcatttcaaccttggtgaatctgacaattacgtgtcttgggattgctcttctcgaggagtatctttgtggcattctctgtatttcctggatttgaacgttggcctgccttgctagattggggaagttctcctggataacatcctgtagagtgtttccaacttggttccattctcctcatcacttttaggtacacccatcagacatagatttggtgttttcacatagtcccatatttcttggaggctttgctcgtttcttttaattcttttttctctaaacttctattctcacttcatttcattcatttgatcttcaatcactgatgccctatcttccacttgattgaatcggctgctgaacattgtgcatgcatcacgtagttctcatgccatggttttcagctccatcaggtcatttaaggtcttctctatgctgtttattctagccattcatgtaatcttttttcaaggtttttagcacctttgtgatgggttcaaacatcctcctttagcttggagaagtttgttattactgatcttttgaagcctacttctgtcaactcatcaaagtcattctccatccagcttcgttccgttgctggtgaggagctgcattcccttggaggagaagaagcactctgatttttagaattttcagcttttctgctctggtttctccccatctttgtggttttatctacctttggtctttgatgctggtgacctacagatggggttttgatgtggatgtcttttttgttgatgttgatcctattcctttctgtttgttagttttccttctaacagtcaggaccctcagctgcaggtctgttggagttcgctggaggtccactgcagaccctgtttgcctgggtatcaccagcggaggctgcagcaaatattgcagaacagcaaatgttgccgcctgatccttcctctggaagcttcatctcagaagagcacctggctgtatgaggtgttagtcggcccctactgggaggtatctcccagttaggctactcgggggtgagggactcacttgagaaagcagtctgtccattctcagatctcaaactccgtgctgggagaacctctactctcttcaaagctgtcagatagggacatttaatctgcagaggtttctgctgccttttgttcagctatgccctgccaccagaggtggaatctacagaagcaggcaggcctccttgagctgcagtgggctccacccagttcaagattcctggctgttttgtttacctactcaagcctcagcaatggyaggcgcccctcccccagcctcgctgccgccttgcagttcgatctmggactgctgtgctagcagtgagccaggctctgtgggcatggaaccctccaagccatgtgtgggrtataatctcctggtgtgccgtttgctaagactgttggaaaagtgcagtattagggtgggagtgtcccgattttccaggtaccatgtgtcacggcttcccttggctaggacagggagttccccgaccccttgtgcttcctgagtgaggcgataccctgccctgcttcagctcatgctcgcatgggctgcacccactgtccaacaagtcccagtgagatgaacctcagttggaaatgcagaaatcacccatcttctgcattgctcaygctgggagctgtagactgtagctgttcctattcrgccatctttgaaagtgtgttattttataatcagaaaaaataatcaatactatttttaaagaatgtagtggatgagatcatttgcaaatgtatacctgaggaaattttgaggacatcaaggtcagtcaaggtgattgggagttaataccagagagaaaaatgctgtccttggaaatatgacacttctatcagggactgaattatgtccttccccacaaattcctatgttgaagccctaacctccaatgtgatgtatttggatttggggatttgagaaggcaattagatttggatgaggtcatgagggtagggccctcatgatgtgattagagtgcccttacaagaagggacaccagagagattgcttgctctctctctcagtgtcatgtgatgacacagtgagaagrtggccactggcaagccaggaagacasactttgctagagcccaacaatgctggcatcctgatgttgaacttccaccctttaatagaaataagtttctgctgtgtaagccacccagtgtatggtattttgttagagcagcccaagctgactgacatagattaagcggactgagatccgaactgttgtgtggcaagtagttttctgaaaaccttcatatcttgaaaaaaagaatatagaatcaatattgttgagatatgtttaaccttgataaagaaactacacccttcagtcacattcaaagcacttagtggttaagaataaattagtactatctattaagtgtgcctaatgggagttcaagcatttttccaattcagtcagccccgagatagtgttggtgcttattgctgttgtatcagaggaagctattttagggaacacttttttgagaagtgtgaggtttaagcgcttctacatgttgcaataagaataaaaggataactggtgatgttcatgtagaatatctccagagctttattgaagccgtgtgtatgtctaatgaacacagtatactaaagtacctaaggaggactggtcatctttagaaacaagagtaggatgtcatgctgagataacaaagtagtagcttgctttcttaggtaccatagtagagtgttaaggcactaactcattgccaaagttataaaggaccagtaatttccttatcactggatgttcaatgggtgagaagtagttttccttcaagatggataatatctaagaaatttcataaaccatcatgagtaaaattatacctgccaattgtgtggcatttatctttatctactactgtacatttccacaggtaaatgtggtataagactcaaaattaatattttatactgccttgaccrctgatgaaattgggagagcctcaaattgcctaatcacaagtttccccccaccactgtgatcctgtgcataaagtcttctaaccaaacaactcaccatatcaaaaagaccaaatgcagttcctgcttatgcttgagtagtgggcttcatttccctggcagcccacagtatttaaacaagccaatcacattcttctttgggaaccagggggccctcaccttcttgatactccaaaacctgcctcccacagcccctgattgttcactctgtccttgagtgcaactggagatatagagatacagatatagatatgaatagatatagactattcattcttaggaatataataagcaacacgtgttttaaaggaacatttttggtgaaaccaatttccgtagatgtataactaataaatcctaggtatttagtgagtaattacagatttagagatggaaaatttttcaaagtaataataagaatctggcataagaaagttctgcatctgcttagaatattttgatggatatgcagaaaaggaataggaaaaagtagacagtgaacaaaaaggaaaaattcagagacckagtgtgttagtcagggttcttttagagggacagaactaataggatggatagwtagatrgatagatagatagatagatagatagatagatagatagatagagayagatgatagatagataaatgggagcttattaaatattaactgacatgatcacaaggctccacaacaggctgtgtgcaagctgaggagcaaggagagccagtccaagtcccaaaactgaagaacttggagtctgatgttcaaaggcaggaagcatccagcacagaagaaagatgtaggcagggaggctaggcctatctctctttttcacatytttttctgcctgctttatattccctggaaactgattagattgtgcccaccagattaagggtggatctaccttctccagcccactgactcaaaggtcaatctcttggcaacagcctcacagacacacccaggataaatactttgcatcctttaatccaatcaagttgacactcaatatttaccatcacaagtccaccccttgtcaacttgaacccatacacatctcctgagattatacataatcttcaaataaagataataatgaggtcataattaggcgggacacagtggttcacgcctgtaatcccagcactttgggaggctgaggcgggtggatcatgaggtcaagagatcaagaccatcctgaccaacatggtgaaaccccgtctctactaaaaattagcagggcatggtggcgcacgcctgtagtcccagctactcaggaggctgaggcaggagaattgtttgaacttgggaggcagaggttccagtgagccgagatcgcaccactgcactccagcctgggtgacagaatgagactcygtctaaaaaaaaaaaaaaaaaaattaggtcataattacacctaacataaaacaactatcctttgtacaaccagaaacgcaccaatccccaacccaaatactattacataaagttaacaatatttaaatgctggtctgaagtcaataaattttatgtcaggaaataaaatgaaggcattttcttagtacaagggtatgcatgcacgaacatgtttttaataaaagaaggaggaaatactcatgacagttatagtccttgtttctgtagctggtcatgtggtcatagctcatattgatgactatcaccttctactacccattctgtattccctttgccttcagcaagcacctcagcaggtcgtggatttttcctggtgaagtgaaaaaccttcattcctgaagggtctgggtcatttgtagtcctgcctggattgggctgttgtagtttcccattggccttaatcacagggcatggtaatactaagtgatgccctaatggatctcctatattccatgagcattcttccttacctccattgtggagtagtagacagatttcatcttgatagtctgggtcagtyaccccagacaacactgtaactcccttcttaacctgttgacttagtaggaggagcccaaagtgtccaggtggcaatcttaacttccagtttaatggaatcgttgtgtctcctggtggcagcgttccttcctctggaactaagacctctaggccagcagaacgtaatgtcgcgaaaacaggaagcaaaaattttgctagtggatccctaggggtgatggtgagtgataacacttccacttccaccccttgattcctggacccatgaatcttggctatgggagaaacagtaccatatatcggatgctgattcagagcatacatgcccttctggagaactttgccccagccctacaaagtattgtcacgtagttggcactgtaattgtgactttgaaaggccattccaccattctatcaatccagctgcttcaggatgatggggaacatggtaagatcagtgaattccatgagcatgagcccactgccgcacttctttagccacaaagtgagggcattggtcagaggccatgctgtgtggaataccatgacggtggataaggcattccgtaagtcctcagatggtagtcttggcagaagcattgtgtgcgggataggcaaacccatatctggagtaggtgtctattccagtgaggacaaacctctgtcctttccatgatggaggaggtctgatataatcaccctgccaccaggtagctggttgatcaccccgaggaatggtgccatatcgagggcccagtgttagtctctgctgttggcaaattgggcactcagcagtkcctgtagctgggtcagctttggtgagtagaagtccatgttgctgagcccatgtgtaacctccatccctgccaccacggacactttgttcatgggctcatttgggcaatgacagggatggctggggaaagaggctgagtggtgtccacagaacaggtcatcctatctgcttgattattaaactcttcctctgatcaggtcacccactggtgagcacttacatggaatacaaatatctttacagtttttgaccactcagagaggtccatccacataccttttccccaaattcctttgtcaccaattttccaatcatgcttcttccaagtccctgaccatccagccaaaccattggctacagcccacgtatcagtatataatcgcacatctggctatttctccttgcatacaaagtgcacaaccaggtgcagtgataaaakttctgcccactggaaagattttccttcaccgctgtccttcagggatgtcctagaaagggactgtagtgctgcagctgtccacttttgggtgatgcctgcctatcgtgtggaaccatctgtgaaccaggccctagtcttctcttcctctgtcaactgatcatagggacctccccatgaggccatcagtgcaggctgggggagagaagacagggtggcaggagtggagaccatgggcatttgagccacttcctcatgtaacttacttgtgccttcaggacctgctcgagcccaatcatgtacataccacttccatttgatgatggaatgctgctgtgcatgacccactttatggctagatgggtcagaaagcacccagttcatgayaggcagttcaggttgcatgtgacttgatgacccatagtcaaacgttcagtttccaccaaagcccagtaacaggccaagagctgtctctcgaaaggggagtagttaactgcagaagatggcagggccttgctccaaaatcctagaggcctccgctgtgatttacctatagaagcctgccaaaggctccaaacaacatccctatctgccactgacctcaagcaccattggatcttctgggtcatatggcccaagtggcagagcagcttgcacagcagcctggacctgttgcagagccttctcctgttctggaccccgctcgacactggcagcctttcaggttacttgataaataggccacagtaacccacccaaactccttgcctctcacgagtggtgaatcaggagtgtcaaatgcattaatttgcagaactctctaaacagttcacaccaaggactatcagtgttctccatactactaaaagtagagtccttagattttggggtctaatcatattaagcagccaactccagaaaccccaaaactaactaaagaactccatccttaatattctgttcctctagaacaactcctggtaccaatatctgtattagtcagggttcttttagagggacagaactaataggatacatatatacatatatataaaggggagttccttaagtattaacttacatgataacaaggtcccacaataggctttgcaagatgaggaacaaggagagctggtctgagtctcaaaactgaagaacttggggtctgatgtttgagggcaggaagcatccagtttttttctacctgctttatattcactggaagcttattagattgtgcctaccagattaagggtggatctgccttccccagccctgttaatctcttttggcaacacccacacagacacacccagggttaatattttgtatccctcaatccaatcaagttgacattctattaaccatcacacccagaatagattctgtttttctagctctgattgattcattgagaaaaaaagtaaattgtttttgaaaaaataaacatctcaattctatagtactatttttatacacatttgcttatttggtaatttagcctgcatttttttcttgtttcatggaagtcataaaattgttcttaactgcctcttttattgacttcatacagtgttggtgtcatagtaggtttatcctatctaccttttgtagccatgattcttgtgctcagagcggacaaatcaggatagtggtttatcccctatacaatgttgcttcagaaagttaatttttctaagtgtgtatcacatttttgagaaagtacatataaggtaataaataaaaaattaggccagaaagaatgagaatcaatggacgagtctataaaatacataatataatctattgccactccattctttattcatttttgtggcaactttttctgtgaacattttcatgaattctccaaaataactatttcatggaatgttcctcaataccatagcttctttatcaatgcctgggaaaaatagaaaatccagatttatgttaagacatttagttgacaaaaaatactttagagcatatatccaatgttaaaaaatttagttgtcaaaaaatttagttgacatttagttgacaaaaaatactttagaacatatatccaatgttaagtttggggactgcatttagaataaatattcagcagaattaaaaactcattcgttatactcacatgcaaaacctggaattgagtgctatttcatgaattaggattacccagacctgtatccactgattgtcaatctcttggccagtcttctgcggctttatctgtaaatgatttctgatgtctgcttctgtggatttataaagtgtgctgtcattggtctctttacctatgttaaaacaagcaaaacaatgtaattaactttaattgatttgttgaaaaggatgggtggggacttacactatccattcgtttccctgaaggtgtccctctttcccttccccttgctgttcagaaggtaaacttgaggtctgttgggtgctatgttttccttgttatttatctaaagatctttctgttcttttactccttgaagctggcaaatctttatgattgatttctttctatcaccaggtaactttttttttttttttgtatgtggggctggaatcaaacactgggaactctgaatgtgtttgctctagaaaaagacttgaagttagtgaaagtgcatcttagagaacatgttgtaggggccaagtgaatgtcaattaaagttcactacagaatttctgacttcaaaaatgattttcaaatttgcagatgtgctcttgtatttcaaaactttttcttagtcactgaaccctgtttctgttcctctgaatgaaggatcacacaaagagcatagtgacatgtcatggtagatcagctcacacaggatagggactgtgtttcacttgtgtgatttctcatccagcacacaggtgcactagttgggcacagagttagtgctctttgaaaagatgtgaggacaacaaaacctgcttatcacctacgcagcctctgggactttggcaggtgatagtaataaatagcaatacaagagaaaaaagttttgatgattaaagctctcagctagtaaattttttcccttttgtgtctttttttwaaaaaaattcacatttctttttggtaaagaaatttacttcaaagaacactgctgtgtaaaagtttccttggttcttgatatgctgcctctcatccccagggggaaattgcaggcccacattccattttccttcaattgcacctttttgcttgttgcctgtgaatatcctagaaagtgtgcgcctcatttgccgcatgtggttcctctagactgttcagtcacagagaaactgactggagcttcaataatgccatggcatccttccttccttttctctttgcctatctgaagtccacctagtcttcaaggtcaggttcaaatctcattctcttcgtccacaaaacctacagtgatttcctttattctctgaactgataacatctgtgcctatgctctccttccactgttaatttcttatcccactatgacccttttgtgttgttcaattttaatgtttccttgatgaataaaatatagtatgcaatagttcccaactttgttataaatcctttaaaaggatacataatgatttacatgatttcatgtctattacaatttttttaacttttaatttttgtaggtatacagtaggtatgtatatttatgtggtaaatgagatgttttgatacaggcatgcaatgcatagtaatcacatcatgtaaaatgtggtatccaccccctcaagaatgtatcctttgtgttacaaacaatccagttatactcttttagttattctaaagtgcacaattaaattattttttaccatagtcgccttgctgtgctggcaaatactaggccttatttattatttctgttttttgtacctgttaaccatccctacccttcccaccacgaaccaccccctgcccagtaccctttctagtccctggaagccatccttctaatctctatcttcatgagttccgttgtttcaatgtttggctcccacaaataagtgagaacatgtgaagtttgtctgtctatgcctgccttatttcacttaatacaatgacctttagttccatccatgttgttgcaaatgacaggactcttttcttttttatggctgaaaaatactccattatatatatgtactacattttctttatccattcttccgttgatggatacttaggttgtttccaaatcttggctattgtgaatagtgctgcaataaacatgtgagtgcagaaatatctttgatatgctgatttcctttcttttgggagtggaattgctgaattatatgttagttctgtttttagttttttgaggaacctctaaactgttctccatagtagttgtaccaatttacattcccaccaactgtgtacaagggttcccttttctccatttgtatgtcttcttttaagaaatatgcattcaggtcttttgctcatcttttaattcaattatcagatgtttttctttttattatactttaagttttagggtacatgtgcacaacgtgcaggtttgttacatatgtaaacgtgccatgttggtgtgctgcacccattaactcgtcatttaacattaggtatatttcctaatgctatccctccctcccccctccccccaccccacaacagtccccagtgtgtgatgttccccttcctgtgtccatgtgttctcattgttcaattccctcctatgagtgagaacatgcagtgtttggttttttgttcttgygatagtttgctgagaatgatggtttccagcttcatctatgtccctacaaaggacatgaactcatcattttatatggctgcatagtattccatggtgtacgtgtgccacattttcttaatccagtctatcattgttggacatttggattggttccaagtctttgctattgtgaatagtgccgcaataaatagagttttctgagctccttatatattctggttattaatcccttgtcaaatgggtagcttgcaaatattttttttcattcggtgggttgtctcttcactttgttgattgtttcatttgctgtgcagaagatttttagctttatataatcccattggtccatttttgctttggttgcctgtgcttgtggagtattactgaaaaactccttgcccagatcagtgtcctgtagagtttctctaatgtgttattttagtagtttgatagtttgagggcttagatttaagacttcaaaccatttttatttaatttttgtatgtggtgagggataggggtctagtttcattcttctgcctatagatatccaattttctcagcactgtttattgaagaggctgatctttccctggaagtcctaatatttctagtctctggctgttcttctccatttgccactgctacagccctagataagcccattgacattctctcagaggaagagaaatttgaaacatgaatatttttaaaatcttcaaacttatcttcctgttgtcattctattacaccttcaatacacattcttctttgttgatggacaatattgctaaagtgtaaatttgatcacccaactcttgattaaactcctttacttgctcctaaatgtctactgaataaaatctaaaatatttagtatggcatacagggccctcgaaacaaggctcacacatacttggtctctcactgtgtatagcctcctcccttccctgtgttacccaagcccaaagccataacaaaatttaaccagttttctgaacatagccaaattgtttggtcaatttttacgttttcctggagtgttactcctttctctgttctatgactctttcttgataactgagttcttgccccgatagaatgaaccaacctctttgtgtaccaccatacttactgtccattgtacccaccacacagttgttaatgcggataagggatcaagatttctagctgagcaaaatgtgaacctcgaaccaccctacagatgatttcttaaagagtttatccaaaaaaaaaaataagaaaaaattctggtttkgtagacctacaaaacagagcctttatttacttgtgtggggagctcttattcgtggggtattccgagagggtgtgaggagttcttctagtcactaagaaccagaaaggagggtgaaggcaactatcgactggacttcagagagatttagacaaaagaaacaattacaaccaaaaggtcaacccaaccacccatatcagattccattgatkggactacatttcacgtggcatgtaatcatcagcatttggggaaatgcttagatacaagattgtttgtgctagccccatgccattttcttagrttaccatgtttctccctggctctggatgtagaaagtagatagtgcatttggttaagtaggcacatatgagggcaaattatagggttcagggtagagtggatcttttggagagaaaaggccaaggtgtatgtatgcatatgtatgtgtgtgtgtatgcatgtataaagtacaggwgtatgtgttaaaaaaaaaaggcatcttggatgtgagggcgatctgcctgcaacatctgtcaccccattgatcgccagggttgatccggctgatctggttggctaggtgggtgtccccttcctccctcacctctccaagtgtgtccctcttgaagctgcatgctcagtcgaagaggaagaccatccctgatagaggaggaccggtctttgatcaagggtataggagtagctgcactcccctgctggaacctctaaacaagctctcaagaaaagggcctctctgcatatccatccatcatgatcctggtcctcaagtttcagcagcagatttcttgaagccttcctggatttctgcaatcccacccccacccccaccactcctcttggaagttatatcatctacctcatgaacaatcttctgtaccaatcactttcggcgtatcatcatgacttctgaacagttctcatcttctatacaagagtaggagatctgagggcagagagtatattttatgtatctttctttccccctgcccacagcaccaagcataacgccataataaaatcaggttcccaataattattaattgaacaaatgagcagataagtgaatgaatgaaaacttaaaatcattgaatgaatgatagaaagtaattgggggaatgggtaaacaaagggatgcactgaggtgattagaaactttcagcataaaaaggcaagtgtgagcttattctctaactgacagaagggacattttaattagagtcaaaatttaatctactcacctaaatttaccagagaccaatttcaactatgtgttttgattattacatttaaaaatgtagagacattgtgttgccattgcagttactatggtacggctatgagggtagtgagatttgagaagagcagcccttctgaagctgagtaattgaaaaggacttccgtacagatatgcctgcctgaatgtatctaggactttatgctcctatatcttgcaatggttagcgttttgttctaggaaattctactgtacatacaagctaaacttcagttgtaaaaaagaactatgtagaaaagtttctaaaacccattttgccaaattagaatatctgttattggtgatggaatttggtgtgatagagaatagcttatatcaggaagtctgagttcaagttttgtctctgctgctaattagcttgggcccttggaggcaattttagttcttttgattctcggtttccttattttataaaatgagggtgttaaatgaggttaactctgataggatagataatatcctatcattctatacatgagtttgaaaaaaatcaaaaacagtcattttctcaaaagttacctccagtgctttctctttgatttaaagaagggcagttgacaagatctaagcaggtttttaaaatgagaagattraatacgttgtggtaataactatatatgcacatattgatacatgcatatrtatgtgttacaaggaaatgaaaaaatctgttagcaaagatatttatcacataggactcagtcagccagggatttactactccataccgagcagagttgmtataggaatgtacacatcctgggaataatattagttgcaagtcagacaattacaaaaaattttataaaacagttctacagcatggctgtaataacaatcttccccagactcttttaagtagtatttcagaaatattcaattcagaattaagaaatatgaagtatttctgtggtttttctcttttatgtctacttgttaaaactcacagcagaatggcatttgacagtaaaaaattgtaattagaatgcctctttgacaatgatggggtaaagtcaacatttccctgtacccttgaggaaaatatgtgaaagtcacaaggaggtaagaaaagaaatgaactctacctcccacaaaactaggagtcagctaaaactttgaactacaaaataggtgaaattccagaatcaatgaaaataaagcagatttgcagtagaaactggaaaagtacacacatggccccagatctaaaaaagggcctatgaagtatatttctcgaagactatgtggttaccctaagttgcataagaaaatcctgtgttcacagcattgggtagtggattcacaagttagaggtggtagcttcctgtgacttatgttggttctggggagcagcaaaggagagactaatgaggattcacagagataagtcctatgtataggagataaaggccaaaatagcagccatagccctttcccctctaagaacctcattacagtagtaggttgggtaaaaatacacctcattaaacaaacggaagatcaaaaaataaacaaagcaaggatataaccaaaaaaaggagaaaattatcagaaaaatagagaacccaactgaaaaaatgctgctaaatgttctcaaatgaattacaaaagaaattttgagggagagtatctatcatctcaggcgtttatcctttgtgttacaaacaatccaattatattcttttagttatgtttaaatgtacaataaattattgtagactatagttaccctgtggtatatcaaatactaggtcttatttattctaactatatttttgtactcactaaccatatccactccccgtccccctcactaccctttccagcctctgataaccatctttatactctctacctccatgagtttgttttaatttttacctcccacaaatcagtgagaaaatgtgatacttgtctttctgtgcctggcttacttcacttaacttaatgatctccagttccatccatgttgttgcaaatgacaggatcttattctttctgatggctgaatagtgctccatttgtgtagatgtaccacattttctttatccattggtctgttgatggacacttaggttgcttccaaatcttggctgttgtgaatagtgctgcagcaaacatgggagtgcagataccatttcgatatactgatttcctttctttgggtatgtactcagctgaatagtgctccatttgtgtagatgtaccacattttctttatccattggtctgttgatggacacttaggttgcttccaaatcttggctgttgtgaatagtgctgcaacaaacatgggagtgcagataccatttcgatatactgatttcctttctttgggtatgtactcagctgaatagtgctccatttgtgtagatgtaccacattttctttatccattggtctgttgatggacacttaggttgcttccaaatcttggctgttgtgaatagtgctgcaacaaacatgggagtgcagataccatttcgatatactgatttcctttctttgggtatgtactcagcagtgagcttgctggatcatatggtagctctattttcagttttttgaggaacctccaaactgttctccatagtggttgcactaatttacattcccaccaacagtgtrtcaggattcccttttctccacatccttgccagcatttgttattgcctgatttttggataaaagctattccaagtggggtgagatggtgtcgcatggtacttttgatttgcatttctctgatgatcgatgatgttaagcaccttttcatatacttggttgctgtttgtttgccatttgcatgtcttcttttgaaaaatgtctattcagatattttgcccactctttcatcagattattagattttactcytattgagttgtttgaactccttagatattctgtttattaatcccttgtcagatggatattgtgcaagtaatttctttcattctgtgggttgtctattcactttgttgattgtttcctttgctgtgcagaagctttttaacttgacgtgatcccattttccacttttgctttggttgcctgtgcttgtggggtattactgaagaaatctttgcccagtccaatgtcctggatagtttccctgatgttttcttgtagttgttttatagtctgaggtcttttaagtctttaagccattttgatttgatttttgtacatggcaagagataggagtctagtttcattcttttgcatatggatatccagttttcctagcatcatattgaagaaactctcttttccccaatgtatattcttggcaactctgtcaaaaatgagtttattgtagatgtatggatttatctctgggttctctactgtgtgccattagtctatgtgtctgtttttatgccagtaccatgctcttttggttactatagctatgtagtataatttgaagtcaggtaatataattcctccagtttttgttctttttgctcaggatagctttggccaccatttgggtcttttgtggttccatataaatttcaggattattttttctatttatgtgaagaatgtcacagatattttgacagggattgcattgaacctgtagattgttttgggtgtatggacaatttaacgatattgattattctaatccatgaacatgaaatatctttccatttttgggtgttctctttaatttcctgcatcaatgtcttatagttctcattgtagagatcttttacttccttagttaattcctagataattttatttgtagctattgtaaatgggagtactttcttggtttcttcttcaaattgcctactgttgacatatagaaatgctactgtatgttgattttgtattttgtattttgcaaccttaccaaatttttcatcmgttctcatagattttggtgaagactttagctttttccaaaattaagattwtattgtctgcaaacaaggataatctgacttctttctttcccatttgggtgccctttatttctttctcttgtctgattgctttagctaagacttccagtactatgttgaataacagtggtaaaagtgggcaccctgttcactcaaagtgatcttgggtaagatccatgagaattccctgaattaccagacagagactcttgttctcttcccttactttcccccacacaaacacagcctctctgtctgcactgagctgcctagaccttggggtggagtgacacaagcaaccctgtggccaccaccactgggactgcactgggtcataatcaaagccagcacagcactggctcttgcccaaggctcccagggactactacctggctaccgcttatgttcactcaaggcccaaggttggtgaatgtagccagcctgtgtctttcccttcagggcagtgacttccctcaagccccaggtgaatgcagagatgctgtccaggacccagggcctgaagtcaggaaccttaggaatctacctgatgctgtattctacctcagctgagctagcacccaagctacaagacaaggttcttcccacttttccctccctcttgacggcagaggagtctctctctgtggccaccacagccccaggaccacagcaaatactgcctggctactgccaatattcamtaaaggctcaagggctctgcaatcagtttatgttaaatgctgccaagcctgtgtctctcacttcaggacagcaggctctcctctgtccctgggcaggtcgagagtgcaaaggcctagaatcagggactgcaggagacagcttggttctctaccccactgtggctgagctggtacccaaactccaaggtaaagtctcctttactcttccctgtcctttcctcaagcaataagagtctctccccatagccacctagctgggaatgtgctgggttacacctggggctagcacagctctgagtctcacccaaggcccatgatgagtactgcctcactaccatttgctgattattcagtgcccaagggctctttaagcagcaggtgatgaatcatgtcagtatttgttcctttctttcaagagaatgggttcctttctggccccaggtgtctagaaatgtccaagagttaggccctagaatgggggagcctcagcaccctgcctggaaccccattccactgtggctaagcttgtatccaagttgcaagacaaagtcctttttactctcccctctactttcctcaagtagagggaaagaattgcccccagagctgtgctgcctagggttgggaaaggcttgacttaagcagtcctttgcttatcctggctgatgtctaactaggttccaagcacaccaagtccactggctttgaaccctgcacagcactaagacgtgcccaggaattgcagcctttgtgacctagactgcctttcaaatttatttaggacaccagagcactttagcatgcattggaagggcttgctggaaatcggattctgaccactgggatagattrtttgcctctgtctaggactggtctaaatgctctctttgtgggtgcccgctgaattctgtcctgtgttgttttccactgtggyaacattgaatcaatcaggcagcgctgaattccaatgctaagtcccatgatcacttcactcttccttaccctatctcacagattctctctccataccacacagctgctgctggaggattgggaaggatggtataggcagctcaagactgcctttcctaccctctttggtgcctctttccttaacttgttcaaagcagatactgtgatcactcacttggtttttggttcttatgaatgtgctcttttgtgtggatagttgtttgatttggtgttcctgtagggagatgatcactggaagcttgtatttggacatcttgctccacctctgagacatacaaaagaaatttaatgaagaaaatttcttaataataaagtaaagcacaaagtagagagaacgagaggaaatgaaatgtgagtgtacaggtcatagtaaaaaagtaaaaaaaaaaaaaagcctcaaaactccattagacaaataaattagaaaaagtacaataaggaacgcagaggatactgatgcataaatagggttgaatgttagtgtagatatggaacatactcaaagtaaatgaaatgtaagtgtaaatggagcttacacataagtgtaaagggagttcctaaagaaggaagctgaagtattggaacagaacacacattaagaatttctgaagacamtttataaacaaaaacattcaatctacagactaaaagggcgtaccaaatttcaaagaaagttgatacagaatggccatggtaggaactgctggctgtatcccaaaatctgttctacctgctcctgagcatggagctagatgacacttccttgcttacttagggagtggctatgtgatggttctctccagtggaattaagcatacttaatgatttgccatagcatgatttaagtctccagcttcctccctagtaatgtttatttccttatcatccaatatcaaatcatgaaaacaatgccacatattttaagtcagagttatcttatcattccatttctgttgcttatttccataataattagtgaaggctagattactataataaatacactcaaatgaaatagtgcaaaacacaaaagagtttatttattgctactgtaataatcaagattgaatgttccaggttggtgaaggaggacctctcttccccacagtcattcacggacccaggcttgttgttccatcaaagcctactgacctaaatgctcaataaatgctatcattaaccctttcctctggtcctagcttatggaaaggggatgaggaacatggaggagtacatcaagaaagcattattgccgggcctggaagtaacgcaaaggtgttccactgtacagcttccaaggaggtcatatttcccwatgctcccttcagataaggccrtggaaattgggcaagcaagaattttctgagggtgaaatgagaggctacagaaaacagtaaattcctcatagagagcagttccaaggtataattgagaaattgccacctttgtcaagacttcacactgcttgccacactgggtaagctgtgacttctgtgtgtttctcattctttccttttctgaatggggattttcgccatggctagcttttctgtacgccactgacattattggatatttgtatatatgtgtgtttgaaaagggcagatgttggattgtatttttaatctatagattgtcaatcctccgggaagcagaactgggcctgatggcaaggatagaaatcacatagaaatcctgaattttgagttggatgcaataactgaataatattgagttttctcccttgtggagaggtgactgtttttcacatgtggtcagtggaatctgcatgactattttgttgccagaggagcagattgtggcagaagtgtctcatgtccaccaaaagattttcttcttcaacccttacgcacattttccagcctcctttgtgtcatgtgactgcattctagtcaatattatgtgagcagaagtgatgtgtcccagttttagacatggcccataaaatatccatgggaactcctccatgctcattccctcttattatgaccacaatggtcaaagaaggcagagctgaatgactatgtgggttagaagcccccccaaagcctaacctgaaatatatatcctatgagcaagaaatcgatttctattctttttgagccattacttattgagtctaccctgtagtagtttatcccatgccaactagtaacacaggccatgctgaggcatcttagtagtgctacgagacatcaaagacaaagaaaaatattatttgaaaagtcaggcaataaaatcaagtcacttaaaaatagaaaaaatgaagctatcctcagattaatgcatagcaacatttgacataatggaacaattcttactaatcctcagggaatgaactgtgacccaagaattttaaatttagacaaactgtcattcaagtataaagacgacagataaatatattttagggaatatattgtatatcttaaagtacattgtttttatgaatctttctgaaagacattatgagaagatgaactttagttttccaaatactgactggaaaattatggcaaaagactgacaatgagaattgggtttatttaaatataaattacagcaaaagataaacacacctaaagaaaggtaccaataatactaatatgtacaatttccaataaatatacaatagttgtaaataataggcactaaataataaagaatcaacatttatacagaaaatgctagagatatatgatgctagactaatagatatattatgctgtataatgctagggaaatagaaaaatgttagttataacaggtgaataccttttttggtttgtaacaaagcaaggggacaaaaaagagcagacgataataacttagtattaaaaaatataagtacgaggtagatttataaggtagatttaattgctacatactgaactttgtatcttaaaaataaagaatatgcctactttttaactatcagtaggatagtaaaaggaatgaccatatcatatgccacaaagaaaacatgaataactatcatataatgatatagacaaaactgtgtaatataaatgcaataaactcaaatttaataaaatcggatagtcaaaaagccccactactagatatttagaaaccttttcttaaacaacttataaacataaataacagaacataagaataaggaaaatactacataacagcacataggatttacagtcagaggataaattatagtctacaagcttatgttaatgaataggaggataaatcatagcctgtaaacttatattaatgaataagaaagcatgactataaatgaattaaacatgtaactaaaggagatagaaaaggacsgaaaggaaaacagaaataaggaattagtaaaggtaaaggtagaagtcaatgaattagaaaactgaaaaatggtaacgctatatgtatatccaaaagatgggtcttacaaaataaatattacaggagataaatgccagctaactatgcaagaaaatgggagaagacacaaatgtataaatttaaaaacaagaaagaaaataaccacggtggcagatgaaattaaatgaagcataggagcctggtttccaaaactctatgcaaatatatccgaaatatttgaaagtggattgttttctaggagaataaaatgtattaaaacagattccggaaaggggagaaaaatatgaaagactaattaacatagaagaaataaagttgtcaaagacctaattttctaaaaaggactctgtccaggcaatttcatagaggataaatttgatgccatttaaattgttccagaggctaagtgaagaaagaaagcttctaaatttattctatgaagtagtacacaaaaagcacagaagacaatctacagcacaatattggtgtaaaaatcagaaataaattattagcaaagacaacttagtaggcaattaaaagaagtcatttcaagaacgtgagggtcgttctatattagaaaatatattgacatacttcatctttgttatagatctaaggtgaatcgcataaacatctccaaaagttttagaaaagcaatgaaaaagttaaaggtaagccagttgccatagaccacatattgtctgattgtgtccatatgaaatatccagaacaggtagatctagtgaaacaaaagtagatcaatggttgcctagggtaggagggtaggatgaggagtgaggaaagtaatgggtctggagtttccttttggggtgataaaaacattctgaatttagattgtggtgatggttgcatgactctggatattctaaaatcgtattcttcaaatgggttgattgcatggtacatgaattatacctcaataagactgttaaaaagtcagtgtacattctggattaaaatattatttactttaaataaaatattcttaaattgatttttaaaatctgtctcaacctccaagccgacatcaactttgatgagggaagcaacaatgtttctttataatctcttgggacaaggcaaggatatgtactgtcagtgctgttatttaacactgttcagagaaacaagccaatggcaattagacaaaagacagaaattagagacataaaatttggaaagagtaaggcaaaattatcattatgtgaactgctattattgtagacatagaaaacctaaaactaatcaagaaaaaatataaaactgtaataaaatccagtaagatggatgagtataaaattaatagacatacatcaatagcttttatatttgcagattacaatgacataccatttagttgaggaaaaatcactgtatatattcatactagtcaccagctctgtgacctaagagaagttacttaaaatcttggcacctcattttcctcacatctgaaatacagaaaagaaatctctagctccaagagtttttctaatgactaaaggtaataattattcaataaatgctggtgctcttctctagcccttcctctaagaataggatgcaatgtctctctaaattggttcacatgtagtgttggtggagggagtgcaaactgataacctgaattacctcgggatgtccatttcttccctatggcaaatgacaaccttgtgccatttcttgagatagaaagtgagcttcttctttagcaccaactttaatctattaacagtgcaagctgggggtgctatgttgaaaataattgtgaggctacctggactaggtgaaaaaaaaatctatgattcattatgactgactttcttagggaatcagaagagggtgtgtatttatgggagcaaattctgcaccagaatatgcatctcagtttcctccttttctccatgttccttacaacaattttacctaaattattttatgattagaatcaaaaattgcaaatatggcataaatacatacttagttatttatggtctaccagtagcagatacttgcttttcattaaatgatagtcaagatttattagtcataaaagcaaatatttcaaaggcaaaacccaggataacgcttgttatagtaaaaaacctctctctagtcatctttacaattgtactattattttatcagactttagacatagtattctttgcatttgaattaaaattttattaaactcatagaatcaatagaacagtattattaaacataatatattttcaaaaacctccaatacaacagaacttttatattttaaaaagtatcatccttcaaattagtcatactagaatgctaattacttattcaactgatattgttattgtttgaattattttctgagtttcttcttgcaattaccatcctagcctgtggtactttcttttgaatatgtggaaatagttagaaataatttagagacaacttctaggggagaaaatatatgttccagttgaattgtcttgcttggcactaaaacaaggaaaaagtttaagttttgacagtaaagtagtaagattggcttttcagtttgtggcttgttcattgcctgtaaaagcacttgtatgcacgcatacayacacacacacacacaaattcaaaatgttttgagtgattgcatcattgttagagtagattccacttgcatcattgccagagtagattcataacaagtcattttggtcccttatcttgtgtttctgctacctaaatcagcttcagaccagcagaaatagacgtacccaagtttctcatgcaatgagtttcccagtaaactgaatgcattgtggggtaatggatcacattccaacagctgtgagtttcaatactgacattgctgctgtgtaatattcaatgtaatctcaggcagccttgatgttattgttattacacgacataacaggttgttaggataagtgagataacatgaaaggtaccaagacccagtgcaagcactcaccaggtgtcagtgcctggttattttaaatcaggcttggaataagatggggatataatgaaatactaagaataatgatatcttctagttatttttattctaccatagaattgtgcaatttccctatacactaatcttttataaatagaccaccattggtttctgaatattttctatgccataggcaattttctttttggacatctttgttacattcagcctaagacatgatttaatctgtgatcctggaacagtctgcccgaaaggggaatcattgagggttactcacacctaaagttaaactcagggaagaagacatcttccgagattccagggacagagagctccaggggtctgaattacaacttgtactctctgtcttataattaaatttgtaacaattagtgctgaccagagacttcaacactgagtactagtgatctaattaaggccgattgttctcagaacaattccaacagtgcttaagataagtagtagaggcggaattatagaagtggtaatgtgacttggctcttacagggatagcagggacttcatttttgatttgggttgtgatctgttctagatgtgatattgtgactaggaagcaactgatgcctctcttgggggctttatttttctaattttcctctgaaccagtaaatatattaagtttgatagttgtgaagcatcagtgtcatctactaggtataagtttcagaaactattttatagtttaaaatcttgatttttccccttaaaacmaaaggtatattatttttacaaatttcataatgattatttgttgatgaaatttacctttttttttttcttgagacggagtcttgtctcgctctgtcgcccaggctggagtgcagtggcgcgatcacggctcactgcaagctccgcctcctgggttcacgccattctcctgcctcagtctcccgagtagctgggactacaggcacctgccaccacgcccggctaattttctcttgtatttttagtaaagacggggtttcaccgtgttagccagatggtctccatctttagccagatggtctgcatctcctgacctcgtgatccgctcgcctcggcctcctaaagtacattttttgttttattcagtacaatttacaaatgaaaatagtacatatgtatagactataaagtgatgttttgatatgtatacattgtgaaatggttaagtcaagctaattaacatatttatcatctcacatacctatcatttttttgtagtgagaacctgtcaggttactcttgcagcaagtttcaagtacacaatgtattgatattaactatagtcaccatgtgtaaagtagattattactttttcggtgaattggtcctttagttagatctagatagaaagacatggactccctttggaagatcctggtttctgttggtgaatatgttggcagttcgaagaagttgagctgttcacagggcatgaaggtttgagaccacagttcccagtggtggaatcaagtttctttctagaagttgctgtattgagttggccgtagtgcatgtcaacaaactatggtagaaaaaataatgttgcattatcatgaggagcaaatagccagatcaaaactcctttgtagggactctaactaaaaactatataaaaccttgggcccatttggagcactcatagcttaggaggtctttgaatcaaacagaaaatataatcaaaagtgtttcctaaaaaatcagagtcaacccattagaattagtcaaatgtcatccactgaggtattgcatttcttcaaatattgccctcttctacttctcgtttcctatgtattatttcacagaatgtacctcaaccaatatgatttcagtaataataaatgctatttaaaaagacagctcagtagtaaaatcaaagtcaaaattttatgtcatttcatatactcatgcctgaagttaacatattaaagggtcaacatgcctctaactctataacaatgtactaaagttctaggcttatcatgtggcaataccaagtgctttagtaaagggtttctcagacagttgtctgtggaccacctgcccaaaatccaaaggatggattcttggccctgtcttcagacctattgagttagaatatctagagggtatatctaatgaagtttaattctggaaatagcactcattggattagaagaagcagttcgtatcttcaaggtagtgaaattaaacaccaaaacttggcacaactgaagttttatttgtaatcacaccactcaagaacgaacagttgatttggggacagacagatgaataagcatgcaattataatacagtgtgataattgtgaaccaggaagtattacttacattatgcaggataaaagaggaagtgacttattgcttgcagggagggttggaaaggcttcaccactggaagatcaaggacggatttgctcattagagactgtggaagggtctcactgagcagattagcatagggaagcaatttagctgtgctgggtgaattttgcttcattgagatagtacaaagccagatccagcgtaaagggtaaagaatcgataagaaatggttaccttcttgggaagatttccaagctacccttacatttttaagcaaagttgtattatgatgaaaatattagttaaagattgttctagggatgttataatttagatatctatcgtctctaaatctcatgttgaaatgtcatccctaattatattagcctgttttcatgatgctaaaaggacatacctgagactgggtaatttatttaaaaagacaaaaaaaaaggtttaatggactcacatgtccacatggctagggaggcctcataatcatggtagaaggtgaaggagaagcaaaggcatgtcttacatggtggcaggcaaggagaagtgctgagcaaaagggggaaaagccccttayaaaaccatcagatctcgtgaaaactcactcactttcacaagatcagcacaggggaaaaacctggcccatgattcagttaccccccactgggtccctcttatgacacctggggattatgggaactacaattcaagatgagatctgggtggtgacacaagcaaaccatatcaccatattggaggtaggggctagtgggaggtgactggatcatggcagcaagcagatttccatgaatggtttagcaccatcctctggtgctgtcctcatgatagagagtgagttctcatgagagagacctggttgtttaaagtgagtggcacttccacccactctctatcttgctcctgctcttgccatgtactgcctgctccttcttcaccttctgccatcagtaaacactcccagaggcctctccagaagctgaatacatgacagctccaagcttgtacagcctgcagaaccatatgccaattaaacctctttttttaatcatttacccactcttgggtattcctttatagcaatgcaagaacagtttaacacgggggattatgggttatatgggctaaattagaagagacccagagataaaccaagaggcatttgtaaaccaagcatatagagatgagggcctgatctaagttaggggctgtgtaaattagaacaagagggtaaatagaaatggcattttggagccagaaacatcagcacttggtaaatgtattctgacctaacacttgtacatggagtgattcagttttctatattcatagcttaagactcaatcattattttctaaaatgagatttcatccctttctgtgtattttgactgtggcaaatataaaatccttccctgatgtgatgaattatttaaacactataactttattaatacctccccaacatgtagctcatatggaaatatgcttccattaaattgttgataatgccataatagacttaggaaaaatatattctactggtaattattttgtatcctgtagcttcattaagctccttgtctaggcttcaggaagatgtatgtgctgtattaatggtctatcgactattaaaatgtaacacgacttttaaaatgaagggtaaaattaccaaggcgcaataagtatgaatgatggggaaagtgagataatgagaacatagtgtgggaccctccttgacacaatgtatatcagctgaggatgtgcaaattaatttaagtgttaaatgcttggaactcaaatctttcaaagagttttttttcttttccagttagcatagcacttgggtaggacaagggtaacctagtcaagtgttcttaaagagacactacattagaattatactatttttgatacagaggaaaactacacagatacataattctttagggactcaagagtaggaagtcagcaaactgtggccaggagggaaaatccagcctgctgcctgtttttcgtaagtaaagytttattggaacacaaacacaatcaccctcattcattcatgtatcatcactggctgtctttgtgttaaaacagcagggttaaatagttgcaacagagactttatggtctgcaaagcctaaaatattttttgcttgggcttttawtggcccgtgctttaaaaataaaaagtttgttgacccctgctctagaaagaaaaataatattagagcagcacacgagggtggtctattctagtgcctttgaagctccatttttgctccttcctatttctagatagggaatcagaaattatatcattcactagtgtccttcttacttgtaaacattaggactgggtcattcatagtcattgaaattgctccctaacttccacctttccccaccattcttccctggtactctgagctccagccaccacactagccttcttgctgtttctgaaaaatgccatgtcgtattcacttcaggacttttcagcagcctggagttctcttgcctcatattttctcagcttcaatgccctatgctcagggagggctttcccgctcaccagattcatagcattgtcctcctactccatcacttgttaactcacttctctcttatatttttccattgcatgaatcactctctgaaatggtttagtctactttttacttagttactgtctgttttcttcattagattgtcaactccaacacctagagcactgcttggcacataagaggcctccatatttgtgatggtggctgttgaaatgctttgctgtaaggcaaagtcrrcaatataatccagagggcaacagagcgtgatttagattcagaaatgtatttagcctcatgtaaattaatgtgtggaaaagttcataatttcacagacacttaaggcctaattttactttcaaaatattccagggaacctccacaaactcccgactgaaaaatgtctgtcttcrtatagtttttagaacatctcaatattctgttttaaaagcaaataccctatacccgcttcagctccaaatccttgtctgatgcttgggttattttagtaaccatttttagacattccagttttcagctataacattaacttgagaatgaaagtagagttacataacaagtgaacagcctcctcaattatgactaactttatgtattgatctcaccatttgtatatgcaagaatatatatgctggaaatcctagtgaaacataaatgacctcatttttaatcagtggacttcagtcctttgggctttcaaagcaaccctttctaggaaagaaggctcagttacatttgctgctttaattttcagataaagtccatctactgtgacacactgttctcattagctaaggaaatgaggtgacagaatttaggtgggcaattcttagtgtgaaagaaacagccatttgactccaattaaagagatatggcttggtaaatctctagtgctttcacaaattcagtgacattgttttagatattgtcaagtaaacttgatagtacagaattaacaaagaaaaaatgtaatccagctagcttcccttgctcaagatacttggaatggagtgcaggttacacagcatgtattctagagagtttgaactttttcaatgttaagcattcctaattcagcacaaagcagtgttgtttatgtagtattgttgacttatgagacattttgggctctgtgcacttaaatatgtcaccagagttactctttaattagtaagatgctggagtactatttagtaaattactcctacagtgaattaaatgacctccttttctctgggaaaacaaaaccaaaacttcgtcttcttgtgaacttaatttatacctaattatgatcagagttgattttggttttaaaaacatattattttatttaaagctgacttgtgacttgtgctctgactggcattaactagatttacaaaactgctcgattttcatgcccactagtatcaattggtaacaccattgttagttctagctcaaccgtattggattatttggtgttaactggacatttctgtttggacacttttcttgatattgcgaaatctctgagttatggacaaaactgtgtctgccaaaatcatatgttggaactctaacccctataggggtgactatatttgragacagggcctctgaggaggtgattagtgttaagtgaagtcactagtgtccttataagaagaggaagaaatgccagagagctctctctctctgtgtgtacacagagaagagaccatgtaataacacagtgataaggcagccgtctgcacatcaggaagcaaaacctcactggaaatcagccctactggcatgatcttggacttctagtcyccatgactgaaaggtaaatttcagttatttaagcccctcagtctgtagtatttttgttatggcagtcttcaagattaacacattctttattttaagaaggatgtttgatattttttgtgcctttgagaatgataatcagtgatgctgcagaggactatacagggaaaagtcacagaggagcccctgaaaaattaaaactatcattggaacacctgagaagcaacacaccaacaactatgaataaatgcacactgaaggcacatccaaaagctttccacaaatggtctgggtttgatggaaacatatttgttttaaatcatattcagaatggttcaggtaataaattatctgaagaatgtgattaagagctataggatttatagctaatattagcaagagctcccaaggtgctgctatagtgaactttcagtgtaatacacattgattcataaaggtaagagtgaccctgcagagaaatgaaatactgagtcaggttattttcagacagtccttgcctgaggtgagttttagtgtggaatggtcaccggttgggtataacaatctgagttgaaggagtgatggggtgcatcctgtagggtcccaagatggttgcttagttccaggatagtttgtctcctgatcctaagctctctgctagagaagaactacaatttgggcggctggcttttttcattcataccctcttagaattctttttctttcaaagttgtgttgtaggtgaaaatcaccgagtcttagaaatacagctgagaatgagtaaggagagagagttgctctgcctaagcacattctccctcactgaaggcactttgaagtgacctcaggaagatcacagaagttcccctagcttcacccccactatagaaatgcaaccagaaactattcaaagacaaaaataccatcctgaattcaccagaacctggagaagtggagacacccactgggcacacaattgagcgaagttgccagcagtaagagaagccgccatttgagactgcaccacacctccctcaagccgtcagaactacactcccagagaatctcctagacccaagatttctgaggtggaaggagggaattggaggtagacatttgatctctccaccagtcagggaatcttcctgggaagcccactctggtcccgtcccatgggaatcattggaagcaccagaagtgctgaagcacctggggtaaattgggggattaaaagcaggggtggtgattgcagtaactggcatggataccttggcagctgctctacagtctgatcagcagagataccatgctgaggagactggctggtgccacagggttgcagagggcacaataaacaggaaggccagacccctggctggattttcacaaaacccagctgcttgagtgcagccttcccctgactgggaaacaactgaaaggtcagtaattaagttccactgtttgtttaagtcttccccagacagggcaattagttcctgtgcagtgttttagtcctggtgctcaccataagccctccccagaaaaggaagccacagcagaccaataattaagttctgattttaagtagtagatatctaaaaccaccaaagaacacctgcaaaagctggaaggggtggctgtctccttaaatgcacaggtatcaatgtaaagacacaaaaattatgaaaactcaggraaatatgacactgcctaaagaaaccaacaaagctccaataatggacttggaattaaagatctgtgatatgtccaacaaggaattcagaataatccttttaaatgccattcaactgtttttaaaaactstgttgactcccccaccaacctgtcttgcaagcctacctctgtggtctgacttgctgatgttaggccccggagagatggtcaaggttagattatgtggggggttgtaggtgatagcaatgagtttggattttctttcctctgtgccatcaaaaagaagcacaatgacattgtttgctttacattttaagtaaatgtttggaataagtcgtagcaggttaagaatgaaattagggagaccagttatgctgcttcagtagaagaggcaaaaaaccacggtacctggataaaggcggcagtggtgaacacggaaaacagtggatggatgcaggtaataatttggagatacagccaatagaagttgctgctgaactaaatgagagggtggtgatacaagagaaaagacagaattgaggatgacatctgcatctggggcttcagtaattgggtagtggttccaagcacagaattggaaaatgttgtgtgaagcaggttttcagaggaaaatcaataattcccttttggacatgttagttttgagattcttgttaaatatccaaatgtcagacagttaccttcactagcacggagttcaatgaastgagtttcttgagatacaaatttggaagttatacttttaaatgctcaactggcatttaaagtcatgggtatggatgaaatcacctggggtgaggaattaggtaaggtgaaaaataaaaagattaatccacaatcctcgttctcaaataatgtaggtgagaaaatatacatctatatatctatatgtatacctatatatgattatgtaagtagtagaactccaagatcactcactgcctccaagctccatttttgttcttccaaccacagataatttattccctgataaggtagttgaatctacagccaaactttggcctctttcctactttccttgtttgaatcaggttgaacttgaattggcaggaatgattgaatcttccattattttagaaaaaaaaatacaaaacaaaataatcaccattaccccatgaagcttttcttttctgcacagctaaaacgtctgaatatggtgctccagaatcctcttgtaattcagcagattttgtgatatcaaaaatattttatacttgagaataatggtttctctagaacaaataaataactcttgattccgtatgatatactggtactctcctcccacctcgcatggatgtttgcaggcatctgcccaaataatgggcatcctcatcttgcctgattcattaatgaaaaacaagttcatctgacaatgtaaataaagacaggagaacgagaaatggcmagatcgaagtagcattttataattctcmagaagtgagaaatagcatttcattttgaaaaagaaaaatgtgctattcacctaatgattttcaatttcacctttaagatctgatatcccttcacmaagaataacttccctcacctttgcttttgttaagttttataatcccactatttaatgttttagaatttgggctaaataaaagttgcatttttgagaaacttgaacaagggcmaggatttttcttttcttttttttttttaacggtgataacagtagcaaatatgataaygatggasattacttttacttttcaaaaaaatttaatttaattttaagttatgggatacatgtgcagggcacgcaggtttgttacacaggtaaacatgtgccatggtggtttgccatatctatcaacccatcacgtaggtattaagccccgcatgcattagctatttatcctgatgctctccctctccaccatgccccctcaacaggttccagtgtgtgttgttctcctccttgtgtccatgtattctcattggtcagctcccacttataagtgagaacatgcggtgtttcattttctgttcctgttttagtttgctgagaataatggctttcagctacatccatgtccctgcaaaggacattagctcgttcctttttatggctgtgtagtattctatggtgtatatgtaccacattttctttatctagtctatgattgttgggcatttgggttgattccatgtctttgctattgtgaatagtgctgcaaatgaacatatgtgagcatgtatctatataataggatgatttatattattttgggtatacactcagtaatgggattgctgggtcaaatggtatttctggttctcagtctttgaggaatcaccacactgtcttccacaatggttgaactaatttatatttctaccaacagtgtaaaaacgttcctatttctccatagtcttgccagcatctgttgtttcttgactttttaataatcgccattctgactggcatgagacaatatctcatgtggttttgattttcatttctctaatgaacaatgatgtggagctttttttcatatatatgttggcaacataaatgtcttcgtttgagaaatgcctgttcatgtcctttgcccactttttaatggggttgtttgggtttttcttgtaaatttgtttaagttcttggtagattctggatattagacctttgtcagatggataaactgcaaaaattttctcccattctgtaggttgtctgttcactctggtgatagtttcttttgctgtgcagaagctctttagcttcattaaatcccatttgtcaatttttgcttttcttgcaattgcttttgatgtcttcatcatgaaatctttgcctgtgcctgtcttgaatggtagtgcctaaattttcttctagggttcttatagttttgggttttacgtttaagtcttatttcatcatgagttaatttatatataaggtgtaaggaaggggtccagttttaattttctgcgtatggctagccagttcccccagcaccatttattkaatatgaaatcctttccccattgcttgtttttgtcaggtttgttgaagatcagatggttatagatgtgcagtcttatttctgagatctctactctgttccattggtctatgtgactgtttttatgtcagtaccatgatgttttggttactgagtcttgtagtatagtttgaagttgggtagcgtgatgccttcagctttgttctttttgcttaggattgtcttggctgcatgggctcttattttgtttcatatgaattttaaagtagttttttctaattctgtrragaatgtcaatggtagtttaatggaaatagcattgggtctataaattactttgagcaaaagctggaagcattccccttgaaaacaggcacaagacaaggatgccctctctcaccactcctattcaacataatattggaatttctggccaggacaatcaggcaagagaaagaaataaagtgtattcaaataggaagagaggaagtcaaaccatctctgtytgcagatgacatgatcctatatctagagaaccccattgtctcagcccaaaagtttcttaagatgataagcaacttcagcgaagtctcaggatacaaaagccacgtgcaaaaatcacaagcattccatacagctacagtagacaagcagaaagccaaatcataaatgaattcccattcacaattgccacaatgagaataaaatacctagggatacagctaacaagggaagtgaaggaactcttctaggagaactacaaaccactgctcaaggaaatcagagaggacacaaacaaatggaaaagcattccatgatcatggataggaagaatcaatatcgtgaaaatgaccatacttttgcttttattcctcctcaccacactctccacccaccaaagcatgaaggagggaaatgttgtatccaagtgaagctgaaagggatatggcaggctacagtccatccataagaggcagacaagaagcttaggatcagcagtgccaaagggagctctttatgtccaaccaccctctctcttatcccatgagaacaactggtggataagggagaaaaatacataattcaaataatggagaaaaagctttatatctgatattgcttttttgtcacagaaaagcaagctggttctagttaacattttcctcctgataactcacctccaacatctgtaaaactgtacaaatattggcckggcrcggtggctcatgcctgtaatcccagcactttaggaggccaaggcgggtggatcacaaggtcaggagatcgagaccaccctacctaacatggtgaaaccccatctctactaaaaacataaaaaattagccgggcrtggtggtgggtgcctgtagtcccagctactcgggaggctgaggcaggagaatggcgtgaacctgggaggcggagcttgcagtgagccgagatagcgccactgcactccagctgggcaaaagagtgagactccgtcaaaaataaataaataaataaataaaaaataaataaataaactgtacaaatatcattggtaaaatatgctttcctaataggaaaacatcctcttcctgaaattaaggatggccatagaactacattcactcatctattctcattttgtttatcttctcattgaatttacctagcactttcctgacaaaaatgcacttaacttcttctctaaaccttcagctctgctactggtgcctctttgagaagtgtcaaagtggtttccaggtcacctgagcactggatccccatgctgattccattctastaggctaagatagcagtcccataatcatcatttatgaacattaatgtccttgtctagacaggaataattgacctatcattcctaatcccattattcactttccaggtctatacactgtctaaaagtgagtgagtttaaaaacatcactgaatgttcctgataattagttagaaaggactctataatgcaaatgtgtgcacattcaaaaaaaattgcccctccttcattatatagactatgtgagactgtagccattggcatttattgaagtatctttactcattagagaaaagcgaattagtctttcattatgcaagaaatgtttggtttcccacttgcacacagaaaaatacagaatcactagcaaagagacaaaatatcgctttactgtatttggttcccacccttaacacggttcatgagctggtagagtagaatagtgaggagaaacatcaggggttctttcccctactctcatgacatccgattatatttcacagtaaccctgcagagacctctgcttgaaatcctcatgtcttaatgccatgctcattaacacagaaaagacaatgaaaacaatgacctttaaaatgtatatctttctaattgtgtgctgacagtgtctctttgcagctacactgtttgtttgagtaaaacccatgattgaaaactatctcaaagttcagttcccctgggactctaccaaatgactagcaaaatgtgctttgacattcttaagtcttagaggtttatatcttgtaccaaaatattgtgtgagatttactgaaatcaaataggcttttattggaagagacagaggtaaaattacatatctattgatacgaaagggggacagggaagcgctggatagagaagggcagggtcccgggtgaaggctccatcctctggtctgtgcccaaagacataagtgagaacaggcacttctattttccacccaaatgttacattttccaagaccattctggcccactacaccccccatcctgtgcccatataaacccaagacctttatagcgagcacacacacaagtagctggaagtcgagaccagcagaccagcaagggcagaacaatgcagcagagcaagagagaagaagagggacgtctgtatgtccagaagagttcagctgggggcttgttggggaagagtccggccactgggtggcccgactctaggggaagaccaccttcccacttcatccccctcttcaagctccccatccatctcactgaagccacctccaccactcaataaaacctttcactcatgcttcaaacccatgtgtgattcattctttcaggacactgggcaagagctcaggatacagaaggctgtcacactggcccccagcccctgcgaaaagacaagggtgtattgaactgattaacataaaagtcacctgcagatggcaaatctgaaagagctttgtaaccacgcccacttgggcttcgggagttagacacccacccctagatgctactttgaggccagagcccagaagtgctggctccagcctctgcactgcccatctctatgctctcccttgaggtttgagctgcggggtgactaagcatgccagccacccctgtcgcatatcctgccaggggaatcagggaactctcctgtttcactctgatatgtcctgagagcagtaatcattctagttgaatcaacatagagataataaagtcttctggcaactcatagacatcaaggttacgccatttttgactgttattatgcaaaggttttaaggcagcctctttggctaataagattaatgctctcagtcagacaaactgtaatatccagaatgaattcttttcaggacacttttaattggtacttttatgccaagtgttatcatatattttctcttgtttccatggctaatgcaataactgtctgtagcactcatagtttaaaagttacttcaaatacattattttattttggaaatatgcatgtattatatttgaaaaatctatatcaaattgatttttaaaacatccttctatcagaaatttttctttcagcagacaaaaattaagtaagttttagaataatttatcaatatagctaacaagttcccatgctcaataatgaggtaatgtatactcttttcagaatatataaacaatttaccaaattttactacagaatagggaagaatatttcaagaattttctaaggacggttaacatgcagaacaacatgtctgagactattgcaataagattagaagccagttagaataatctaaatctctctacatttctcaaaccaataaaaccaaggaggacaaacaaaatcacatataacctgcagagtaaaagatagcaaattctataaatgtccattttcctgtaaatttgaaaatgaatgaataccagaagatcactggagactcccagagtggggttaggtggagattgcacagaagaatgaaaagagcaatgggtcccagcattggcagaacacactacccgaaggagagactccctctcagaaaggggaaatattcaggacgagtcagatagagcagggctacctggaaatcaaaatgaagggagttggtaggcatgtggaacagagatgaattattgacaaggcatcacttctcgggagagaatgcagcttagaagggggaatgtcctttggaggcttactccaaaggtaaagatgccatcaaatggtggatgattcctaagaaagcagatgacatcacacaattggacctgtctccttcaaaacttgtgccatttatttaagccaggttttattgaggtgtaatttacatgaagaaaaattcattctgattacatgttaatgtttggtgaaatctgacaggcttacagtcatgtgactccccacatcacaattaagataaagaatatttccctcatcctgaaagttccctgtgccctttgtggtcctttccccagctcctggcaaccactgacctctttcttgtttctattgttttgcctctttcagaacatcatataaatagatcataatacgtagtcttttgaatgtggcctttttcacttagcataatgcttttgagatttgtcttattttaattgctaaatagtaattcattgtatgcttacaccacaatttgtttacctgttcatcagctgatggacatttgggttgtttgcatgattatgaataagttactataaataattacatatattttttggtatggacatctttatttttcttggtaaataaaaaggcaagttttatatgtcgagttggccacatgcacagtgcccagctattwggtcaaatgttattctgagtgtttctgtgtgggtgtatttggatgagattaatatttatataagcagattgagtacagcaaattgccctccctaatgtgggtgtacttcctccaatcagttgaaagcttgactgtaacaataagatcagcttcccttgagtaaaagcgattcctcctgccagactaccttgggcaagggagattagcttttcccgacctttggactgaaacttcggtgcttcctgggtctcaattctaccagcttttggacaggaagtatactattggctctcctcattctagatcctcagacaccagctagaactaactcgtagtttttcatgggtcctgagcttgctgattcagcttgtagatcttgggacctgtcagtctctgtaattgcatgagcaaattccttataataaatgtctctctctctctctctccacacatacacacacataaacamacacacacacacacatatacacacacacacacacacacacacacacacacacacatcatattgcttctgcttctctgggaaccctgatcaataccgtcagtatttaacatttaaaaaaactacgaaactgttttccaaaatagctgtatttttcattcccattctcgggacttggtattgtctatttttttccttaatagccrtagcacattgtggttttaatttgtatttccctaatgactaatgatgttaagcatctttttgcttatttacttaccatttgtatattcatatatcatctttggtgttatatatttaaatcttttgccatttggggggtgggggaattattttcttattattgagttgagaaagttatttatataatctgaatamcagtttctttatttgtacaaatttatgagatacatgagaaattttattacatgcttatgtatccaaaaaaccaattatataaagtatctggaaattgttctagaggcatatagccaatagataaacatttattcaagtatgcctaccaaatctcggtaatagcaaaagtttttgacatttcagccacaatctgttccacctccaacccaagttctgtattatgaaaactctgtatgtgcagtcagaagacaagggctctcttaccttgttgctcccagtatggaactatagttgatatcaggagaggctgatttctggcatttttcatctctgtcaaatctgtattgcacaagctctatctaggcatatgtgactgaacagaccagatctacccttccccaactcagttgccactcataggacagaagctctacccaagaatactgggctgtaaatcaccacaacaactggcttggcagttggcggttccaccttgcaaaaggtagcccaagaaggctggggctaccacctcttcctgtgcctacttgtagagtagtgatgtcactctgggaaaagcaggcccccacttccaaatctgctgcagtgttttgagggttattcctggggggaagggaagaacataaaggttaagagttctatagttatggctgaagagactgaacttttgggatcagaatgaggacaagtatatgtttaaggactttgctgaaaacaaaacaaactttgaaggaaagcagttaagaggagttggtagttctataatgcagcagagtggatgagcagccagatgccttatagagagaaacaaggaaacagcaattaagaacactcttgggatcacagtcaactctgagggttggaaaaaccgtgcaactaagtggttgtcccagctctggagaaatcagaacagaagacagaacaaacttgaaagcattttccaagccatacacaggcacatcaacacacggtagaagcctcactggcacaaacttcttaaacacaatctctgatgaccaaacatttactgagcaatatgctaggctggcacaggtatgactcctgggaagctagacttaaaaatracatgacagtcacttctggccgtctggaaggctgtgtgtatgctgagaactgtgccctctcagaaataatcagagagggaacttccaagctactagtccctgcctgaacatggggcaaaaaccaaaacggttttcactgtgatcatagcctccaagctatacacacatccaatggtgaagggtaaagatctagaagtaaaaggctaaggaggcttaagcacaacattcatccaataaataacttatactgacttgtagtaaccattggttgccaggctaacacaaaaacaacaaaaaacaatttgagcacactgcaggagaaataggctctgcagaattagctcagccaagtcattaaacaaataatcaaatgaccaagcaaacaaccaccacctccagagagggagtttagtacccagagttttttgttttgttttattttgtttttttgagacagagtttcactcttgtcacccaggctggagtgcaatggcacagccttggctcactacaacctccacctcccaggttcaagcgattatcctgcctcagcctctcaagtagctgggattacaggcaccctccaccatacccagctaatttttgtatttttagtagagacagggtttcaccatgttgccaggctggtctcgaactcctgacctcaggtgatccacccaccttggccttccaaagtgctgggattacaggcgtgagccacaatgcccagccttcagagtttttataatatatcattatattatctaaaatgtatagttttcaagaaaaatgtgagctaaaacttgaaaacagaggaaagtgtaacacwtatgcaagaaaacaaacaacaagaggggaaaaaagaaaaagaaaaaaagaagaaaaaacccaggcagttgaaactgcttttgagggattctagatggtataatgagcagacaaagtcttcaaaaaacctatttcaaatgtgtttaaagaactaaggaaacaaggttttacaaattaaagaaagttacaataaaatgtctataaaataaagaatatagatagaaagtactaaaaataaccaaacagaaactctggagttgaaaaattataatacatgaaataaaaataattcactagtaggataaagtttctatatttctctggaattaggttagtagaatctgaaataggtttgagctagtagaagagagcatcatggaacttgaagatagrgcagtaaagattattcaatctaaagaaaacagagaaaaaaaagaatgaataaaaataaagagcctcagagaaatgtggaacatcactaaatgtacattaaaatatttatgagaaggagaggagagagagaaagggatggaaaaaggaaatcaaagatataatgactcaaaactttccaaatttgatgaaacacattaatgtactcatccaacaagctcaatgagttctaagtaaaataaaagcaaaaagatctacatccagacatattataaccaaaatgttgaaagctaagaacaaagagaaaaccttgaaactggaaagagaaaaataatttatcacatacaaatgaatctcaataagattaacagctgacttttcaacagaaaaaaaggggagcagaacaacatattcaaagagctgaaaataaaaatgtattagccaagaatttaacattctagaaatctatctttcaaaaaagggagtgaattcacagtagcaaaggcatggaattaacttaaatgccccttaacagtggattagataaagaaaatgcgggacatatacagcatcgaatactacacagccatacaaaacaatgaaatcttgttctttgcagcaacgtggatgcagttggaggccactatcctaagcaaattaacacaggaacagaaaactaaataccacatgttcttgcttataaatggaagctaagcattgagtacacattggacataaagatgaaaacaatagacactggggacaaccagagagaggacaaaagaagggggtaaaatctgaaaaactacttatcgggtactatgytcactacctgtgtgataggatcatttataccccaaacctcagcattacaagatatacccatgtaacgaacttgcacatataccccatgaatctaaaataagttaaaattatgttttaaaaaggaagtgaaatacattcccagttaamaacaagcaaacaaataaaaaaaaccttgagaatttgttggtagcaggtctgctttacaagaaatactgaacaccagaaagtatttctagctcacattgcaaaacaaggtacaattatgtagataattgtaaaagaaattatagttgcatatttcttttccttttttctcttggctaatttaaaaattttattaaaatatgcatatgattgcattgttgtggctgtaccttatagaaatgtgatatgtttgataataatagcacaagggaggtgggtgggaacaaagttctattgaagtaaaaaaatgtcatcaaatggtacgttaaatctgcttaaagaaatgaagagaactggatatgaaggttaacataaaaatttaaatatattctatttcttctgtcagcttctttaaagatttaagattatacaaactgataatcatcaaatatgtcattgggtttgtgacatataaagttgtaatatgtataacagtaatagcacaaaaaggggatcaggtgaatgggactctataggagggtaaatgggactctataggagtaaagtttttctgtttccttggagttaagttaatataaatcttaagtaaactaaacaatccaatcaaaaggcagagattgtcatatgagataaaagaacaagatccaactatatgccatctaccaatacaaatacattgatacaaataagttgagtaaaacaaaggaaaaatatgctaggtaccaatacaaatatattgatacaaataagttgaaggtaaaaggaaggaaaaagatgtgccacgtaaaccacaactataaaagacttggagtggctatactaatatcagacaaataaacttaaaaatgttactagagataaagaaggacatttcatcattattaaagggccaacccaccagaaagataaaactttggaatgtatatacaacacagtgcccaaagacgaagcaaaagctaaaaaacttgaagggagaaacagataattcagtaatagttgaagaacccaatatcccactttcagtaaagaattgaccagctagggagaaaatcaacaggaaaataagaaacttgaacattataaaccaatgggacatagcagatatctaaagtacatactgtacgacagcagcagaatacatattatatagctctcatggaacattctatagggtaactcatgttaggcgatacaagcgtcaataatttttttttgcaagggtggggaagggggattaaggttctggctttgtcgcccaggctggagtgcagtgacactccactcactacaacctccaccacctggactcaagccatcctcccacctcaaccttcccagtatctgagactataggcacacaccaccaaacccatctaatttttgtatttttttggtagagacagggttttgccatatttctcaagctggtcttgaacttctgagttcaagctatccacccacctcagcctcccaatgtcttgggattacaggcatgagccatcacacccagccaagcttcaatatttctaaaattagtgaagttatacaatgtatgttctctgacctcctgaagtaaattagaaatcaaaaacagaagaaaatttgggaaattcaaaatatatggaaattaaacagcacataccctaagtaactaatgggtcaaataagaaatcaaaaaggaaactagaagatattttgagatgattggaaatgaaaacatgtcttacaaaacttatgagacgcaactaacacagtgcttggagaaaaatttatacctataatggccatattatagatgaagaaatgtttcaaattaataacctaagtatgccctttaaaatttttttaaaaaaagaagaccaaatttaactaaaagcaagtagaaggaaggatatcataaatactagagcagaaactaataaaatagagaatagaatataatagggaaaataaaaataaacaaaacctgatctttgtggggaaaaaaacaaatgacaaatgttagctaggttgaccaggaaaaaagagagatgactcaaattatgaaagttatgaatgaaaggggatatcaccaccaactttatagaaataggattataaataagtactatgaacaactctatgccaaaattcacataaataaattggacagatttctacmaagacatacactgctgagacttactcaaaaataaattaaaaattggagtaaatttacaacagataaagtgatcaaactagtaatttaacattttcacacaaagaaaagcccagcaccagatggctttactgatgaattctaccaaacattcaaaaaatatatatatatacactaatccttcagaaactcatccaaaaatagagcaggagggaacacttccaactcatttaatgaggccagtatcattattctgatacccaaaccagacaaaggtgagagaccagcatgtattatgttttctccctgagataaagaccaagacaaagatacttgttctagccacttctatttgaattgttatgaaggttctgccaagggcaattagtcaaggaaaagaaataaaggacatctggatttttttwaaaatgtgaactatctctagtcatggacgacataattttgtatataaaattctgaagaatccactaagaactattagaactaacaaacaagttcaacaaggcttcaaaatctagtaacaatgtaaaaaagccattgtatttctatacaggtgcaacaaacaacctgaaaataaagtgaataaaacaatttcacttataatagcactcctctgaggtgttaataaaagaagtgcaagatttgtaaattaaaaactgcaaaaattgttgacaaaaattagaaaatatttaaacgaatcaaaagacattccatgtttctggatcagaagactaaatattgttaaaatgataatactcaacaaatgtatctacagtctcaacaaaaatccctttcaaaatcctacctggctttgttgcagaatttggcaaggcgatcctagaattcatatgcaaatgtaaaagatccaaaatagtcaaaataactatgaaaaataattacaaagttggggagctcacatttcccaattttgaatcttgcctcaaagctattgtaatcaagacagtgtcacactagtgtaaggacagaattgaacaatagaacagaattgaaagtccagaaataaacccgtaagttcataaataaacccgtaagtccataaacatttatgattcgcagattttccaaaaaatgtcaaaacaacttaactggaaagaagtcttttcaacaaatagtgctggcacaagcacgtgcaaaaaaatgaagttaaacccctatctcacaccatacaaaaaaattaactctaaatgaaccaaagacctaaatgtagagccaaaactataaaactcttagggaaaaatactggggtaaatcttcatgacctggagttaagcagtgttttcttagcagcarcacaaaagaaggagtagcaaaagagaaattttttaattggatttcatgaaaagtataagattttgtgctacaaatgatattatcaagaaagttaaaagacaacccatagaagtggagaaaatatttgcaaatcatatatttgagaaggaactgttagaatatgtaaagaattcttacaactcagtagtaagacagaaaaaaaaaacaaaaaactaaaagtggccaaaggatatggagagacatttcattaaaaaaataaagatatacaaacggccaataagcacatgaagagattctcaacattatttatcattaggaaaacgtaaaccaaaaccacaagataccacttcacactggtagaatacaataatttttaaaagaccaataataagtgttagtgaagatgaggaagaatccttgtacactgccatgtggatgtaaaagagtacagccattttaaaaaacagagtggcaaatcttcaaagagttaaacatggaattatcacgtgcccagcaattccactccctggtatatgcccacaaaaataaaaaacgcatgtccactcaaaacttgtacacaaatattaacagcattattcataacaatcaacaagtaaaacaaatcaattgtttatcaactgatgaaaagagaaatacgatgtggtatatttatacaatgaaatattattcaggaataaaaaggaatgaaatacagctactacatgggtgaaccttgtagtaacattataaatgcaatataatgtagaaacattataagtgaaagaagcaagtcacagaagaatatatatattgtataatttcatttatatggaatggccagaaaaggcaaatttatggagatagaaagtatattagtgatttctcagtggtatgggggagtgagtgaaaagggtggggttggggtggggtgtggcagctgatgggtgtgattattctctttaagggagattaaaatgttctaaaattagattgtgataatggttgcatgaccttagaaaacacactttaaatgaatgtgagtcatacaccttaaatgagtgaatagtatggtagaagaattttatctcaataaagctatttttaaaagttttaaataaagttactgttagaagaaaatagaaagtaagcataaaagctttctagctgatgaacataggctatataaaacaaccatgggccgggcactgtggctcacgcctataatctcagcactttgggaggccraggcgggcatattacctgaggtcaggagttcaagagcagcctgaccaccaacttggtgaaactccgtctctactagaaatattaaaaaaatcagccgggcatgggggtcagcgcctgtaatcctagctactcaggaggttgaggcagcagaattgcttgaacccgggaggcggaggttgcagtgagccgagatcacactacttgcactccagcctgggtgacagagcgagaccctgtctcaaaaaacaaacaaacaaacaaacaaacaaacaaaaaacatgtagcagaggaatatcattacacagcccttcacgtttaattaaatatcattaaaaaataaatttcacatgagagaatacatgaatctgaaattaaccatctcagaaattgagtaacagaaaggatttgaaacaagacctgattaaactcaataaagaaatgagtgaaagaagacaaaaatattttgtcaatgaaggccttttgttatatttcccatggtatttcatcttttttcatgttgtaaatagtagtctcaaagtaattattttctaatttttgttggtgtattagtcattctcacactgctataaagaaatacttgagactgggtaatttacaaagaaaagaggtttaattggctcatggttctgcagcctgtacagagcacgtggcagcatctgcttctggggtggccttagggagctttcactcataacacaaggtaaagtgggagcagacgtcttacacggcaggagcaggaccaagataggaggtgggagagatgctacacacttttaaaacaaccagatctcacgataattcactcacttccataagactagcaccgaggggctggcagtaaaccattcatgagaactctacccccatgatccaatcacctcccaccaggcccacctccagcctcagtggggacagagatccmaaccatatcagttgagatataaatttaaataatttttctataatgaccttatgtccagtgatattgctaaatcatttattaattttaaattgtctacagattattttgaattttaaatgcacacaattatcttttcggcaaaccctgagagttttacttcttcctatccaaacctcatgaattttgttttcattttttcctcattgcagaattttgtgactagtatgatgttgcagaaaaaaaaaaagtggaaatagcagaaattctkgtctcatkgtgaatctcagggaaaaagcacttaatgtttkgccattatgataatttttatgtaggatattactaaatactgtttttcagtttaggaagttctcttctattcctaatttgcttttttctttccaatttttattttatattcacagggtagacatgcaaattcgttatatgggtgaatagtgtgtcacaggggcttgccattatttkgtcacccaggtaatgagcataatacccgacaggtagtttttcaatactcactctcatcccacactacaacctctagtagtctctggtgttctttgcattcatttgtattcagagtttagctgccacttgtaagtgagaacatgcagtattkggttttctgttcctgcattatttcccttaggataagggtctccagcttcatccatgttgctgcaaagaacatgatttcattcttttttatggctgcatagtattccactgtgtgtgtgtgtgtgtgtgtgtgtgtgtgtgtgtgtgtgtgtcacatattctttatccagtccaccattgaagggcatctaggtagattccatgttttgctattgtgaatagtgttgtgatgaacatacacattcatgtgtctttatggtagaatgatttatattccttttggtatatacccagtaacaggatrgctgggttgaatggtagttctgttttagattttttgagaaatctccaaactgctttccacagtggctgaactgtttacattcccaccaacagtgtttcagcattccttttttctctgcagcctcaccagcatctgtagtttttctgactttttagtaatagccattctgaccagtatgaaatggtatctcactgtggttttgatttgcatttctgtaattattagtgatgttgagcatttttttcgtatgcctattgaccatctgtatttcttcttttgagaagtgtctcttcatgtccttgtctattttaaatagggttgtttgttttttgcttgttaatttgtttatgttctttatcaattcaggatattagaacctttgttggaagcataacttgcaaatattttctcccattgtgtagaytgtctgtttactctattgatagtttcttttgctgtgcagaagatctttagtttaattaggtcccattcgtcaattttagttttgtcacagttgcttctggagtcttcatcatgaaatatttggcaaggcctatatccagaatggtatttataccattctggaaataacagaaatgatatttcctaggttttcttctagagattttgtagttttaggttttacatctaagtctttaatcaatcttgaggtgattttgtatatgatagtaggaaggggtccagtttaattcttctgcacatggctagccagttctgccagaaccatttattaaataggaagtttttattgcttgttattgttgcctttgttgaagatcaaatggttgtagatatacatctttatttccaaattctctattcagttcatttgctgtatgtgtctgtttttgtgctaggacaatgcagttttcgttactgtagccttgtagtatcgtgtgaaattgggtaatgtgatgtctctgactctsttcattttgctttggagtgctttggctatttgggctcttttttggttccatatgaattgtacaatagtttttttttctaattctgtaaagaatgtcattggtagtttgatacgaatggcattaaatctgtaaattgctttgggtagtaggaccatttcatttaacaatattgattcttcctatccatgagcatgaaatgtctttccatttgtttgtgttgtctctgatttctttcaagagtattttgtaattcacattgcaaagaactttcacatccctgattagctgtatacctaggtattttatttttttctgtggttattgagactgggattgtgttcttgatttgatgctcattttggatgttgtgagtatacagatatgctactgatttttttactttgattttgtatctgaaactttgctgaagttgtttatcaagtctaggaacctttggacagacactgtgagattttctaggtataaaattatatcatctgcaaagagagagatagtttgacttcctctcttcctggttgaatgctttttatttctttctcttgcctggttgaatgctttttatttctttctcttgcctggttgctctgactagaaattccagcgctatgttgaataagtgtggtgaaagtgggcatccttgtcttgttccagttctcaaggggaatgcttttgcccattcagtatgatattggctgtgggtttgacacagatggctcttattattctaaggtatgttcctttgataactattttgttgagagtttttaacataaagggatgttgagttttatcaaaagctttttctgcatctattgaaatgatcatgtggtttttgtttttagttctgtttttgtgatgaatcacatttattgatatgtgtatgttgaatcaaccttgcatcccaagaataaagcccaaatgatcatggtgaattaactttttgatgtgctgctggattttgttttcttccattttgttgaggatttttgcatctatgttcatcaaggatattggtctaaagattttttttcactgtgtcactgccaggtttgggtatcagaatgattctggcctcatagaatgtgctaaagaggagtcccttctcctcaattttttggaatagttttagtgtggttcaggtttgttatcagctcttctttatatgtctggtagaattcagctgtgaatccctctggtctagggtttttctggtcggtagtctttttattactgattcaattttgaaactgattatcagtctattcagggtttcaatttcttcctggctcaatcttggaaggttgtgtttctagaaatttatccatttcttctaggttttctatgttgtgtgtatagaggtgttcataataatctctgaaggttttttgtatttatatggtgtcagtggtaatgtcccctttgtcatttctgattgtgtttatttggatacaatcttatttttcattagtctagctagcagtctatcaatcttatttattctttcaaagaactaatattttgtttcattgatcttctgtgtggttttttacatctaaatttcattcagttctgctctaattttggttatttcttttcttttattagctttggggttggtttgctctggttcctctagctgtgatgttaggatattgacatgggatccttttaacgttttgatgtggacattagtgctataaactttcctcttaacactgctttagctgtgtcccagagattctggtattttatatctttattttcattagtttcaaagaatttcctgatttctgccttacttctattgtttagccaaaactaatttattagcagtttgtttaattttcatgtaatggtatggttttgagaaatcttcttagcattgatttctatttttattgtgctgtggtccaagagtatgggtggtgtgattttgtttttgttttgttttgttttgtttgttaagaattgctttatggctgagcatttggtcaattttagagtatgtgccatgttcagattagaacaacgtatattctgctattgttgggtgaattcctctgtagatgtttgttaggtccactgggtcaagtgtcatgtttaggtcccaaatatccttgttagttttctgccacaattatctgtctaatgctgtcagtggggtgttggaaatctctctctattattttgtggttatctgagtctctccatacatctctaagaacttgtgttatgaatctgggttctctgattttggatgcatatatttttaggatagtaaagtcttcttgttggattgatccctttacattatacaatgtccttttttcattggtttaaagtctactttgtctgaaattaaagtagcaacccctgttctttcctgtttttaatttgctgggtagaattttctccatccctttaatctgtacctatgagtatcactgcatgtgagatgggtctcttgaagatagcatgtagttgggtcttacttctttttccaacttaccactgtaccctgtgccatttaaatgggacatttagcctgtttatgttcagggttattattgatatgtgtggacttgatcctgttattgtgttgttagctggttgttatgtggacttgattgtgtagttgctttcttctgtcaatggtctatgtactttagtgtgtttttgtgatggctggtaatggcctttcatttccacatttagcasccccttaaggccctcttgtaaggcatgtcttttggtcgtgaattaccttagcatttgcttgtctgaacaggactttatttttcctttgtttatgaagcttagtttggatgagtatgaaattcctagttggaatttctttgctttaaagatgctgaacagaacataaactctcaatgtcttctggcttgttgagtttctgctgaaaggtccgcagttagtctgatggggttcttttgttagatgacctaccccttttctctagctgcctttaatgttttttcgttcatattgatcttggagaatctgatgactatgtgtcttgggatggtcgtctgatatagtatctcaaaagcgttatttgaatttcctgaatttgaatgttgacctcactagtgagtttggagaaatttcatggatagtatcctcaaatatgttttccaaattgcttgctttctcttcttgtctttcagggatgccaaagagtcataggtttttgtctttttacataatcccaagttttttggatgttttattcatttttttgattctttcttctcaatttttgtctgagttgatttgaataactagtctttgggctctgagattttttcctcagcctcatctattctgctgttaatacttctgtttgtattatgaaattcttgtagtgagttttaaagctctatcagaccaactcgattctttcttaaaatggctcttgtatcattttactgaattccttggattgggtttcaactttcttctgaatttcaatgaccatcgttgccatctaggttctgaattctaagtccatcatttcagccatttcagcctggttaagaatgattgctggggagcaagtttggaggtaagaagttgctctggctttttgagttgccaaaatttttgcattagttctttctcatctttgtgggctgtttctttagtctttgatgttggtgtcctttggatggggatttttactattatactctttgaggcccttgagggtttgattgcagtataagttgggttcagtcaacaggctttatttctggatgatttcagaagatctgggctcaactcagcactcctggcctgcatgctctaactctgaggagctggaaccaggcttacagctttgttctctggcccctctaggttaagcacttgctgcactggaggagccaaggtatttccagtgtgcctgcaacaacaccctgatgggggtgccagcaaaagcacttcattgggttggtgaggtccacgtgtgcacacatgccatcaaagtggtgggaaaaggctatgggcaagtgtgtgccatcgaaggagtgggggagactgtgaatgtgtgtacattggtgagggcccatctgctgaagctccttgatggttagacagggtctgccagcagaagaggtatggtagtggccaccgggaagcacccgcattgggcatttgaggctgcactatgagcaggtgccaccaggaagggaccccaggaaaggtgggcagacaggggarcactcagattagactggctttatcccacaggtaagacacccctactctgtccagacccaactgtcaacagaagccaaagccatctggaggagcatggtaagccttgggggatgggcatttctggccatgctctactgcaactaccaaaccctctgtgctctgcaaagaggggagtcctgttcatgctagctgtccaagcagctctctctgcaagctgaaatgactstgggggtcgtgaggtcttctgcagctaggattccaaaagtccatggtgagaggtggctcctccttgcctattaactcactttttacccaggacctgctggggccaggaatgagtcctggtgcttggcagccccatacagggttcccagcttcctgtctctttagcctagagtctgtttcctccttgcatcccctctcaagacttccttctgaagatctgcctggagcgttctggcctttatggtctgctctctcagtgggagatgttcttcctggctgcatctagtcagccatcttgtctccctctgagactgttttttcaatcaaaaaggatgttaatattattaaatacttttctagtacctactgaattaatcacataagttaattcataattacatttatcttgagtgttaaatcatccttgaattcctggaataaacccatttggtagtaatgtattttcttcttacataccactgcattctatttgctaaataattctttattattttgcatctaaattagtagatttcagaagaacctgctgtttttaaagaaagtgttggaaagtgtttgttctttttctactctctggaagattttgcatatctcattatttcctacatattttgaaaaattcacttttaaagcccactatgtatagacttttgtgggtgtaagaagatttttaaataatgttcaacttatttaattggtattgcactttaaatatcatttatttcttctttcataaattttggtataatgtgttttattaaactattcatttcattcaaattagcatgtttattggcatgtatttattcataatgtcctcttataatctgctaaatgtctctaagatctgtagtagtgtctttgtttctattttgttattggtaatttgtggtttctatactttttccttcattaattttgtgggaatttatcaattttgtaaatatctttaagaatcaattatttgtttctattttatatctattttctattttattgatttctggtcctattttttactatttccttgattctacttcttcagttttgatttgctctttcttttctagtgttttgaggtggaagatttggtcactaatttttaatgtttcttcttttctgatatacttatttaaggttagcctctctctaatcagcatattatgagctgcaccctacaagttttagtatgcaataccttcattagcattcagtgtgaaatattttataatttctactttgccttacatctgtggatttagttataaatgtattgtttaattctaaacacttagtagtttttattatttatttctagtttaatcccactatggtaaggaaattattttaatgttttgaaatttatcaaggcttattttacatggtattctttgttaaatgtttcattgtgcttttttaaaaaaatgtgacttttattattaatcagtggaatgacccctgtatcattacgaaatttctagcaatatattttgctttttatttttttaaagtatttctgtgccaactttttaaagtagaacatttttgacatttattgttttatattcttttaatttcaacttttttatctttatataaatcttgtacctcttataagcagcatatacctttatttgttatttgtttatttgttgttgctaacttgtctaagaatcttagtactttacttggagtatttagtcagtttgcatttagttacttacatgtttaggttagtatctacaatcttatccttcgttttctctatgtatcagggacaagtcagaaaccacataaataattttaacaagaagaatttaatataaaaattattaactagtaaaagatagctggggaaggcttatagacaccccccacaaaaatattcatatctggaacctgttaatgtgttactctctatgacaataaggatgttgcagagatgattaagttaaagatcttgagaaaattatcttgattatctagatgggctcagtataatcacaagagtcattataaggagaagatggaggcaggagagtcagtgtcagagaaggagatgcaataaaaaaatcagggtcatagtcagacatttgaagatgctatggttctggctttgaagatggaagatgaggtcatgagccatggagtgcaggcaacctttaaaagctggaaaaggcaaaggaatgctctcctcttgattctccaaatggaatgtaggcctgctaacacattgattttagcccagtgaaatgcattttggatttctgtcctacagaactataaagtagtagatttgtgttacttttaagccactaaatttgtggtagtttcttacagcaacaacaagaaacaaatttattagctaacctaaccactaatgacgcaagagacaattctaaggactttcaaaacagcaaagtaggagcagctgctacctctagggatgagggtgagtacccagaaaaatatatctttcctgtagctatttttaaattttctctacatctttgggttttggctatcttactctgatgtggtttatttttatatattttgttttatagatttcatcttgggtttgctgagcttattgaatctatgatttatgtctttcctcatatttgaaaaatgtttggtctttatctcctaatgtattacttcttccaattttctctttcttaaaccatatttatatcatgttagatctttcaactgcattgtatttatgtctgacactcttttagttttatttttattttctttttctttggtttaggttgtatattttcaattgcacctgtcttccagtttcctactcctaactttacttgtctccaatctattgaatgcttttttcagcgagtaactttttagttttagaatattcatttgattcctagaaaagtaarttccagttgactcttaaaattctccttctttgcatccacttggtccaatgtttgctctattctattgaacatattaatcatagttattttaaagtccttacctgttaactgcaataatactgtggctctaatttcatttcctatttttttctcttgattatgggtcatatggacatgactctttcacatccctggtgactttggattgaatgaatgttggacattgwatattaaaaacaggagatgtattcatctgttctcacactgctaataaagacataccccggactggataatttataaaggaaagaggtttaaatagcttacagtttcccatggctggggaggcctcacaatcatggcagaaggcaaatgaggagtaaagtcacgtcttacatggtggcaggaaaagagagagcttgtgtaagggaattcccctttataaaaccattagatctgtgagacttactatcacaagaacagcatgggaaagacctgcccccataattcaattacctcccaccaggtccctttcatgacacatgggaattatgacagctacaattcaagattagatttgggtggggacacacagccaaacaatatcaggagagaatcgaaatgatgttgtcttccaacagcaatggttcacccttttttctgctaggttgatgtggttggaagtttgtttgaagattaatttaattaagtctaccattttccccctttctcttgtgtctccagtattgccactacaaacctgtgtaaccactagagtatgtgctggtttctctgtgccctagcattagatctctgtggccaagccttgttctcagtctctatctgcacccattaggaaatttcttgaggaaagaagcagttggagatcatcaaaacaaattcattactcctttcaaaccttttagttttgactcctgtgtctcagatctcctaattaaaattgttacttttaggggataggtaggaataaggtagagaggatggaaatgggagcaattcttctcaatgtagttttcagttttggataatgttaatgctttatatattcaaaatacatttaaaattaaaaggaatcaaaatgaaaactctaaaattgaatacaggcatatgtatgaactcaacaatatatcaacttgataatataatcatagagaacagaataagttcaactaattacgggcaaaataatctgattgcatatccttagtatgttagtatgtttaatgtttaataacattaaaccttattcggtgcatttattgttagtgcatatattgcactaaatattaaaccttattgagtatatatattgtacagttgaaactagttcattatattgtaacataaagtaaataaatcgatattataataaaagatttttaattaaaaggggtacaaatatgtatgtaactaacaatatgagctcgctttctctctcacrtgcatatacacatgtgcacacacatgcacacacacacacacactcatacacacctcagctttttccactaaagtggcctgaaagcaatgatcctccagtggcaatgagcatacatagtgctcaaattctgttttctaaataataattttcaaccaaaaggaattagggccccttggagaaaactaattccaaatctaaggcaggaaagtacagagtgagcttgggacatgttgttgcatgtattagcaaaggaatgtccaaagacaaatgagattattttaaagccatggaaccagcttgaagcagttccactgtttagatctgggaacgattgagcattcaggacaataattggttgaattaaacaaatccatgagtcagctgtaatactctaaatgattaaataaaaggagaaagatggctacagggatattgactaagaaaagctcatttttatagaaagaatgatagaatcagaaaatattcattttgtcattcctccaaactcaggagaaactcaaaaatgcatacaaaaaccattgcatgaaaagtgactggatttgtacatagcgtcaggagatgtgcgtagtgtcaaagtatctcatcacacattacttgataattacaaaygagaaaaatgaaccttcacagtggcaagacttgacktctacctctttcaaaaagtgagtgaatttactatcactaataattagattatattatgttatgtcccctgatatgatacaatatggtgtacacactccattacctataaaatattttttctctaaatattaacttcaatttacacacttctaagccaaacttccagtctagagaaaatacaagagctagagaaaatagttaaatgataacatgagaaaataatcacagtgatctagattcttccaaaagtaaaagtagttttaaaaagcaggagaaagttcaaattttagggactaaagaaacctaacaaagcagtttattataaacctcgattataatagtttactatattgttagctattaatagttyattatttttactttaaagtgcagggaaagatctccgttgttcctctccaaagtccaatctctccaactccagagaatgttttgtaaataatttatgtaatttttataaaaattataatcagtaaaagtatgagtagctatgtgttattttaaaatacatttgtaataaaaacatataaacatgtctatagagcttatttattcaaattagcagactactgtattccattatataacaataccacaattatctactcctctcctgatagagatttgtattagttttcaacattttaaacttaaaaattaattctatatctaacaatcttttcttttgtacatccatatactttctaaagtgtgatggtaattttcacattatccgacagtatacgagtgttttcatttctggtctgtacaactttggtactgacaaattttcgagttttgctaatctgaggtaaatagataaaaatagtttctcattattgttacaggatgcaattgtccaattattggtgaaattgtcatttcatgctattggctatttgaaattcctcctctaatgtaagtgtccttttctcgtttttctattatattgtttgtggttttcatattgatttaaagttatttgtgttttttatttatgttgcaatcttctcctagttggtgaattgcttttaaatctagggtgccttagcttgttatattattttccatatttttaaactaaaaataatgagaaatggtaatatctgaaattttatatgtagcctcctaattaatttttaccaagtttatggtacagtcatcaatagcaaggtaagtctaggagactaaattcccatatcacattggacagtttcctgaagactggctctctcttggtaaaggtgtatcctttgatagggtaaatatgattaacttccaaggaaatgaaaaatttacaacctttaaatgtccaagacccagggagggacctctgctctcaatagatctagaggaatcctccctaatgatgatggccacaccccagttttgaaacaccaagccatgaaaatagagggacacttacagttctatttattgagtgcatttttgagactttcaaagctcactgagcatgctctaatttaggtataacagattcaaaatgtatcacttgtgcattaccttccccacattccagttccttttcctgaagcctttctggccttctaactctggctgaagaccacctaaagaaggagaaggatgtgacttaggggtagtttcttctagaaagataaaggaggagaacatctagtgttgacttggaagtgggaatattcaaggagagagagagagagaaagagagaattccaacttctaacctccttcgtttgaaactcataggaggtgagtggggagagttaaaatatcctcataagtttgaggactattcctagggagccagtgacaccatttcccacttccgagtagcttggtgtttggtttgagattcttcagagagactttactctcacttgtcaccactcaggagcagcttataggacatcctaagcagcccctttgtccttgtgggggaatgaggatgtggtgagaaattgggaaacctgggatctggtgggaaaatggtggagtgaatgcaccttgctgtgggaggcaatgctgcaaaagccagagagctcagcgtgccatctttctggatgcagtaatgtcctaaagggcagaataaagaccacaggtctttcttggctgccgtaacttcccttgcacccagatcccaacatacagagagtgacagggaagaggggaggaagtaaaaagatgatttaaactttcctcttagagggatttgaactgggaattgaatgaatatttacctgaaaggacccttttaacttggaagacgctggattacttttaattggcaatttttagaaatccctctccccatcctatcctcctctgatgctgtcatgggcatggaagcgccagagcaaggtgagatatagaaaataaagatacagttttacacaaggatttgtgatctttaggattttattccagttagatgataattcattcctacaaagacactatcttctatatttctgaggggaaaaatcataaagactcattattctcatattgttaactctgttctgggcaccaagttgaggctgcttcacactggcaatgttcttagtattttctttaaaaaccatgccatgggcactgtaaatgtaatctggtacattccttcccttatatgatatttggtcaataatttggtggacaacattttacatattcttaaaggctattttgtctgtgatgttcaaatacataaatatcagataacctgtctgaattttaatttttagttttctttactactaaagtaattcctaaatctaatattacagatgattatgttatctacatattatctgtaatattcttgtgaatagtaagaagtcttatttttaaaaattattgtcagaagttcaattcaaatcatttgttttgtgaatgatgcattcaaaacaaccttcaaagctttatggagttacacaagggaatgcagtgttccagttctgaggttttataattactgaggaaaaaggtggacacatgtccctaccctcaccccatgtctccttcttaatgtccattcagatgccttgtgacgacagtggttgtactagagtcacctttattcagtcaaatattgacatgcaatattgacacaactgtattaacatttccattcccagatgactcatttactgggagcaagttcacatgccaatccatagtagacatttaataagtatttgttggatgaataaatgaacatattggccgatttgcatgagaccttaaaaaaaatgaggtgtggaatattcttgtggtaaaacaaataattgtgataagttccttcttttttcttcttgatatttatggcatcaactttttacttatatctggtatttgatataacatatgtattaatggaagttgcagtagagaagaaaaatgaggagatatttatttttatttttagaaaatgggaataaatcacggaaaagtttatgatttattgagttattttatgaagttctgatctgagatatcacatttctgcagttcagaataaatcactgaaattgacatcggccagtctgaatttcaagaaattacctgctgaagacaagagggatctcttcttcagatttgcagtctggggaagacacagcctctactgtactttagaacctgagatatggtggtggagggagccctgggtcgagtggtaagattcacccttaggttagtattgacgtaaggtgacgaggagctgtagacaaaagattgtaaccataagaacttcatagtttttgtattttcaccgagcttatatttggtgtgttttttgtcttttctttatgattatcaataaaatgcttgaaaggagatgaggttggggaataatttttgggaataccacaaaagacacttttgtgatggaaatccttaaaaagacacaatccattacctcattgggttcaaaaggcaattgtgaactactgtggagtttggaaagaagcaatgaggtaatcaaggatactgttgacaatctagcttatcctatggatggaaggaaattgaaactaatggaggcgaggctggtaaaacaatagggtttgagacaattctgtggcattagaaatgaaagaggaaggtgaatccgggagacggagcttgcagtgagctgagatcgcgccactgcactccagcctgggcgacagagcgagactccatctcaaaaaaaaaaaraaagaaagaaagaaaagaaagaggaagtaataatctgtgaaatttttccttaggaacttattggcaatttaaaaatgaatttgttaagccatgctggttctgacccaaaagccattccccagccttcctcactcccctctttcactactggcagagattgtctctcattttacaagctgaaaatgccagatgcttgcttttacagtcttccttacacccagagcatgtgcatatgtttaaacggtcaagaagaagtcataacatgggtgtctgggagagcttttatcccacaaaaacaacacttcactcaaaaaacaaaccaaacaaagaaaaattctccttcctgccattggatgtgaggctcagacctctagtaaccattttgtgaccacaaagcaacaagcctgaggaaaagtcctacacgctgagcaacaggcagaaatattgccatcgctgagttgcagaaacaaatctagagatgttttgcttctgtaattattttttatgggagattacaagtgggtttactgttcacttttcaaatcttatttctctatgatgtttagcttgggtaaattttaccttaaatccacttttttatgtaaggtaacatatttgtcggtttcaaggattaagatgtgggcatacttggaggccattattttgcccaccacaggtgaaaaaggaagtgttattcttaaatcatttggaaggatctctgtgtaaatgcaagagcgagacaagaaaatgctgtcattcttttgatatggactcgaatttccacttcatggttgtctgcttcctttttagagtattatttatcctcctaataaaaagaaagtgaaatttcccatttctttacatttgttggcttttggttagtcattttgaagaagacctttggagaggacctaatattgtaaaagtgatagatttagattgttctaataacagagttagtaggcttgaatacaatcctttttgtatttagaagacacagaactctgttgcatgaggtttatatcctttttgaagcaggagaatttggttacatagcaatagaaaaatttagtaggacaatttattttcaaattagggcaagagaaatgcttttttctctgttaagtagttaacaaaatgattaattttattaactcactagagcataagataaattttgagaaagtctccagattttgtgtagttattgcctaaaacactttacatggctttggaaccttgtgctatatggattacttagctatggctttgatagctttttggctaggagagacttcaataattaaactgataattgctttaatctgggctttgtttttatatctacttctggcttccacttaatggaggtagagatactagctagcagtcaaactacttatgctatagatattgtgttaggaaaaacaactttttatttctttttaagaaatgttttaaaaatcaatgtttctctggaaatttacagtctccttggagaggaatgtctataacattaaatttattgttgattttaacctcatgcaatccatgtacatggctcttgctcatcctccattactttattttgttattattattgtttttacacagagcccacttatgtgtgcatgaagaacaagactattttaagcaactgaacaaggtatcactgcaacctgggaaacaactttgatccttcaatttctccacaattaattctgtggcaggtagcttaggaatcccaagcaggcatagaaaccatgatgaggtctcctgtgcaaacctctccagatctgaaacagcccctgcaaatgctgattgcttgcaaatgcaactgtctaggttacatacaaaatgaacataataagtttttatttcccatggtgatacaccaacagctacattcggcttctaatagtctgcaattcagtaataatagcttggttcagtttagtttattgaagacataaaaatacttggcagccagaggctggaatgcatggttcaagggaacaagattccaacagggaccacaggacctgtacgtggaacatgggtatactcagcatttagcagctatgatttattcatttggtgaaaagcagcattccataaatatgatttatgtaattactgaggagggaattcaatctctaattttatagaagggtacctcagaattttgttgcacacacctcacctttttaataacatttcttttggcagaaaatatttcaatgcctcacttttctcaggagaaaactcttcattttcatcttttagagaggaaagaaaaaaaatatcaagttgcttttctcagtaactggcttgagagcttaggcattacacatctctgctgtgaaaccgaaggatttcttgaattcagctcaaatatcttaagcagagctatttgggtataattttttaatcaaaaatgtatcttctagaggtgaaaatttaaaactttagactggaaaatattcatttaacataagatgccgttattaggtgctagaaagtttagataatgttggtaatgaaatccaccatatttttatttatcttccacattaatgaaactcgcttaatatttggactaagaagacctgggcacaattagcactgtatctcaactcaactatgcaacacacttgaccgtatgagcttcaggaatctgttggcttccctaagctttggtttatccatttaccaaatgaagagtttgtcagccatctgccttatctgctacctcacagatgtgttttaagtatacctgaatatcaaatagaataataaatgcagaaatggtaggtcaactttacagaattttgtgagcttttattatttcataaaaagtaggccagtgacaccatgaagatatgttctttgagctgttcctacrttggtaacagtggcattacacaattccacatactctgccagcctctttgttgcttgtgatacaaaattgtaactagtgatgaaccaaggattaaggtagtctgttactatagtcatgggagacaatctgggaatgacacaaagaatcctggttcaagatggaggtctttcagtgtgtgattttgggtaactcactgaatttttttaaacctcagttatctcatctgtaaaatatttgaataaaaccccttgatactgtgcctccagactgctccatcaaaagaagcaatggaaactctttggaaacctaaaacccacaaatggaaaktgttatcatttatcttatatttggacatgctaacctttagcattgacaaatgccattatgtaaaatacaattatttcctcataaaagcttaatgctgtactggtgaaggagataatcctttctgtttgttttctatgataaacagctttcagtataattgcagtaaataaaatctgtaatgtctttataaatctttatttagtcagaaccatgactatttcatatagtgaccttttcttttgaaaatgatgagtcttctttgtcaataaaaacttgaggagtttacaaacagacaatggaatcatcattattaagaaaactcaaacaaagtgttttaacaataatataggtgtttaagaaactccacgtatgaaaacccatatttgcaaaatagattagttggggaaaaaggtaatgggataatgactttacataattattcattgcctcttaaaagctttcaaataggttttagaaacagatatattatctgatgaaatatgaaataagtacattgatataatgtagaattaaaacaaagggttacagaaaaaacttaggggcaggaagtggctttttgttggttttcactttagtaagataaaaagcttttatatggtgtgaaatcatttaaatatacatagatatacagaaaaatattgaactaatacaatagttagattttgtctatttttttatggtggtaaaatatatgtaacataaagtttacaattttaaccattttaagtgtatagttcagtgtcattaagtacatttacactggtatgtaagcatcactattctccatctctagcacattttcatcctccccaactaaaactctgcactcattaaagagttatattttgaataattttgtcaccttgatctatttacactaccataaaatttatctttggtatttaaatatatttacagcagtgtcttctattgtagcaatattttaaataaagagaggctttttccaaatatatttaattaattaggcaaattgaatttatatactcatatattaggacctgttataataaatttttgttataagctaatttgtaattttatttttgagcatttatttgataccagaatcttgccataacaataaaattttttggttctgcaaagaaccaaaatttctgcaaagaaattttctcctaaaaacttaacttaacaatccttggctacattccattatttcaatgattttctctatattatatgaagtaatgtggaagaaattctaccccaggtgcattgtgtccacgttttttgatatctataaaatttgaaaattaatttgaactttataatattgatatttttgttctgtctcctacattgtttaggggattatacattggtacagtttctatagagggtaattaatcagatctctcaaaagtttaaaaagtacattctttgacttggcaactacatctgtaagaatttatcctatgtttatacccagatgaattcaccaagggatatatagctatgaacaactcttgaaacacattattcagaaggcatacaacccaataaatatggggaaaatgtataaaaagactcttccaaaagtatacaaatggccaaaagcccatgaaaagatgttatcagggaaatgcaaattaaaaccacaatgagatacactacacactcaccaagaacggctaattataaaaaggacaattctaaatgtccrtgaggatgtagagcaactggagctcatatattgatggtgggattacgaaatgttacagttactttggaaaacagtttggcaatgtgttataaagttcaataaatacatatcaaataaaacatatgttcatgcaaagacttgtttacaaatgttcacagcaattttgttcaaaattgcttctaaataggaaaacccaaaatgtccatcaactggagaatatataaatagtggtatatccatatattgaaattctactcagcaatgaaaaggagtgagcaatggatacatgcaataacaagggtgaatctcaaacacattatgttttaagagcacayagtgtatgattccctttatataaaattctagaagaggaaaaatccaggtattttgacagaaaacagttaagtggttaagtaggttaaccacaaatagttaccaggaaactttttaaggtgatgaaaatttttggaccaggcacagtggcttacacctataatcccagcactttgggaggccaaggtgaaaggattgtttgagcccaggaattcaagtccaggctaggcaacakagaaagtccctgtctctatacaaaaaataaaaagtttagccaggcatggtggtgcacacctgtggtctcagctacttgggaggctgaggtgggaggatcacttgggcccaggaggtcaaggatgcagtcagctgtgattgtgccactgcactccagcctaggcaacagggtgagaccctgtctcaaaaataaatgaaaagggctgggcatggtggctcatgcctgtmatcccagcactttgggaggccgaggcgggcggatcacgaagtcaggagatcaagaccatcctggctaacacggtgaaaccccatctctactaaaaatacaaaaaattagccgggtatggtggtgggcgcctgtagtcccagctactagggaggctgaggcaggagattggcgtgaacctgggaggcggagcttgcagtgagcctagagcatgccactgcattccatccaacctgggcgacagagcaagactccgtctcaaaaataaatacataaataaataaaatttaaaaaaggaaaaataaaaatttctatatgttgattggtgtggtggttacataggtgcacatattcttaaaaactcatcaacccgtatatctaaaacagctatatttcataatatgtaattatgtcttagttgacaaagttgatttaaaaaatgacagcaatggatcgtaacccattaaattaaatagaaaaccatgaaccccctactagtacaagtgaattcattaacagtttgatgaagaagaggaatcttacatagtttcaaagcactaccccacaaaatatgcctattcagtgtaaagtggaaaaggcttacttttacaatggaaaagctggagagatactattttaatcaaatgatcaaagtgaacatcataagtaataggatatgtcaaaatcaagtgcaacctgatagaatgcaaggagaggaaaacatcacttctgtgctattcttgccatagatgcacastcacacactgtataatgatgcttcagtcagtgacagaccacatatacaatggcagtcccataagactataatggagccgaaaaattcctatagtctgatgacatctcagccatcataactttgtagtgcaacacattaatgacatgtttgcagtgatgttcgtgtaaaaaaacctactgtgctgccaactgtataaaaggccaacacacacaactatatacagtacatgatacttgataatcataataaactactatgtttctggtttatgtrtgcaccacactttttattgttattttttagtgtactccttctacttataaaaaacaatcttaaatgtaaaagaacctcaggcaggtctttcgggagggattccaaaagaaggtattgttatcctaggagatgacagctccatgcatcttactacccctgaacaccttccagtgagacaaagtgtggaggtggaagacaatgatgttgatgatcctgacccatgcaagcctaggctaacaggctaatgtgtatgtttggtcttagtttcaacaacaacaaaaaaaattaagtaaaaaataaaaattttttaataatttcaattttcattataaattaaaggatacacatgcaggtttattacataggcaaattgcattacgctgaagcttggggtcccagtgatttcatcacccagaaagtaagcatagtacccaacaggtggttcttcagcctacactcctgtccctccctccaccgtctagtggtccccaatgtctattgttgccatctttacattcatgtgtattcaatgtttagctcctacctataagtgagaacatgcagtgtatggtttgctgttcttatgttagttcacttaggattatggcctccaactccatccatgttactgtgaaggacatgatttcattctttttatggctgtatagtattccatcgtgtatacgtaccacattttctttatccaatctacctttgatgagtacctgagttgattccatttctttgttatagtgaatagtgctgcagtgaacatataggtgcatctgtctttttgatagaatgaattatttttctttaggtatatacccaagaagtgggattgctgggtaaacggcaatcccatttcaagttatttgagaaatcaaactgctttccacagtggctgaactagtttgcatttccaccaacagtgtatatccatttcctttactcctcagccccaccagcatctgccttttttttgtttgtttctttttgttttttgttttttgactttttaattattgccattcttaccgatgtgagatgatatctcgttgtggttttgatttgtatttccctaatgattagtgatgttgaccattttttaatgtttgttggacagttgtatgtcttattttgagaagtgtctgttcatgccctttgcccattttctaatagaatttttttcttttttgcttgttgatttgcttcagttccctttctattctggatattggagatttgtcagatgcgtagtttgcaaatattttctcccattctataggctctctgtttactccattggtaatttcttttgctgtgcagaagatctttagtttacttaagtcctacttatcaatttttattttgttgaaattgcctttgggacttaacaataaattatttgccaaagcctatggtgagaatggtatttcccagatttttttttaggattttaatagtttgaggtatcccatttaaacctttaatccatcttgagttaatttttgcatttagtgagatgtaagggtccagttttatgcttctgcatatggctagccagttatgccagcatcgtttgttgactagggagtccttttcctatagcttatgtttgttaattttgttgaagatggttgtaggtgtgccagtttactcctgggttctctattctgttccactgctctctgtgtctatttttgtactggtatcatgttgttttgattcctgtagccttaaagtatagtttgaagtcaagcgatatgatgcctctgactttgttctttttgcttaggattgctttggccattcaggctctttcttggttccaaatgaattttagaacagagttttctaattctgcgaaaaatgacgttggtattttgataaggatagcattgaatctgtaattgctttgggtagtatggccattttaactatattgatttctccaatccatgagcatgcgatattttcaatttttttgtgtcatctttgatttctttctttcagcagtgtttttaggtggtgttgttgttgttgttgttgagatctttcacctccttggttaaatgaattcctatacttttcattttcattgtggctagcataaatggaattgtgttcttgatttggttctcagctagaatgtcactggtatataaaaatgctgctgatttttgtacattgattttgtatcctgaaactttactgaattcatttatcagttccaggagccttttggcagagtctttaggctgtcctaagtatgggataatatcatcagtgaagagtcataatttgacttcttctttttctatttggatgccttttttttttctttctcttgccttattgctctggctagggcttttggtactatgttaaataggaatggtgagagtgggcacacttgtcttgttccagttctcaaggggaatggtttcagcttttgcccattcagtatgatgttggctgtgggtttgtcatagatggctcttaatattctaaggtctgctccttctatgcctagtctgctgagagtcatcataaagagatgttggattttatagaaggctttgtctgtgtctgttgagatgatcctgtgatttttgtttttgattctgtttatgtggtgaaacccgtttattgattttcatgtgttaaatcaaccttgcattttagaagtaaactctacttgatcttggtgaattaactttttgatgtgctgctggattcagcttgctagtattttgttgaggatttttgcatctacattcatcagagataattagcctgaagttttctttctttatcatgtctctgccaaattttggtattaagctgatgttggcttcacagaatgagttcgggaggagtacatcctcctcgatttttgtaatagtttcagtaggattggtatcagttctttgtaaatctagtagaattcagctgtgaatttatctaatccaaggctccttttggttggtaggttttttattactggttcaatttccaaatttgtttttggtctgttcaaggtttcaatttcttcctggttcaaacttgagaggttgtgtatgcatccaagaatttatcctttcctctagattttctagtttctgttcatagaggtgttcataacagtctctgaggatcttttgtatttctgtgggattggttgtaatgtcatctttaccatttctgattgtgcttgtttggatcatctcttttctttttttctttgttaacttgtctatcaacattgtttattcttttgaagaaaaaactctcggttttattgatcttttgtatggatttgggggcctcaatttcattcagttcttctctaattttggttatttattttcttctactagctttgcagttgcattgttcttttttttctagtacctctagttgcattgttaggycattaatttaagagctttctgacttttcgatgtgggcatctgtgaacacagactcaatatcctccttctatctatttgaaattatatattatatatatatatcattgttaactatagtcatcctacagtgttataaaacactagaactggctgggcatagtggctcatgcctgtagtcccagcactttgggaggccaaggtgggtggatcacttgaggtcaggaattcgagaccagactggccaacatgatgaaaccccatctctaataaaattacaaaaattagctgagctagtggcatacatacacctatattcccagctactcaggaagctgaggcaggagaactgcctgaaccttggagacggaggttgcagtgagccaagatagcaccactgcactccagcctaagcaacagagcaagactctgtctcaaaaacaaacaaaaaaaacactagaactcattcctatctagctataatttagtgtccctcagcaaatctttccatgtccccccttctctatacctttcccagtatcaagtatcctatgttctacttgttatttctataagatttactcttttttttagcttccacatatgagtgaaaacatgcggtgtttaagtttctgctcctggcttatttcacttaatataatccctccagttccatccacattacagcaaatgacaagatcttattcttttttatgtctgaacagtattccactttgtgcgtgtatgtatgtatgtgtgtatacacatatatatatatgtacatacatatatatgtcacctttttaatccattcatctactgttggacacctaagttgattccatatcttggctattatgaataatgctgcaataaacatgggggtgcagatatctccatgatatactgatgtcctttcctttggataattcccagaagtgggatttttgggccatcaaaactacttgtagttttttgagaaaccttcatactgttttccatagtggttgtactagtttacattcccaccaacagtgtataagagtttgggggatatgttttaatattatttacaaggcaagtctacgggtgacttttaacttttgaaggataatttcactaaatacagaattctgacttagtagttttctcttttaacatttccaatattttactccaattacttcttgcttgtatagtaactgaagagaaatctgatctaatttttaccctagctctcctataggtaaggtttcccctcaacctcctggcttctttcaatgtatttcctttgtctgctaggtattttattcttttttcttctgttgaatatgatatgcctagatgtagatgtttttggcatttattcttcttagtgttcactgagcttcctggatctgtgatttggtttctatcatttgttttgtgaaattctcattcattattgcttcaaatatttctttcatttcttcttctctatcttttctttctggtattcccagtgtgtatatgttgcagcttttgtaatggtcccatagttattggatattctgttccatttttccattcttttttctcttcacatttccattttagaagtttttattgacatatctttaagctaattatttttctctttggcgatgttcagtctattgaggaagccattacaggcaatctttaattctgttagagtggtttttatttattttttatttatttttatttttatttttttgagatgaaatcttactctatcgccaggctggagggcagtggcacgatctcagctcactgcaacctcctcctcccaggttcaagtgattctcctgcctcaggctcctgagtagctggaactacaggcgtgtgccaccatgcccagctaatttttgtatttttagtagagacggggtttcaccacgttggccaggatggtctcgatctcttgacctcatgatccgccagcctcagcctcccaaagtgctgggattacaggcgtgagccaccacacccagttgagtgtttttgatttcttacatgtgattttgattttatcttacccacgttcttgaatgtcgcccacttttgccataagaacccttagcatattaattatagttgttttaagtttcctgtctgataatttcaatatatcttccatttatgtgtctggttctggtacttcttctatctctgaaaactgtggtctttgtcttttattatgccttgtaatattttgttgaaagctgggcataaggtactgggcaaaagtaactagtaaataggtttcttcgtgtaaagttttatttttatctggcttttaggggttaggttgtgtttactattagctgcagctttaggtatcagaagctaaagtttcctctggtgtttatgatgttgtctcccttgatgtctttgaggttccctactgacttcttaaatcaggtctaatatgcagttttttagttatattatcctgttattacacaggagccctattgacgtggggataggatggaaagtattctgtgtttctatacttaggtctctggcctttagggaatctctgcctttgggctataaccttcataagtgcttctcagttcccacccctccttcagtgggatgggaagtggagagaggctagagctgggcaaactccttcccccaagtgaaaggctagagccagctacagctggatattttccttcccccaggttggatagcctcttggaaaattaaagtcaattaggctctagtgaaattgtttcctttgagaacaggtcttattaagaagaatagaattctctggtcatatttcaagatggctgctttcccctttcctcttccaaaatcaagttgaggttattccccaattttcactttgagatcctgagagaactcctggaggtaaaactcataaaaggatggggcctccaagtactgagcccacgggagtttttaactctcagatttgtacacacaaaccctctagcagttttccaattgtaattgagattttctgactccagtaccggttccagtggtggtttcttctcttgtgtttctgttgaagttgtgattttctccatctgcctgtctctctaattcttgaggcagtggtttgccctatgctgtcaattctctaatggatgtaaaaagaaatggttgactttcagtttgttatgcttttttattgttgtgtgaataggagtgatgccttccaagcttcttgcatgccagaccagaaactggaaatggagttcctctatttaaaaaaatacataattattagttattctgaagttcttgcttggcttatcaatgagtcgacttctattgtctatttttattttcatggttggagatatatatgtatatatatatgtatctggatattgttggatatatatatctggactatatatatatatatatatatatattgttggatatatatatatcacagacattgtgagttacaaatatttcagatgacctcgatattcatcagagagttatctcactttccttcgctaggcatttagcattagggattgatcacttcaagcccgtcagggactgaactgtactgaagaggggttacagttttagtaaggttcagtttacaactatttcttcatgggaccttccaggctcttgattaagtgctattaaaatgtctatrtctatattctggaatgtcttgacatgactaagctctgccctgattttcctaggtcagagctccggactccagccccatgcaacttcaaaatatgacaaatgtcttgaaggggagattggcatgcagatgaggaaggccctctcgccaacacatttgtatttcctctgtactgtgagactgtgggagatttactgcgacatttagaagctttcttccaaactcctgggcctccgacactggttctaaactcagcaaatgttctttgggaaaaacagacagtgcatgtgaggcccctcgagtttggaatttatgtctccagcttcacatggtctctcaagtgcttatgcttttcttctctctgccacccacattcccacatcccgcccaccccccaactttcctcccttcaccttcccatggagactttttgcctgggctaaatctgatcctcagcccactctcagaatcgataaatgcccctaggtgattgtaagctcacctaagatatactttttctcctctagaattttagtttattagatttttctagttgtctttgcaaaagcgttaacaggctctgacttctgacattcaactagatgtggaatatccaacccctagcatttcatggaatgtactgaccaagataaaatgtgttcttattaaacaatgccatttcttgaccacttctgtttttaggaattgtggtatctgagtcatggtgattagaagtactaatgaaataaatgggaaaattaaacttctactaacatttcatatagtagggagatgtctgtgaagaattataactggtacagattttgtgtttataaacaaggagacagaaaatgcagaaaataaaaaatattttatttagttttaaagtggtcagagtactttgtttctaatctcataacattaactagcaacagattgaacttttaagcaaattcgtctgacctagtagctactaggattacctactgcatgtagaaaccattcttaacttgagggccacataaaaagaggccattgtcagtaatttgccaacccttgatccagaccatgtattgctctacctctaaaccatagttgcttcatttgcttaagtcttttcacataataaaacccttattataaggaggtggtgctgttaccaggacaaccaggaactgggcctctactattgtcagctgaattctctgctccgttgtcaattctcaactccatttctggcttacctcaaacagagtcacaagaaagtaaatattttgcaatcttcttgtccttagctgttcgttcctccagaatgacatagagatttgtaaatattcactggaattcaatggcttcatgcattctatttccacaaacaaatcctgatacatttctctccttcaatataaagtactcattttctgatccgtattagccagcatcttgcactccaaataaccagtaacaaaaagatccatgggttgaggtgagattattgctttagatagagaagtatctgaccattgttaattactttgaaaacagatatgtcaaaaaagataaaacatacatttattgtccctgacaatttacaaaccaaaatataccataatgcaacaaactatctgggttgtggcttatctcctcagttgaaacactattgccaatgctaaacaatggaacacagtatttggctattggctaaagaaaatgatgttcatacagcttagacagaaattagtcattgagtcactagagactataagcagcatatgaatgcctgaaacttacagaagaatcaatacaggctattaaactctcatttcttagaataccgtatacttgcgtgtttaaactgacatcttaaaaagttttgtaaagagcaattcaaactcacagcatgataaataatctttaggtttaatgagacctcaagaactagaccagcttgaagcatgccatcttacctagttacttaagaagctagtttttccttttgtaacatgatctcagaaaaaagaaaatataatcattgttctaaggcaatccacaaactctgttactcccattacattttcaaaactgcagacactcagggggtgtccgattcatgcctggggccatgtgaaacacccacctctgtgagtagctttattaactctataaacacttcaagacattcctagcagtgtggggtagcacacatatctattgtctatcttaggtttggaatcatttttcctcttaaaaataacacactgaaccaattagcttttctaaatcaaattaacctaatagcattcaaaaactgacaaacataatctgcttgttctaagacaaaagtggattagtgaacagaatcatatctctagtcaggtccaaatcaagttataaattctaaccaaacagtgattgctggaataagtcatattattagtatgcatagtcatactgatctcaaatgtaagcaacataggccttttcagcagggagatataaaagtttagagttgaagaatgtcttttcatgttgtggtagagagcttgtttcctttgacgtacatggctccctcaagccttaggctatttagttacatcccttgtagtcacaggaaggaatagcactcctcatttttctataccatcttttaggcatgttattgtttaatacttttttttttgttgcctgcctgctgcttgttagtatatgcaccaaagcaaatgaggtaagacttcaatgcatcaaatgcttttccttaaaacaacatttttattgaaatatgaaacaaatatttttattaccttctttatagaagtattttttaaagaatagtgattgataatattgacagaaaggaggacctatgaattatctataaattatctttatatttgaactattcacaaatgcagaaaatttaaaaatcaaatacatttttcacttgctaatatatcttttcatgagacattatcctataaaatccacagagggatgtgtccatttctattctctgccaacccttttggtaccacccattggacataacatttagaattaaattaaggttatcactattgttaagcaaatactattagaggttagactggcaggtcttcagaaatagctcacactggagccatgcatctcagtactcacactcctgtgtagcctcctttccttgaatctgagaatctgagatggtcctgtaacttgtttttaaccagaagaacatggtagaagtgatactgcctgacttctgagataaaattgtaagattccttgcagattttcacctaggtcccttggaatgagtaccctggaaaaagccagcagacaccacgctgtgagcaaatgcccaacctagccaagcagtggagcaacatggggaaaacggagatacgtggacattctccagctatttcagtcaacccagccaaggagaagacatgtgagtgtagatgctattgtatatgtctaggccagtaaagcctttagcaagctggagccccagcagctatttgaattcaatgagagaccccaagtgagagccaccatattgacccaatcaacacaccgaagtgtgagagagaataattaagtgctagcctaagccactgaattttgagggtggtttgttacacagcaatcaaccaaagcaaagatattggttacttgtttgggggtttcatttttaattataacattccatggcttctaaacaaattttgcacttataattttatcaatttactgataatcctgctgtccttgttttgtatctacaatgcttagattagaaaatctaatggagaagtgtgtgtgtttgtgtgtgtgtgtgtgtgtgtgtgtgtgtgtatttcactcttttatataatggattttgaggaacaactagattggctttctaagagagggggaaatgcttctgaatattttaagtaaaattttgatctacaacaactctgctgtaaatgtttaatataatattattttgagactttgcatgagctaaaaacatctaaagctaataaagccaggcttttaaagagaaaaagagtaattataggttgcctgtaagaaactcacttactttacttttttatttatctattttttaacttatcattttagatactctctgaattttaattgtagtgtttagatgttgatctgtctttacatgtcaaacatttaaattaactcttttgcctgaaagaaggaataccaagatacataaattgaataaaaggagtggtcttgagcaccataaaaatacaatgtttgggccgggcatggtggctcatgcctgtaatcccagcactttgggaggccgcagctggtggatcacgaggccaggagattgagaccatcatgactaacacaatgaaaccccatctctactaaaaatacaaaagcaaattagccaggcgtggtggcatgcacctgtagtctcagctactcgggaggctgaggcaggagaattgcttgaacccagcaggtgaaggttgcagtgagctgagatcacaccactgcactccagcctgggtgacagagagagactccgtctcaaagaaaaacaaaacgatgtttcaaaatctacacagaaaagaaaaagaggggagaagaaaactaaaaagagactctaagaaaaatattgaagaagaagatggttggtgaaggggatattgctctagtactagtatttctttaggcagctgtttaatgttgcctctgaataagtacatattttaaggcagttaacaatctggtttatgaaaaaatgggaaatcactgtgtgttagtgagccagacagatgtgtatagtgtggatagggttctctctttaaaatgcacagaactggaatttagcgttaacctcataagcacttgatgttcatgtgggtgctcaccaggcaatatgctccagctattgaacagaatgcattcacttgctgtatactgagtggtcccctagtaagctggaaaaagttgtacttatgtcatgtttaatttatatagtgtagacatcatgaataattaaatttaataactactcaatgtcagtgtttatatatggctagtagccaatattttttggttcttcaagaagaaaggtacatgtcttaggaaaacttgatacaggaaaatatcagtattctcacttcagagtcattcctttggggaaaaaaaaaggctacaaatttcctaactacgtgttaagcattggtgcaggcattgataaagtttggatgtttgtcccccacaaatgtcatattgaaatgtaatccccaatgaagacggggcctggtaggaggtgttggcatcctggggtcagatctctcatgaatggcttggtgttgtccttgggatagtgagtaagttcttgcgagatctagttgtttaagagtctggcacctcctccctctctctcttgctccctcgctctcaccatgtgacatgcttgctctcccttcaccttctgctatgattggaagcttactgaggccctcactatgagcagatgctggaacaatgcttatacagcctgcagaactgtgagccaattaaacttcttttcacattacccagcctcgggtatttctttatagcaatgcaagagttggctaacatgggcatagagggcatatagcagctacatttgcctgaggtgtatagcaaaggtggtgtcaggaaaggttagcattgagctttgttctttaaagtgagtaagttaccaggatggtaaaggagtatcgatgcaaagtaaggagtggagaaatacattttaagtggagggaattatttaaaacagggcccgaatgtcttcctcgggtgttgccatatattgtatctgaacatcttatatagtatttattatttgatgatgtaaaatcagtttcttattgtttccttctttctctagattgcaagcttagggggcagcaataatacgtcacttatgtttgagtcctaattcctcatacagtctttggcataaataataggcactcagtaattactataaataaagaaagaaaatagctgtagtaaaaatggataacatttgttgcaacagtttcatttagatatttatgagagtgttagagctccctgttatattgtaagattttttagggaagggatcttgcattagttttatcctttaaatggtgcctgactcatagttagaaccctatggaaagcaaattatagtcctttacatttctttaatcagccagggcctaatttaaccctatacgtttatataaagggcagaaattattacaataaataatcttgaaacagcagaattctgcattacaaatatgaggctgccatatttctgtgtttctggttgcctagaaacaaaaatgtgaagttgtatgaaactataagagtttgtactcataagatattctatgcaaagttcagcctgcctctctgggtttggaaagcatcaattctgaggagcttcagacaatattgcggtcttcatagctgaaagtttgcaaagttgggcttgtttcatggtattaccggcatatccaattagctaaagaaaataattcttcatttagagtatccagaacagaccaataacaatattgttcaataacaactgctctaaatttactgatatttaacaaatattttcagactttacgtaatgactgctatggtttggatatttgctccttgcaaacctcatgttgaaatttggtcctcagtgttggaggtggggcccaatgggaggtatttgggttatggagatggatccctcaagaataaataaatgcggtcccttggggtgaatgagttctcactctattagttcccaccagagctggttgtgaaaaagaacctggcacctccctctttctgtcttgc

SEQ ID NO: 96363 - DNA, 102507 bp, Homo sapiens
  misc_feature (1)...(102507): n = A,T,C or G
gcagtagcgtgatcacagctcactgcaaccttgacctcctggcctgaagccatcctcctgcctcagcctctccaaagctctgaggttacagatgtaagccactgtaccaggtggaggcagaatttgaacaaagggttatgaggagatgccagatgatctctaaggtcccttctgccctgtagtggcagggaatttttgttttcaaatctttgacatgagcatagacctttaagctaaaagagttgaataataactgagagacacaggataggataaagaaaacttgtaggctaggcacggtggctcattcctgtaatcacagcactttgggaggctgaggcaggcagactgcttgagttctggagttcaagaccagcctgggcatcatagcaaaccccgtgtctacaaaaaatacaaaaattagcaaggtgtgggagcacatgtctgtagccccagctattagccaggtgtggtggcacgtgcctgtagcctcagctactcaggaggcctaggtgggagaatcacctgagcctgggaagtagaggctgcagtgacccatgatcaaccactgcattccatcctgggcaagagtgagagtctgtctcaaaacaaaaataaacacaaaaaaccatgttaaaaaaaaaaggcaccaaaataaaatttaaaaaaaagaaaaagcaccaacaaattaattttttccccttcttcctaagaaatcaaaaattttctatttaaatgtaatgaaaagatacattcataaaagttaaattccttccaacgctgagctatatagtaaaaaccaaacaaactagcatgaaaccctcagtttgagtgtcctgcagagacagggcttggagatctacccaaatgcaggagaactggttctctccacaaggagctccttttcaaaaacaaggggtgcctctgaacacccacctgaattaggatgtggcaaacacgacatgcaggcttttgttttgggtctctgatttctgtgcatgtaggaccttcccctcttggtgtccgtaagagttgccattcatttgcatatacatagggacattaaacaacaacagccctgtgaaggtgtggagagcatgactggccattgctggactgacacaagatgttggcagttaccgttcactggttggcatttttaagtaaatatttattgataaaaacctcataaaacaacaaaaattcacgttacttaggggaaaatgtgtctaagcattcccagcattttttgaatgtaatgatacattttgtgaattttagtagctttggaaataaccttaatgttgtcccaaaagttaaaacaaattttcagcagaaattcaaagtctgttttaggaattgtttttcatctgcaatataactaagagttatgaagaagcagctttggagagaggctctagaaaacacttcatttcatctgcattatgcccaggttccttaataaaggaaagcacaactgaatgactacatggaaggtataaaaaggcaaagaatgaattaaggggcaggtggatcatagacttttaacttttggctagttacatgagatactccagctgtgaatgcatagcaagtgattccattttaagctaataactatgcttacattttagcctactggtctttcttgaaagagacattggcagactaaagagaaagaacccaatccatattgtgtaaagagaaagtgatttcaaaaatattaaggtgaaaaataaattgttaattttcaaaattctatggttccccacacccttccttcatccagacaaaaatggctagtgatcattttatgtaattaatacacaggtgtgtggggaatggaggtgtttctgttagttgctgtcacttttttctggacatcaacctccttttcttcgcttaaattaatagcacagcttctgtcactccaaactaataatggcagcagtgaaacctatttgctattttagaaaaatgactagtagaacacatatttcataatatcacatgataaaacaatttaaaattcacaggtaattaaaaacacttcactgtcctatagtgacaactaagatcactttaaaaaatccctcatttatcagaccacatttatatgcaaggagaaataaaatcttttcacgttccatgagggaagaagatagaatgaagtctgacgtagtgcaaaaatgtgattaaagtgaaacaagttgcaataagaattagacttctgtctttctaaggataattctctattcatgttttcctgaacacaaacaaatgctacaccaaaaaaaaaacaacccataatatagatagtattaattaggaggttctttaaaaacatttcaaaattctgctgcacaataggaaacctaattttcatactctgaaatgtatcaggtacgtaaagttgattcttttcctagttccaagaaggttttgccttctttttctttttcttttcttttcttttttttttgagatggagtctcgctctgttgcccaggctggagtacagtggtgtaatcttggctcactgcaaagctccacctcctgggttcacgccattctcctgcctcagcctcctgagtagctgggactacaggcgcccgccaccatgcctggctaattttttgtatatttagtagagacagggtttcactgtgttagccaggatggtctcgatctcctgaccttgtgatctgctcacctcggcctcccaaagtgctgggattacaggcgtgagccactgcgcccagctctttttttttttgagacagagtcttgctctgtcacccaggctggagggcagtggcacaatcttggctcactgcaacctccacctcccaggttcaagtgattctcatgcttcagcctcctgagtagctgggatcacaggcatgcagcaccatacctggccaagttttgtatttttagtagagacagggtttcaccatggtggccaggctgggctcaaactcctgacctcaagtgatctgcctgccttggcctccttaaagtgctgggattacaggtgtgagccactgcgcctggcttgccttcttttgaaataaattggctgtctcctatctatggaggtctagaaactcttgaacagagtatgaattatatgtctccactggcctggaaatttctatccttgacattgttggttttgttgcccattttgtggggcagaagaaaggatgcaggcagggcggagtggcacagtttcctctcaggcctacaatcagaaacaggttggcacaagcggacaatcccagggccaggatcagggtgaggtcagtgaggctgagttgagaggcaagtgcagggtcggatcctgtctttacttaagattttgatattttgttcaccacatttcttttctgcattaatttttattttaaaaaatgtcgcatccctgagttttttggcacctacttacattttgtgcccagggtgaacgcctcactgaccttaccttcatcctggccctgctcaaccaacacctgggctgtgggctcaggtagatctgtgaggccacagtgagcacagcctctcccttttaccctcttcagctcagttgggtcaggaaagtctcctacaagaactaagttctccctgcttgcaaaaacgaaaacaaagggtaaagaaaagtgtcctctttgtctaacaggaagccaatgggagtgttacagaacagcagttgtcgtagatagaactgacccatgggagtttcagttgctctattccagggcttatatctttctggacaggaaccataatgagcaaaagaactaatgcccacaaggtgaatttagcagaagaatcaaggagtcagaataatacattaattcaaaaagtaggaagactccctccaaagaatgctaagttaaataaaaatgagagacttaagatgcacacagaaatgtgacataaagctcttttatgtagtgaaatgggcaggagtacatgcggtacacctaaagtaaccgatggtaactttccattcttgaagagaacaaaataatactttcaatcgtatcgctaaacttctcatgggacaggttggtatgtgtctccttgtattttccaaaaatacatgcttaccctcctcaggcaggggccggatgctgccccccacaaagaacactggggccctgctttctctccatttgggtttgaagtgagtagagtggagaaagggatgctttcagaaatgttatcttacttaatgcccccatagcctgtagctccgtaaggaacagtctctcgggagaaagagaggattaggagctgtggggggaaaagctttccttctggcagtttctacagctagaaccatgaagcccccaggtgtcacactgttttctctggagaaatattataagattagatgtaatgttattacgctgtctcatttggcaagtagtatcattatccgattgtttggaaaggtgaaatacaggggattctggttctttgccctaccatggaaggaacatttggacaccacattactttttttggaaaacggaagctaaagctagmggccaaaaaagctctcaaaagagaagatgaagaaagttaggaatattggtctgattaaaaagctctcaaaattatctagtgaatgctgacattagataggtattggtctttaggtaataacatgggtatgtatctactttatgcacttctatgcagatttagtagaaaaaaatacctaaatatatatttaattccataggatcccagtgcattttgaggatttaaacagataagccaacctcaaagggactgattcttgcaactaaaacacagacacctctggggtgaaatgtggcaacagtttgacaggcatagcagtagcttaggccagaaaggatttatccaattaaaattatgggatgaattttggctggcagaatgtaattaccagccttggaatggatccaggatcctgaggttaacacccctcctcttgccaacaaccctcctacctgccaacactccgagatggagaaggctggatctgacataatcgcacataatactgttgtgacatctaagtacaatgatgatgatgtgagaagcatcatgaacctgattttttttaacactcattatgttacttatttttatgccacattaggctagaaaccaaatgtccacataaatgttaatttcctcaaatctgtgtttaaaaattataattagaaaataaaaaatagatttaaaaattaatttattccgtcaaagtagttatttagtgattatttcactacaggaacaaaattggatcaaaatggtgacatttaatccttgctacacgaaaaaaaaaaaagcaggtcctgattttttggaagcgaaatgtgttttcaaggttgagtggcctagaaaaaaaggaaatgcggaagcctgattcatattcgttgtaactttgactaaatgggtatgcgcaaggactgcttttgtcccggggtgggtccagttcacagtcacggggggcactaatcctccaggaggggatttaccagaagggtgtgtgtgagtgcgtgtgtcccttccaaggaaacgagagaagagccccctgctggtgcatgatcaataggcaaagacctgatcattagattccaatgcccctttaaagtcattaattgactagagaattgtggagggtctggcgatacggaagagcaaacgaaaaggcaacactgataaaaatctgaagcgttcaaggacgccaggcacgtggtgccgggtcagggagggagaggcagagccagcccggtcggtgtgcggctggggtggggcgcgctccgggcgtccgggaggcggagccggcggcagacgctgcgcgcgggccacgcgcggcggcggaggctgcgcgcgggccacgcgcggcggcgacttgggctgggcggtcgccctgccccaccgcccttcggcgctcgcaggtccgctcccctcccaaaccgcagagcggcaggcgcggccgctggttcgagagctcggccggggcagcgcagccgccggctgcccctcgctcccaggcgccacaaccccgcgccctcgccgctgctgcgtcccgcgagacctgtggggaggccgggagtcacttcgggttccctttcagcccacgtggtcctgggacactccacccaggaacctagtcggcaccgcgcagggaatcccagcagcggggttctggccccagcacgcgttgcggcagcctggcgagcgtccttgcggcctccaagtgccggtggggtgcgtgcgcagggggcaggtgaactgctgcactttgcacttgctaggctaggttctccgcgggtggggaggcgcgggggcgggggacggccgmgtgtttaatctatcaccagaggtcatccaatggtaattgaaggatgagctgggaggactaggatctccctgtcccaaacacagagtgttttggggggcttgcgtttgggtcactttctgagcctggtactgccgctcatttcagcttcgctgtgaaggtgaatttttctaacaccatctttgtgtgatttagctgtccacagggaatcaaaatgtggaatgagaggatgaaactaatcctttcttttgcactgttaggggttgccataaacaccatttgttaaaaagcataattatgttgggaaagtgcctgatgagacaattaagctgcataaacacactgaaaacaaatgaaaaccagaagacgcccacaccccttgtgtaaagcaattttttgtttacatagaaacgagaggtctgggttgctttattacaacaatgttattaatatctagaaaaacctaatgacagaatttttatgaattttcagtgatgagatgatggacatgatatgaaaacctgcctgcaaacctgagctagctacgaagcctgagctctctctaggttaagatgattaggccaacgaatgatcctggcgaacaagccagtggatttattgaggnagagcaccattatttgcaccagagcacttttagcttaaactctaaagtttaacgcgtgtctcagagttagaccactgtggttggtatccctcacacagggaacagtggttggtatccctcacacagggaacattacctgtcagaaaaagaccctcattaaatatttgttgaatgaattcatgagggcctcatctatttttagttatggtatttaaaagagaccaaagttatgaggtcctgaacttgaagagggaaattattttcttattattttaagatgttttaattcctttagatcatgaatatcatttgaagtatggaaagatgtgtcaaaaatgctattctagagtactaaaaagtatcaaagcaacctccaaaacctgtataattaattttcaacaaaaatcacatttttgatattattgaataatatgtatcagaatatgtatcatctttcaagttacagaattttgtaaaaagactttaaactgatttagaaactttggtggaacaaggaggaacttagacaattgtcatgtaaaccatccaaatggcttccttatttatttgtataatgtccatggcatggcctgtagacactttcatttttgctgcaagaatttcttttahaagaatccacatattaaataatcttcctcattttctttttctgcatttccccactaagtctagtttaacaacaaaaaaaacatacctgtttgtaaaatagtacagaccttgaaaacagggataaggctaaggaaaactatgcttaaaatgggataacatactttaatgaaaaactttcacttacatgatgaaattcacgctgaggaccctgccaggtattttccagtgtcgttacaaggtttatatgtatgtgaccatgtacacatggtttcttattttagtcaatctggagattttatgctttagaatttttctaggaatgaaatagtaaagtgctcatattatgactgcttcgtttccaaaaagttatgatttttttatagtkaaaacatgaaaatatgaatcaactctagagacacataaaaatttttctcctattccagaaaaatcatgtcttcttccagagtggggctccgtttggctgcctgtttactaaacgtttcagaagccggaagaaaatacattgttgagaacatagcaaaagcagctcttcttgacaaaaatggtaggaaaaacagacaattgaagctgaatattatagtgttttgataatttagtaatttttgtactgtgcacactgtatctacagaacacttttctttctttcttcctgaattttcctccttgctcttgagctgttgcagctctgcgcaactccaggatactgagatagctcagttactcagatgtgcacatatgctcttttccaaatgtctgcatacgctcagcagcgcagctcttaacatttgcgtgtgaatctctgagatgcgtgttgttcaggatattgacaggctcctggggaggatgtatttacataaaagtataatgtttccctcatgggtcgtttatttgatcattaatagaatgagcataatcgtaccttatgctttttattgagcagattaaatgaaaaataaacttgccaaataccaactacttttcccagcactcctgccagcaaagcccatgcaatcattacagtattattatttctaccctcttttctctgtatagacactgttaggcaagtgcatttaaatgatgcgcttaagatcactcagcaatttggtgacagaagactggaactcatgcctccttattccctcggccagtattactatgaaagatactgctctttaaaaaacatttcattttttaaaatgttcctgtggtgacacatggttaggtattatttgtctttactttgacacacacactaatacacacaacagtgtatacaatcatttaaatagaatgctgttattaaatcaataactttttggcaacaggtgaaaccaaccctaaagcatttcagacagtaaattttaatttccgattgtcatttttaatgtggttactgcttttcataagaaagaagtgttttcccccaacccatcttaactgtgagcacatttaagttactgtcttgcaactttgcaggagctagaaatgtctatgaaaattcctgataattgctgataagaaaacttctttggagttggtatgcagctgtgattttgcatgctttttgtggaaagagccagctcgggctcttcattgtcagaaacagtacatctaatgggattgggttgcctgtctctgtgattaagtgaatgtgcagagacatttgtggaagacacacactgatggatgcctgggtctcaactcacagtttttatcagcttattagtggcagcagctcaaatggaattatagctattatactccattacaaataccaaacaatttacttctgctgagattcacactgacagctcctcttgccagcagtaatttcttttctatatgcatgcttaagaaattgcaggagagtgttttattctttcagcatttgattcaattgaatcatatgaaactgagaataaaagcttttcaggagaagatttaggatgaaaaaaattacatcatatctcktttcttccaggagttagagtatgttgaaaaactatataaaataggaagttgcatgatcttcttcttacttcatcttttgtagttttcaaaatgcaaggaaggtagcactagttaagaaaatgaaccttttttttttacaaatattttaaaggcatttatttttaagtgagtggaataaaaccatataaactgtattttttttttctaattaagcaatgtgagcacatttaaatggcctagaaaggtcttaggtaaaggaatctgagtaataaattttagacctacaccagggcaggactctacagatgctcgtttggccatgagtgagtgacatatgtttatcttctcacattattaaaattaatagtgtagggctgttctaagctctgtagttcctgggtgwaacttgtttttcctttcctctgaaaagattaattgttaagctgccaggggacaaggagacaaggtataatagcataaccaaaggtttaattaccgcctgaaaacttttgtccttcactttgaatttgcttttgtaggcttaagggggacttttaagaagcctggaccatgcttgkaaacttcaaaaataactctagggttatgtatggctgccacacaagggaatgtcagctttctcctccaggttacacatattcaagagagkcacaaaccaccaaaagctggaagttgttaacatctgaaggctgttggtggcctccgaaaaggagatggtggactcagaacagtttctaatggacaggtgcatgcgtctcaaaaacctctgctctnggcactaattggtctattctagttttaccagatgtcagatcttgacccaaacagtttagtttctggattttggaaggaaatattgacaaggcctaggtgatgagattgataaggaacaggatttagagccatatgatttggctattgaagaaaggagctaccatcttagactgagttaagggaattttggcaaattcagtagcaagtccaaaagagtgtctcttatagacatcaaaagcttgtgtctgagctgagccatctggttatacaataagatgctgtaagaaaagtggacattgcctctcatgaatttcatgtttattcaatgtsacttccaaaagtcacatcccagaatttttccactaagctaaatttaaatataccagaagaaattaactattaaggttttatcacagaaaaaaaattcttgcacttctgtcttgttttttttacaggaaagaaacatcctcaagtttcagtgctcaatatattttccgatcaagactacaagagatcagtcattacaatagcaacttctgttgataagttgggtaagatttcagtttctttctttacatatatgtcttttttttggttcaggtagacctgaacattctctaatcattgatttcctctgtaaatmtgaatactcccctctattaagtaaagagtctaccacaaagctacacttaatcatttttctgaacatgtaaatctcaaagagtctccatttcctctttgttacagtgaaccttggggtccaagatttcataactttttttttttttttttgctgaaggtgatcacatatcctttggggttaagaaaagacatcttcaggttttagcctgtgaagtaatagtgttgaagtcagctttcatttcactgctaagctggcatagaatgaaacatgctaagcagtgcattctgggttgggagcttgagatctggagttgggccatgagttgacatgtcttatagggacattgtaaggtttagtagagagcttacagataacttcagcaagcataggacagattatcttttttttttcgagataagagtctcactccatcacccagactggagtgcagtggcccgatctcgactcactgcaacctctgcctccggggttcaagcaattcccatgcttcagcctcctttgtagctggaattacaggsacacaccaccatacctggctaactttttatattgttttcagtagagatggggatttgccgtgttggccaggctggtctcaaactcctgacctcaagtgatttgcctgcctcagcctcccaaagtgctgggattataggattgagccactgagcccggcctggacagattatcttgaatgttgtcttaatacaggataaaaatctgctttttcctctattgctaaaatggtcatactgtattactaatgaaaactcagagtaatatcacaaaactcttaggtgtctataatatgcatttagctataataattcaatgaaaaatataattagtggataagagcaaaactaaaataagtaagctttaaaaaatttatgcaaaaaaaaaatttacgtgtttgggcacagtggctcatgcctatagtttcagcactttgggcggccaaggtgggaggattgcctgatgccaggagtttgagaccagcctgggcaacatagcaagactcagtctctaaaaaataaaaaataaaaaaaaattatgtttgtgtatctattttaatataattactcataaggcattctgaaaataaggaatttgattaaattaattggagacaattgaaaaaatttaaagtaaacaattgtaaaaaaaaatcaaatagtataagaccaataaatcttgtataattctcccactttggggaggaaaaagctggaagaaatgtcaagttttatgactattgggaggtggggtgaggggaaaggttagattttgtatttttcattattttggacaaaaaatcttctacacagattacagaagaaaaacaactaggggaccaacaaaatcatagctttttctttagatgcagttgaaagctgaatgattgtttttcacaattttgcatttttaggcagttctgttctggctgcctgcctagaggccttccaggctatcgatatggaagttcaagagggaatccacccttgcctgggagcagtggacttgattccgatttaccctctctctggtgtcacagtggaatagtgtggagtggtggccagaagtaagagaaagtttggggttatgtgttctttcttactggaaaccatttttacaaactgaaatagcttgtgagaatcaaatcactcctcagcccccgggaaaagttgatcttgaagaactgtatcaacaatacactgtgtgtttgtgacacacccctccacttcctaccccatgacattatggaacactaaatgttgtgggatatggcaaaaaaaaaaaaatcaataattttatccctcacaaattcacagtagatcttgaggaaacaatagcagtttctagtaagtcttttaggctcttcagggcagaatgatggtgtgttttgcctatctatctgtgtcctattttcttgagcaggggtaatgatgaggttgaaaatccacttaaatgttaactcttacccctttttcctttgactttttttttttccttttttccctgtgcacaactctaagattttctttagagctgaactgccacttgaatgatttcagccccaggggtaaggttaatttggaaaaatttgagctatgtcacttgaggtgtttttgaattaggcaaattgggagaaaagaaagaccttttgcctggactgtctaactgtaccacggttaattacaagatgcagaggcttataatcttcggggaaaaaaagccgccttaggataattgcattcttttctgtatgacctcagaaatccctctatgatgttgcctcatttttaattaatggtgaattgtctaacatttgggatgtagatttggactttagctgagctacattaagcaccagaaataggaaatgagacttgcttccaaaggagtacctcactacttatgctgcattttatgtgacctgacagttgaagggttatccaagggaaatcttggctccagacttgctttacgttttatccaagaaagagttaaaattcagcatgggggggtggggaaatatgttccacacaaaaatgaagagttcagaattgtccagaccagaataatgattttaattgtcttcaaaacaattatggacaattacattaaatctcaaattagctagtacatgaagttcttcattacatcaggactggtccaccccagatgttcatcctgtgtaggagacagttgagaatcagtgagtctggacacaggatttctcccttcccttgccctttgcttcattggcagctactgtacctcatgatttaaacatggacatttctaattaaatgagagctcagctgcattcttgaactaatttataacatttgatttgaaatgtaatagcttcaatcttcatctgattaaaaacagtcctatactgtacatggttactattttgatgctctaacatgcagtttttatttttacatccccttttctacacagctgttcatctaatatcatccaaattttttttaagttttttttttttttttgtaacagcatgctcaggcattcttatgaggcagaagtattcgcattctaggatccygctgttcttagaacagtgaaaggatgtttttccctagaataaggctttcccagagaaaccagctttaacataataatcagctaactttctctggacaaagggcaataaatagcatcccagtgacataaaagagttgatactgatatgtgtaatttatgtatactttgtatgcaaaaatgctgaataacgtatttcagaactttttaatatcagctgtaagtttgcttatagcttcaggaagaggttcttaaggtgggtccaggatgaggttcttaaagtgggtccaaagttggtattcagaggatttataaataactgtcaacaatttttgcaagtttttacgcatgtgcattgtgtatatatacatagagacatacactcacacataattttgcatatcattttagtttgaggacttttagaataaagggaacagtgatgcagaggcccagaggtgagggcagcctgaacttgagcacctgcaaaggacttcagtatggctgcatggaacttagaggtgtggaatgggaaacacattcctgggaatgttatgaaatgagtctcaagaggtaatcagaggccagattatgaagttttattttttttaaattttttgagatggagtcttgctctgtygcccagggtggagtacagtggtgcaatctcagctcactacaacctccgcctcccagactcaagtgattctcatgcctcagcctcccaggtagctgggactataggtgtgcactgccatacccagctaattgkttttttttttgtatttttagtagaaatggggttttgccatgttagccaggctagtcttgaactcctgacctcaagcaatctgccggcctcggcctcccaaagtgctgggattacaggcatgagccaccgcacttggctagattatgaagttttagatgttaggttgaagggttcaaatcttgtgctaaaggcagtggtaaccactgaagtgttttaagcaagaaaattaaatgattggctttaagttttagaaagatcactctgcctgcatgatagagaatggacaggaagcaggctgaccagtttggaaggatgatattggcctaagagaatagacaatggacagattccatgggctgttgctggtgagggacagagcagtggtgtggtaatgttataacttaaaatgrcagaagaaaggaggtttgagggaaagagcatgaatacattttttttacatgctgtcatttgacagcatgtaaaaggttggcagaggtaaaataataataatgttctaaatgattcatcgtgaacaatgtttacataggtataataatgtaaccactaactattggtccaaattttgatataaatatattgaggggatggttggttatacagtttagagctcaggtgagatgtagatctagtctatatttatttaaagcatacaggtttttccccaatattttggacattggtatttatttatttatttatttattttttgagacagagtctcgctgtgtcacccaggctggagtgcagtgcacgatctcggctcactgcaaaccccgcctcctgtgttcaagcgattctcctgtctcagccttcccagtagctgggattacaggtgtgagccactgcatctggctggttttcattttctataaaaactcacaattgatctattaggctacatcccatttttatcactattaggtctctaaatttttttttttttaagacaggatctcgctgggttggccaggctggagtgcagtggcatgatcccggctcactgcaacctctgcctctctagttcaaacaatcttcccacctcascctgctgagtagctgtgatcacaggtgcatgccaccacacctggctcatttttgtattttttatagagacagggtcttgtcatgttgcccaggtgggtcttgaattcctaggcttaagcaatccccacctcagcctctcaaagtgctggkattacaggcatgagctactgcccctagccaggtctctaaaattatttcctttcctccttctctctctttcttttttcttccttccttccctctctttctatttgtttttatcaaaatgatacaggcatgtagctaaaaatcacatactgtaggggggtttattctaaaaattctaagtacctatctaaccccctttacctcctaccatacacacacttcaatttccttctcctcagagccagctgagtactttctactcttttaccttattgatttaactctagatatcgaaatatcacacttaaacactggtacgtcttggtctttcagttttaggcattatctattgacttctcactgtggaatatgaaaatttagcttccccttaccccacctctcatctctaacacacacacactcacacaaacacagacacacaccactcacacttcccaatcttccaacctctcaacatatttatatcaaaatttgggtcaatagttagtggttacattattataactatgtaaacattgttcacaatgaatcatttagaacattattattattttaccttttctgcataactttatacttttgctggagttggtcattatctttttgataatttgtttgcttagagttttatatacttaccactggtttagctccaaattctgtcaatagttacatctctccatgcattcagatagaacacttcatgcattcattgagggttctatcaattccatcttcttaaagaagtatcttctagaatactctgacctgttccagttaggactagctgccctcagtgtgttgaggataactgtcttcataggatccccctcagccatcatcatgactttcatctttctccatgttggatgccctggtcctcaacctgaatcccatgtcttctctttttcttttttgacttkcttggtttatggtgtcgttttggtggaacacatcctttagtagctttctgaaaaaaaatgaagtacattggtgaccctttgcatatcggaaagtgccattattctaccttcacactgaattgttagtttgtcttgctatagaattccaggttagaaataactttaatttaaagatgttgtgtcactgagttcttgtttccacattgctattgagacttctgaaaccattatgactccttattttttgtatgtgacctttcatttctctctggaggcttgtgaggtctttgcttggttcccagtgttctgaaatttccctgaagtgcttttgtatgggtctgtttccatcccttatgctggatacttggtgagtccttttattctttgaaactttgtccatcagtgctggacaattcttttgaattattccattgatgatttcttccattttctcagttctttctaaaagccccattatttggagattagaactcttttactggtcctctacatttactttctttcttattttccatcactctatttttataacactttctggtgaatttcgtctacttgctgtcccagccttccataagtttttatggcttctatattaatttccaagtgctttcatttactctgtaaatgttccttttattttacttttcaagagaacatcctggttttatttcatgaacgtatcattaatggatcatttcggtttcttcttcctgtataatctcccctcaccttgtccccttcaccctgttgcttttgcctgtatttttttttttaaaggctttccttaaatgtttgataatgccgtgttggctgcttattctgagtggatgctggaaggctgaatggacactccaagtgtgcaggtggggtttgtcaactgtaggctgacatggctgggtcatttctttggggaactcatacttcagtatttttttggtctttcctcttgagctgttcaggttccccagaggaggatcttccagtgtccagcctcgagtggagacaccactgccagtgttttagaagctgagttgcacaaaagggctgaaaaaatctcaacgtttagattgtcaatataaatgttcttttaattcctctcttttcattactcaccccagccctcagctgtgtccatattccccagcccagacaccttgtgttttacctcttacatattctaccagggtgtggcagggcaggtgcctgtctgtgtggatcagggatgggctctgaccgctgctgaagccgacttcccacccatcttctggttttgagcttcccctttgccttccctcccaaagtggggctgctggttctgccctctatcaggcgtctgtgggatgcatcaggtgcttctctgctgctccacttgctgccttgagtctgccgaatcacatccccctcacacattttctctgcagcttccagtgcgattgcctcctctttatttctgttggtttgagttaatgcttgggaaaaaaatttctttataccattttttttcctgggggtttttggaagaaatgaaagtaaacatatggatccacattttcatgttttcctggaagtccctacttctcttggcgattttaaatcatcttggatctttcaggaacaatgcattcacctcacttggaatcattggtaaattttcaggagcattcttcttttgtctgacttctactcagtattgaagatatttagtctgattttctgtacttctatcaagtttctatagacaatttctctgcaggatactgtggaccctgaygyttcttgtatgtgttccacgtcttcctcactctgtgctttcacatgctagacccagtgtctctgtaacatgaccctgttgcctgttgacacacaaactttcatgagaaggattgaatgatgatagaggggaggggtcagcgcagaagattcttaggcaaattctcccaatgccttgacggtgaaaataggcttacytaacctgtaggctcataatattcagctgcaagagtctagaccatagttaatgaattttataaatgatatggaaacttgctttttgtttcatgtcattgatcaaatgaatgtttgcacaatgccgtatcaactaaggtcattatttagagaactggaaagataaatgctagccatataagctacatgaataaagaaatagtgctggcatgattgatacttattgttttgatttttttaaaaaaatatataaaacattaaggactttgatcagaatgatcagccttgtagatttttttcaattattcttatgacttggaggatgtgtgccatgacacattcacacagcgtcaacactcccatggtagtcttgagaccctttgattaccttattacagattgtcaaaacatgggctgatctggcaaatcaggaacaacttttcactttgagaatttctactctgattctccagttgctatggagattgtctcataaaacagtgttggatttggttgagatcagtcaatttagatgctgggttctgatatagttctaaccaccatcaacactaccctcattgccatagcataaaaacaatagttgattttacaaatgtgtgtaaacatatttagggcatagcatttagttgaagaattacaggwatactgccaccatagaaaaatcttagaaaacaagggattgtgcattgggaaagtacttaaaatattaagattgatttccagtgactttagtacattttaactatgaaggagagttaccgggttgctcataaatgcatattgccacaggctgaataaatgcaagaggagtctaccaactactgtaaaacagaggtactaatgaagaaggaaaggccaaatgggagaactgggataaacaaacttaatcttccatgaccagcagttatggatgaacccagccatacttgaaaaagctgcactcttttctcttactgtggctctgctacaacctgcagtgtgagtgagcaagcaagttaaccccatcgggcaacacttggcctgtgggggaccagagctggtggataaatgcttgcctcttttgtccctgagatggacaattctgaggcccatctcagcaggattgagtcccagttgctcacagcttgataccataccctgctatggacttttactccttccctgtatcactcttcctttttttttgaaacagggtttgctttgtcacccaggctgagtgcagtggcatgattgtggctcactgtagccttgaccttccagactcaagtgatcctgccacctccacctcccgaatagctggaactacagcatgtaccaccatgcctggttaatttttgtattttttgtaggatggggtctccctgtgttgcccaggctggtttcaaactcctaggctcaagggatctgcccaccatggctggccccctgtctcactcttgatgtaaaagcaatagggtttattgaaatattgacaagtgtctgggagtggtggctcatgcctataatcccagcactttgggaggccaaggtgggaggattgtttgagcccaggagttcaagaccagcctgggcaacatagggagacctcgtctctacaaagaataaaaataaaaaacattagctgggtgtggtagtgcgtgcctgtagtcttagttacttgggaagctgagatgggaggatcccttgagcccaggaggttgaggctgcagtgagccatgatgtgctacttgtactccagcctgggcaacagagcgagaccctatctcaaacacaaaacaaacaaacagaaaaagaaatatcaacaagaataaatgtcttataagaatctcctaattggaacaaatggggggatacatgaaatccatgctgcctgactatacacttcttgtaattgtttcccaatctagaagccacagttgagatttacagctaaaaattaggagccccctccccagccaaccacttcacctaggtaaaaggtctcttragacactcagtgttaaaccaggagtcattgtgggagacatgaaacattcaccccttactaacaaagggagccccrgggggcctcaaagttgaggggttttaggttttctgattttcagtagatatctacaacactcagagtttggtattttatatgattgctgatagtgttttagagattgtggatctagtaagggtttatagcaactgactgaatactaggccctggtatttttgagctcaggccccataactgtggagatgtttttcctgaatcccttttccttttatctttccttcctagcttttatagtggcttccagtgtcaaggccactaggattagaaaactctgaagaaatgatataatgatgttaatgacgttgatgggcttgtagattaagtgcaagtctctccacactgtcatgcacccaccaacccatccacctattctctattggtagagtaagagtgtgcttctcgggagactcacagcctgcaataataatgacaacaatgtattatgatattacaataattatagcatcattaattatcgtttattatgtgactattaaagttacataggttgaataattcattctccaattttaattacctaaacatatgtagtaagataatattttgagatactaattgttgtgcttttcttttccccgtagcctgtgtgggactgtctgagttacctaccttgaggggattataggattgttatagtgacaatgcagaagtaacagtgttcatgtttgatttatttatttattttagagacaggaacttgcctgttgcccaggctggagtgcagtagtgcaatcctagctcactgcagccttgacctcctgggctcaagtgattcttctgcttcagactcctgaatagctaggactacaggcatgtatcaccatgtccagctaatctttaaattttttttttgtagagacagggtcttgctatgttgcccaggctggtctggaactcctggcctcaagtgatcctcctgccttggcttcctaaagctctgggattataggcatgagccaccacacagctagaatttctgacaatcgaaagcagaggctttgggaaagcattgcacaaagtttatataacgtagcaacgaaattagaaagagagtagagaaagaagaaggtcacttcactccctcccctcagggaaataagagtattggggtaggtttaagaggagagcgtgacaaataatacacgtcttcctttcccacatttggaaccagtcccacagaagagaaaggcagatgagaaatggagactacaataactttattactgatcaaactagtattggcggctgggactaccccaccagagaattagactaacccagccagtcacaggcagtaccgggcagccaaggcctgaggctggacagctttatggtgaggaggagtggcctgtaatgtgtgtttcctgctgaaaaccagctcctaagaaggaagagggaggcagggtgggcctgtgcacatccagtttctttcccaaacttcccatcagagaatgaaagttaggagggagcgaggctggtgttttagtttactagggctgtagtaacaaagtaccacagtctgggtggcttaaaccacagagatttattgtctcacaatcctggaggctagaagtccgcgatcagggtggcagcagggttggttccttctgagaggtgtgagggagaacctgtcccatcttggcttgcacttgaccttcctcatggtcacgtggcattctttctgtatattgtctgtgtcccaatttcccctttttatgaggaccccagtcatattggattagggacccaacctactgtagtatgacctcatcttaactcattacatctgcaatgaccctattccagaataaggtcatattctgaggtactgggagccaggacttcaacatatgcatttttggagaacgcaattcagcctgtaacagacagcaagatgagcagagctctctccatgtggaagaaaacatcagtaatgggcagaaagcatttttctccaaaacatagttgaaagaggttggagaagggtgtgtggaaatggtcgttatctgaaaggtggggatatgaaaagggggagggcaggacttgactcctttggcaggcaaatggtgagaggtagtgccagctttgagaccactgagagattattgtgtgttgtctgtggccagcagccaagaagaggcttgagagctgaacacacacaaggaaagcaaagtaactcatgcaaagcatttgtttgtccttctgaggagcaccaaataggtggaagagccaagttaactctttgttgctgtggggagtaggcttaatgctgaaggctatttatacattgctgatatgttatccagcagaaggattcctggccatccccaaggctttgccatgacccatctgaactactctttggggaacctttagcatctctatagcttctctgaaagagagtgagaggtccttaacaaacggggagcaatatatgcaagtgaaaggtcaataccaattccacccactcagggtgtatatgtgtagatctgcctgtcagtctctgatcagcatgaactaaccaataacatcacattccactgtggttagacagggaagcaagatgggaagtgggcaggataagaatttgaaactggacacactggctcatgcctgtaatcccagcactttgggaggtcgaggcaggtggattgcttgagctcaggagttccagaccagcttgggcaacactgtgagacttcatctttacaaggaattttaaaaaaattagccaggtgtggtgctgtgtacctctaatctcagctacttgggaggctgaggtgggaggattgcttgagtctggaaggcaaggctgcagtgagctgtgatggtgccactggactccagcctgggaaacagaggaagaccctgtcttaaaaaaaaaaaaaaaaattagggagctgaacaatctgagttcaaatcccacgtctgctacttgtttgccaactggcttgagaaaattttttagtctcttctttttcagtctctaagagtttttgtatctgtaaaatgggagaatagtgtcatcctatcaggatggttatgawaatcgatgactgtgtaaagccccaggtcctctgcctcctaccggctgtcattatttttagtgattctccattgccttgtggagggggtacagagcagttggagcccaggagagtctctttcaccataaagagagtggatcccccttttctgttttatatatcaagattccaaataaggtaccttctgagaaaagggattgcacagcaagatgttagaaaatcacttgagcaagagatgtctgaagtgctttcagctctgaaatttaagttctatagcagacagcttctccttcatcagttcttcatttgcaaaatgatattcagtacctatttcagagaaatattatgaaaataaatggagacgtgtttgtgaacatccagacagtcttggagtgcctgttatgtttccatttcctatagtaaatgctattgtgacttttagagaaatataacaaagtaccttcccccaacaaaactgagkccatgaaataactgtgtgtgaagctattagaaagcaccacaggacacaataaaatgagttatggagtacagtataagttaaatatgttaggccactcaggaaagtataattctttaaatgaattatatcacatctgcacaaagtggtaaatatatcagcatatgccctacaaaggaataataagcttctgtatacatatctctatgaaactatatgttatatgcaaggaaataacaaccttcttggattattggttatgaaatatatatgtaaaatataccccaaactcctgatatactatatactttcatgaatacttgtatctgtatctccatgaaattgtatgttattttaagagtttgagggcacattatttttctgtttatagggaggagagtagataggtccagttttttcattccatagctggaaagcagacctcgacacattaagaaactcacttgtagttttttctatcaagacagtaatagaacaaagaatcctcacaaccatttatttattagaccttgcctgattttttaaaattaattaattctctgtttcaaaatttcgagtactacagttaaggttaaaattcacctctgatcactactctcattcctggttctctgaatgtccccctgccaagttatggtaagagtatagcatgycccaaatccagaattttctacatgctttacttacrtacatgtataaaccaataaatccaatatagtattgcttgtgtatgtttgtattagaaatgctcttatactataattttttcattcagcaagatagcttagaaatatatccatggtattacatatagttctatttcattctacctgctttataattatcataatatgaatataacacattttgtctgttctcctgtttgtggacattcagattgtttcttgtttttcctagatcaaataatgaaatgatgaacattcttgaatagtccctcttgtgcacaaatgcaaggcttttcctagagcaaatacaaaggaatggaaatgttaggttaaaacatttaaaaatgttttttccagattaattttatatgaaaatcaattaagtgcttatcctgacctcatttccataataaataagttttttctttgcattttattttttactgtcatgcyaataataaactgacaactcagagatgcaagtgaaatttttcttagcaaggcctgttcatttggaggcataggtgttgttatcagcctatcgtggtttttaagttcgtccttttgaaatgaaacatgatggagtaaacagtagcatccagtgatgtgcagtagagttttgtttcttcccttaaattgttttctgctacctcaagaaaaaacaggcaacagaacgtgtcagtcgaaatgcaatttaggaattgcacttgatctcatttttcagcctgatgtttctgctctttcatcataaagatcagctgcattttatttttttcagtcccttagaataacatccagttctagtcagcatgtttaatgtgcttctcaakgatgttctagcacaataaatttctgtatctcgtgcatgtgtacatatggtaaaaatttcttcaagttctagccatgtgggggaggaatattgcggtcgctttgttaatgcagtgtttgtgttggagcggttagggccccgcgctttaactctcagcactgggcgtaatgagacggctttgatggtggtgtaagagtctagtgggatggtcacagcttcacacttcaaagcagagcatatgggacgaatactggttagctttgtactctttggggatggttgggagacaattcttaacagctctgtttaatgaagacattggaaaagaaatgttctatctttaaaataattttgaattgcaaagagagaaatttccaccacccccctttcatagactaaactaagaataatttwtcctagtctgcacttaattagaggcagtgcagcatcacactgctatactgtattttcaaatgccactctttttaaacatactgtagcgagattaatcggccagttttagtttatgtgcatgagtttaggcaaaaacttttagggctatctgtcttatcatctgaaatttttattacttccggtagagaattttaccttcttctcattaaaaaatatgaaagtaagaaatcaactaaataaaaaaaacttggctatattaacagctatactaaaactagaggatgcttgtaagattttaagtctagcacccagtttaatttttagattttgagstttttttttttcctacttgatttgagtctcaggtgatatgggttggaaaatgctctttttgattggtttgtgcttagggaaaggtttgatacttttttgagtatcatttgaatccaggtttaagaataataatgaaccatgcatttatgcagtaggtcacagaaaagagaatttaacttttcctagaggaaagggaatgacagacttgaggtcttttttctaagttctgcattttggctggcatcagaaatataacaaaacgaatgagttatattccttgagctgctgaaatgcagttctgtttaacaattcaatttcaagtccatttatatcggtagtcctaaattgctcctgaaagaaagaaaagcagaagggaaaagaatgatattaaataccactgtagacagatacatttaattaagcagattcttaagtcctgaattcatgtactacttttactgttgtatattcttaataaaatactacattttagccacaattatgtctgttataggcttagaaaagacatttgtgttatgaatatgaagcctaaacttctcattgcactgagaaacatctaattgcatcgattctcctgcaaagaggaatataaccaaactcacagaagtctctaaagttaagcctgaaaagaaagtgctagatattcatatttagaaatgactaaaaattattttatagcaaataaggtcagccaaacacgaaggttaaaaaatataaatttttaaaaagcatttcagtatttccttaaatcaacccttttagaatacgaccagagaaattgggaagggcagaaccactgaccatagcggtgggaaaagcttcttaaattgggggaaaaaaataacctaaaaaaaactggtcttttaataaagagtgatttaggaagctgcagttttgttttgcctgtttcaaaactgcatgatggccttatgttctttctgaacaggtgattcatatatatgccttgtctaacaaagctgatcagcatggatatcccacaggtacatgtggttttgactgctgtgaatatgaccacyactctaaggacagagcataaaacgttaacacgactgtggaaaattgatcccrtggtttctcactaggaatacaatatgttctcactggtgttgaactctcttctcgttttgttagcagagtgactccttactcccatttgttggtttagartggacactgatattccaggtttgcagcaccaacatcaacaaagtgcttaggaagcaaagtcagttcattcaatttgataaacctttattgagtaactagaaggcactgccttctgggattttgaaactcagaatggaaaacaaaagctcaagattatttaatacaagtctattagatttgatactatcaataaaaacaaacaaaagctgtagaatattctaacacaagaatgggagaaatgaattcccggagagggaggacacaaatatgaagcaggagttaattcaggagtttgggtttcctgggactctttcacaagctcaagtttggttccactgtagagggaagtggaacaaacagctaagagagctacagtgagcagtggctttacagcaaatctgaacaaaactattgctttaaatgataatgccacttacttgaaaactgatgagacagttttccacaggcttgagcttgaagtattcagaattattatcttctttaagaggccaatatgatttgcttgatgtggacatttgaagttacaggggatgatttttatgcagattaattgagaaaatcaaaatataaaatcaaaattagcctttttgaatatacaattcatatcacaaataaaatagcttggtagtaagtaattctctgactaaatatgagattttttttgaaacacaggccatctaaatttgttttccaacaaaattacaaatacctacttactataggcccttggattgcagtcattagaaacacaaatgttatttccttgagtatgaagagggtattgtactgtctttattgctaaatattattttggccttggttgtctcttcattgtaacgagaataatgtaatatttcattttcttgcttcattagagaacaaaaatcaagcttgatttcttccatgatgtatttatgtagatgacagaatggaagaggaattgttaaaatatrggagcattcctagtaagtaggaacatgccagcctaggagggtattcagaactcaggattcagaacagtggcttaggcttgcaaaagggaaagggagctatttattgagttatactctgtaccagacattgggctacatggttttcttaatttatgcaatctctatccgtcctatgggatagtttctttttctttttttttccttttctttctgttatttttctctccttgcatctccttcattttccttttgtttttagtaaataattttaaagcaaattccaaagatcatggtatttcactccttcataattaatatacatctctaagcaattcgaatattttcttacataactgtaatgccaccatcacacccaacaaaatgataatttgatgataccatctaatacccagtgtataatccaggcaaatatctstttataggggcctgtttgaatctggatctaacatggctcatacatcacactgattgttgtatctctgagtctgttttgatctacaccagtctccctgtcccccgaaatcccccagttttttccctgccatttacttgtagcagaatctgggtcagttatcctatagaatttccacattctggatctgtttgcttccttatggtgtcatttaatttgtgtctttatccctcacatttcctgtaaactctgttagctccagaggtctgattagttgaagtttaatttttttggcaggaattcttcaaakgtgggctgtgtgcttcacactgcatcacaccaggaggctgcagtgcctaggtgtctcacttctggtgatacaaacatcagctgcctttgatgttgtgaagttcctaattgacttttcaggacggtttcatccattcataatctttgcctaatacaatcrtatttttaggtgctgaaaaattgtgattttctaattctatcatcacttccgcatttattagttggatttttttctattaaaatttttttctcatcagtttggactatctagctaccctaaaatactgttcatgcaggaaggacaggataaacgcttattattatttattgttttttgagacggagtcttgctctgtcacccaggctgaattgcaatggcgcaatctcggctcactgcagcctccgcctcctgtgttcaagtgattctcctgcctcagcctccaagtagctgggattacaggtgcatgccaccacacctagctaatttttgtatttttagtagaaatggggcttcaccatgttggccaggctgggcttgacctgtcgacctcaagtgatccacctgcttcagcctcccaaagtgctgggattatgggcgtaagccaccgcacccaacctattctttttttttttttttttttgactgagaaatttctagataaggaattggtgatttagagaaaggtttttttttttctttcttttccattttacatatagagaggttaagactcagaaatgtaaagtaaattgttcaagatctcccaaatagctattaaggagcagaaatggtattcaatcctatactttctggacttaaaagcatatgttgtttccactaaattaaaatgcacccctgcccttgaatctccaattgcagacagctgggggttgctaccacaaatatctcccagtgctttgccctttaggaaccagattaaagaatctcctttgtaagcattctgcctatataaacttaggcagtgctacagaactgtagctccaaatggaggtgctggcctgggtaggcaaagagctgggcagggccaggaaacatgtatttagtaggacaggtttttggrcatcacagtttgtgcttttaggctactgcagcagcccaaatgtgagttacactaagttatggctggagcacatacatgtgaccagaacatttggagagttgtcagaatttagttctaacctttcctaaatattctcccatttctcatgccacctcctcaaccattgtagatttgaggggagaatttagctcactgcctgtgttagtccatttgcattgctatgaatgaatactccagacctggtaatctataaagaaaagaggtttatttggctcatggttctgcaggctgtacaagcatgacaccagcatctactggacttctggtaaaggcttaggaagctcttactcatagctgtaaggcaaagggggaacaggtgtgtcgcatggtgagtgagggagcaagagagatgctggctccttaaacaaccagctcttgtgtgaacttataaagtaagaactcactcattaccatgggagggcaccaagccactcatgaaggatctgctactatgacttaaactcctcccattaggccccacctccaacactggggatcacatttcaacatgagattcggaggggacaaacatcccaactatatcactacctaaacattatcttgcaattcctaaacttcagttgactgtatccctgacctctagccccrccccattccaggagctgtggccttttagtacggcttaccttgctcattgtgactttattgcattttttacaaattaaaggtttgtggcaaccctgcatcaagtgagtccattggtgccatgtttccaacagcgtgtgttcactttgtgtctctatcacattttggtaattttcacaatatttcaaaccttttcattactattttatcttttttttctttttctttttctttttttttttttgagacagggtcttgctctgtcacccaggctggagtgcagtggcataatcatggctcactgcagccttggtctcccaggctgaagcaatcctctgatctcagcctcccaagtagctggcaccacaagtgtatgccaccatgccaggctaatttttgtatttcttgtaaagacggggtttcaccatgatgcccaggttggtctctaactcctgagctcaggcagtctgcctgcctcagcctcccaaagtgctgggattacaggcatgagccatcatgcccagccactattatgtctcttatggtgatytgcgatcagtgatctttgatgtttggggtgccacgaatcacaaccacataagagataactgataaatgttgttattccaactgcttcatcgactggctgttcccccatctctcttcctttccttgggtttccctatttactgagacacaacagtattgaaattaggccaattaataacccaacaatggcctttaagtgttcaagtgaaaggaatagtctcacatcttttattttaaataaaaagctagaaatgattaaacttagtgaagaaggcatgttgaaagctgagataggtcaatagctaggcctcttgtgccagctggccaagttgtgaatgcaaaggataagttcttgaaggaaaataaaagtgttactacagtgaacacatgaatgatatgaaagcaacacagctttattgctgatatgaagaaagttttagtggtctggatagaagatcaaacaagccataacatttccttaagccaaagcctaatccaaagaaaggctgtaattcttcctctattctgtgaagggtgagagagctgacaatgctacggaagaaaagttggaatctagcagaggttggttcatgagattgaaggaaagaagctccctccataacataaaagtgcaaggtaaagcagcaagtgctgatgtagaagctgcaacaagttacccaggagcctggcatctctagctaagagcaaggatgaaggtaggctggccatggtggccattcctgtaattccagcactttgggagaccgaggtgggaggattgcttgagcccaggagtttgagaccagcctgggcaatatagtgagaccctgtctctacaaaaaatttaaagaaaaggatgaaggtggctacactaaacagattttcagtgttgatgaaacaacattctattggaagaagaggccatctaggagtttcatagctagagagaagtcaatgcctggcttcaaagaacaggctgattctcttgttaggggcaaatgcaactgatgaccttaagttgaagtcaaatgcttatttaccattctgaaaatccaagggcctttaggaattgtactaaatctactctgtctgtgctctataaatgcarcaacaaagcctggatgacagcacatctgtttacagcatggtttactgaatatcttaagcccactgttgatacctactgctcagaaaaaaatattcctttcaaaatattcctgcccattgacaatgcaccttgccacccaagagctctgatggagatgtacaaggagattaatgttgttttcatgcctgctaacacaacatccattctgcagcccatggatcaaggagtaattttggctttcacatcttattatttaagaaatacattttgtaaggctatagctgccgtagatagtgattcctctgatggatctggaaaaagtaaattgaaaaccttgtggaaaggatttgccattctagatgccattaagaacattcatgattcttggggggaagtcaaagtatcaacattaagaggagtttggaagaagttggttccaaccctcatgggtgactttaagactttagtggaggaagtcactgcagatgtggtgraaatagcaagaaaactaaaagtagaagtggaaactgaagatgtgactgaattgctgaaatctcgtgataaaacttgaatggagcccagcaaggtggttcatgcctgtaatcccagcactttgggaggctgcagctggcggatcacttgaggccaggagttcaagaccaacctggccaacatagtgaaacccatctctgctaaaaatacaaaaattagctaggagtggtggaacacacctgtaatcccagctacttgggaggctgaggcatgagaatcacttgaacctgggaggcagatgttgcagtgagcatacatcatgccagtgcactccagcctgggtgacagaagaagatgctgtctccaaaacaaacaaaaaaacccaacaactagaacggatgaggagttacttcttatggatgaagcaataaaagaagtttcttaatgtggaatctactcctggtgatgatgctgtggacactgttgaaatgacaacacaagatttagaatattacataaactgaattgataaagcagcatcagagtttgagagtattgtttccaatattgaagttttactgcgggtaaaatactatcaaacagcatcacatgctacagagaaattttcgtgaaaggaaaagccaattgatgcagtaaacttcactgtggtcttattttaacaaattaccacagccactccagccttcrgcagccatcagcctgatcagtcagcagcaatcaagatgaaggcmagaatgtccaccagcaaaaagatgatgacttgctgaagccttagcattttttagcaaaaaagtttttggttttttttgagacagggtctagatctgtcaccaaggctggagtacagtggcatgatctcagctcattgcagccttgaccttccaggctcaagtgatcctcccacctcacccttttcagtagctgggactacaggcatatgccaccacacccaagtaattttgtttattttttgtagagttggtgtctcactatgttgcccaggctggtctcaaactcctgatctcaagcaatcctccctcctcagcctccctaagtgttaggattacaggcgtgaggcactgcacctggccaataaagtatttttaaattaaggtatatatattggtttctgcagacataatactattaaacacttaagagattacagtataatataaacataacttttatatgcactgggaaaccaaaaaatttatgtgacttgctttattgtgatatttgccagcgatatttgctttattgctgtggtctggaatcaaatccacaatatctctgaggtatgcctgtaccttaaagcagtgttaatgaaacagaaatcacttagggctaaaataaacttaggagattttcttggctttatggtatctacaataccaggaacttctaatgctggagtccctacctgactcagagaaagaacatttcccaggctgggcgtggtggcttatgcctcaaatcccagcactttgggaggctgaggcaggcagatcacttgaggtgagaagtttgagaccagcctggccaayatggtgaaactccgtttactaaaaatacaaaaattaaccaggtgtggtagcgggttcctgtaatcccagctactctggaggctgaggcaggagaatcctttgaactcaggaggctgaggttgcactgagccaagatcatgccactgcactgcagcctgggcgacagcgtgaaactccatctcaaaaaacaaacaaacaaaaaaccaggctgggcacgtggcttatgcctgtaatcccagcactttgggaggctgaggagggcagatcacgaggtcaggagttcaagaccagcctggccagcatggtgaaaccctgtgtctactaaaaawaaaaaaaaaaaaaaaaaaattagccaggcttggtggcacgtgcctgtaatccaagctacatggtgggctgaggcaggagaattgcttgaacccaggaagtggagtttgcggtgagccaagatcgcaccactacactccagcctgggcgacagagcgagactccatctcaaaaaacaaacaaacaaaaaaccaccaaaaccaaaacatttcccaagactttttacaccccagtggtacccagtctttttttagtgtcttctgcatttcatttcctccattaacatggcagcctgaattagaattaaacaaataatacaccctgaaattgcagttgggaaggtctcctatgcttattgtggccagaggtctcatctcagctctgattttgatgatccgtgatacggaacaaataaagaaggcctgcactcctgctatcccaggccagccccagaattccctgagcacctacatttcgtatatcagacaaaaatgtatgccatctctgtgtttgcttacaggggactataattagctcctagaaaacaagcagaggtccggtgaaggagtaatctagaaaagcccagcaattctatattttgccttgagaagataaaatcatatccagagaatccagatatgaagaatggcagaggaagatgaaaaatgttctatcatttagagtaatctccaattgtgtttaaatattaggcttccttatgtagcatctggcccagagctgtccaatagaactttctgtggcgatggaaatgttctttatctgtgctgtccagtatggagaccactagccatgtgtggttgttaagtacttgaaatgtgacaagtgcaactaaaaaacttcatttttcatttttttcttttctttttttagtttttgtagagataggagtctaactatgttgcccaggctgttctcaaactcctggcttcactctatcctcctgtgtcagcctcccaaagtactggaattataggtgtgagccactgccctggcccattttatttaattttagtcaattaaaactttagttctagagataaatcctaattaaaattttaattgattagaattaaattttaatagcatacatagctaggggctactgtattagacagtgtggttactggcccttgccctcctaactttttataccttctaacaatatttacaagttggggctattataacattgttcaaaaattgaaggcaccaatttcattaatcctacatatacatttccactgtgaaattagatttgtaatgggttagaaattcaagcctgcttgtatcaaggcaagcttttattgtgagactaacttcaatggagcattcattmtgtttaagctttgatgtttaaaatttgtataaatcatgtgctttagtggtgatggttgcacaacagtgtgcaacttcatgccactgatctggacacttagaaatgactaaaatgatgagttctatgttaaatatgttttaccacagcaaaaaaattatatgctttggtttttaaaatttggcttgattgtgattttctttggttaaaattccctctgccacaggccttgctgaggatctggtgctgcatgttcctggctgcagcrtgtttctctttggcgaagctgacctgcctgagaagcgcagtcttgtgcagagaaggaagcagctgggctggttcacgaggagggatttcagtgctcttcagcctgacctgggagctgccccttcccaaagatgtggtttaacaggttctgagcatggtttttgctttgctctgttttttttttttttttaaacttgaggtcccctttatgagccacaccctgttaatgcaggaagagttataggggtggctgcttcttgaaatgggtgaggctctcctttctgctgttactctcacccaggcccttttaagctaacctgtgagcctagaagctcccgtcaagtatttgatgagggcccccagaagtgatattcaagatatatcattagccctgcaacgtgatcactgatgaaaagaatgctcgtagctcctggcactggggcagggtcctggaggcccctgtctgtgaatggtgtggggtgtgtcctagggtgtgatggagacacctggagagggaggacttagggagagatcacttctagctggtaggaaggtctttcaatacttaaacatcagtgtagccaagttggtgcttacagctggaaatcagttctagaggaaccctggaaaaaagctgttctagataacggacttctagaatgcagagaccaaagactggaaaaagaaactattccttcccctggcttttatcaacttttgcctctctgtgctgctcctgccctcactccctgccccaccctaagggatgtgtcaggaaaaggtggaactcctctctgttgtctgtacttccaccatcctagtgtcacttatttgagtcttaattgttccattttcagactctgttggggccacaaattaaaccatgtaaggtcacattttgatggtcagtcaataacttaagcagttaccaaaatactaggtatccaaggagcgagaggtgggcgagcataagaaacacatttctcatggcacagctctgccaaagccctgcagaatcatttacacataggtctttggttagtagcccctggcacagaattctgatcttaaacaaatattgtctataatcaagtagagcaatgcaattaaaaaaaaaaagcacaggttttggggccatgctgaaatcccagccttgctatttgctggctgtgtgaccgtggttccttggtctcattatgctttggttcccgtatctataaaacggacgtaataatgtctccctctcattattgtgaagtcgaaatgatgtctgtaaagtgcccaacacagtactaaagggctatttttttcttccctatgaagatgagatttaataaaagtgatattacaaatgtatttcattcaacattttgtcatagaaaaaaggaagagactgattgctctctgccaatttgaacctcacatattttcccatgatttgtctcacaaatggagaagtgtaaagttttatgactaaattttcagaaatccatttcctggtttctaatttgagcctccctaaagactgaagagattataccgcagatgtagtcacttcagtgccaggtggactggtattgcagtcaggtggacgggaattagacataggtatactgctgtgagatcattaggttaagcaaacacttgaataacttaattctcatttttgcagtgctgttagaataaatgggtctatatttgggaaaaactttaacctgatataaaaatcatatgtgagttaaagaccaaatgctaatattatcactaattatgtttagtttcctaagaacaaacttgatatgtagttgtttaaactaaagggaggattgcttcccaatctgatctatcacctgcctgtggttggataatctgtgtctctgcctcatcattatctattttatattgtttgatttgaaatggtcaacacactgggatttctgattttttctttttcttactttttttttttttttgagacagggtctcatggcatttgcctaggctggagtacagtggtgcgatctcggctcactgcagccacaacttcatgggctcaggtgattcccccacctcatccttccaagtatattttgtagagacagggtttcaccatgttgcccaggctggtctcaaaactcttggactcaggccatctacccaccttggcctcccaaagtcctgggattataggcgtgaccccccgtgcctggcccatgattttattctctgtttttactcacatggagatctgtaatttacataaaaaaattcataaaaatctgcaaatcccacgttaaaacattaagatgccaaaattggcacaatgaatgtttaaagatgatattttaaaggtaatatttaatactggggaagatgtagttagagacatttacactgttaatgatagtataaattggtataaactttttagaagtgagcttgtgatatgtgcgaagagctctaaaaatgtatataactgcctttcaggaattctagatctagagataaatcctaaggaaatagtaaaaggtatatgtacaagtatgtttatcaaagcattatttataatagcaaatactgaaaataatggaaatgtttgctatttgggtrtgtttatgtaaactatggcatactcaagcatgatgttttagaagaactttcagagacatagaaaatgcaatctaatrtagagagaatttacagttaaattagttaatgaaacagatattaagtacctactatgtgctaagcagtatcaccagcgggcaaaatagaacttatctgtcctcaaagaacttacattgtagttggggaggggcaaagagacagacgataaataaaagccttaataaacaaatgaattatatagtacattagaaaataacaagtgctacagccaaaataaatattgaacaggacaagggcattaagagttctagaatggggccgtattgtgattataagtggaataatccaaattaggcttcattgtaaaggcaatattagagcaaagacttgaaggagtgaggccactagccacgtggagatgtggaggagagttttaggcagagggaatagccagtgcaagggataccaggtagtataggcagcatgatctcaatattgtaaaatatatatgtacatattttgtttatattatatgtaagaaaaacatttttatattcttaaagcttccaacatattttcataatatctctaaatcaaccctgtgattatttccatcatcttccctgaagggtaattagtaagatttattagtggtcaattttataaaagctaagtttcagtgcctgtattcagattatatttgatggcatattcatgataagaagggaaaaggagcacagcttttcccctatatgccttttttcactggtasccatgaccaagggtagaaaccttagcttgtggaagaaacargaaaattacagtttgccaagtttgggcagtctgtttgtccatcatttagtaggctcaaagcaggtgctaatagcagaaaaataaagtatttcaaggaggatcagtgaataagggatgtgaataaacaattagtttctaatattcctcacaccagatagtagagtttaagactttctactaaaatattaggttaccttaattgcacatattcttccttaaaaaataatccagaaagaagtaaattgctttctttctttctttctttcttttttttttgagatggagtctcgctctgtcacccaggctggagtgcagtggtgtgatctcaactcactgcaacttccgcctcctgggttcaagcgattcccctgcctcagcctcccgagtggctgggactacaggcacgtgccaccatgcatggataattttttgtattttagtagagacggggtttcaccatgttggccaggatggtctcgaactcctgacctcgtgatctgcccacctcggcctcccaaagtgctgggattacaggcatgagccactgtgcctggccataaatcgctttcattttttgaagcaatatctactgaagtagaatttataacacctctttctttagggtagaaatgttattcayctaatttttcaatgaatttggttcccaacaatagcgatttccctcttgtttaaatttaattggctttatatatttttctaactttttttttggttatgtcagtgtttcctaacatatttttccctcccaccaaaacagaaaaacctcaacacattgttgctatgtttatgtttttccctacaaaaatgaaatagaaatgattggcgctatcaactgtacagtacagtcaacaatccaggacaaattaatttgcacagtaccagagaggaagcagaatctataaggaaacaggtttctgttttgaagttcccaaagaatattataaacagaagagaaaaagaagtgagctcagaaatgattaacacccatagtcagtgccaaacacacaaaatcttttaagccaaattccttttaaaagtttgtagttggccagcttgtggggaacataaataagggcaaagcagtaatagttgatacttttagatctataaataaatactttatacatatatatttaaaatcctaaacatttatggggtaatttaaacactgctgtctgatatgttgtatgaatggcctgcatgtatgcatcattgtttaaaaatgcagggaaaattctttgaactgtagtttcatatgatgccctaggagtcagagatggaggtaattggtacatcttggaatcaggggcttctgtttagttatttaaatgggttactgagcactttcctgcttacttctttctactataaataagaaatgcatcatcaggcacttttcttgacattgaatactccaatttactccacaccaaaactttatctggtatttgaaaaataatttctagttttagaatgagtctcgttttagggagcctatttttaaaaatcatttgctgatgctggctaggaagcctagttgggatgatgaaaaatgaaagtctcaatgtgtcactaagcatgtaacctataattggagcatgaaggacttaagactttgcctgaactcagggagggcactgttctattattgaaaaacctgacagcaggcaagttacttgagtttccctcttatctggactggcttaattatgggaggtaaatttgtacctatgtttgtaatctcttctgaattatttctactctgaaagatttaaaggcaatagaatgaggttcacaatgcctcacagagcaaggaaacrtcataaccattttacagaaagagagctgagcagaggcagtgtcctgttgaggtggaacttgaatttggacccacgggagtacttcctagccctgtggcacgtggttctcacttagctttcttttctgtggattcagccacacggagacaagtcctgcattcttcccgccatgggagcattggacttagcaattatgtttgagttttatggctttagtcatcaaatgtcctgtttcagctgtggtttccctttagtgcatggtctaaaaaatttaaaataccaatatataatgataactaattgtttttggtataataactgtttatgtttttgaacctgagttctgagtctggttgccttgctctgtttgttactctgaagcaaagtccacatttaggctagggttttaccttattttaactttcttcctgtttttatactcagcaacctgcatggttcctggcactcaccaggttttcagtaaaaaagtatttttttttttttttttttttttttttttttgagacagagtctcgctctgtcaccaggctggagtgcagtggcaaggcgatctctgctcactgcaacctctgcctcctgggttcaagtgattctcctgcctcagcctcctgagtagctgggactacaggcacgcgccaccatgcccaactaatttttgtattttcagtagagacggggtttcacaatattggccaggctggtctcgaactccttaccttgtgatccgcctgcctcgacctcccaaagtgctgggattataggtatgatccaccgcacccagcctggtaacaaagtatttaatgagggagttgaattggttgaaaagaatctgtttattcaaactgtaatgcagtccacaaatttgaagttttctctttagatataaaagtgctaaatatcctaaaacaccatcccagctctctcctcatgtatgctttaatactggccaccaaagaggagtataatataatgaatggaacttctgaagacacccctaaacaactttggcactcctaaagtgaaacacttttctgtagagttaaaatatatagaatcctttcacctttaattgattgaaaatgatggtgcctggaactatttttgagaataattttgatctaaagggaaaaaaaatacatgtgtttcttctgagtgctgcttttccattttcctaatgggctcttcgctattgttttgtctgaatgcagttttttatttgtgttattccagacatggtcctaccacaagcatctttaaaccagacattaatagcatagttcacagtcattactgccagtgctcaaacacaaatattgcatttgtgtttgcaaaagctacacatcagatgttaattaagtgcatttggtttttttctgcttaaacaatctggcataaagagtttacatccatatcagttcaccataaggtctcaacaatatctaaatcaccagccatacagtatatgataaatacrgtgtttccacacaagaaaataacagaattgtcaggaaracatcaggcctgttatatttctctgtgaaataatagcgactgaatctcagtttctttttctttttgataaaaaaatatttaactaggagtaaacaccaatatttagaatgataaatttttcattaaagcacacatggaaaacgaaatcataccaaagatttttttccttgtttttagcttgcttcagggcgttgtgacagttgtgttggaagaaaattggaatttcagccttgcagtgaggggatccgtgctgccaccagagcagctgagtgccaatctgcgggaggcgggagtggagcgaaactgcaaactgagaaacaaactttcacatcaggtttctaattttagagcaaaaagtggaattactttaattatatgacatttaactagaaatacgatttgctgggattaattatctctctcatttaaaataccttcttagtaggtttaaattaacataaaaaatcaaattcagcatttaaataaggtcaatgggactgctggatttaaacacagaatttgattcagtataattggatcaccgtattggttttgacttggaaggattaaatggaggaaattggaaaagcgtgaatttgggcagaaagagaaattttctcttctttttctttctttcttctttcaccttccaagggagagaagtttccccaccttggagaggaaactactaccctgatkaggtcagaaacatctcagattcattaattgtctccgttttatcactacttgaataagaaatagtaataaaacaaaaatattgtgtaactaaagcttactagaagaatttaaaatacatataacaagggtctgtttgaaaaatgattattctgtgttaagtgattacctcttattttatttaaaagcatatgaaagttatttctgatgttttattttgcttaaaaaatgaactttatgcttttgaaggaattttaaaaataagagtttcatttcaatcaagtaagtcgctgttgggacactgaacagtgtacgtgtcatgttctttattgaactcttgtccttagggcttatgtctaagcttactttatctttaataatttgtcttaggcaatgagttcatttatagcaagaatgatcaactttggaaattctactaacagggggaagttattagacatgcaatggaagaggatgtcttggaatttgctgggtgagggattcaggaaaagtcccagggctacagggatggaatgacccatgtcatggggaaagccccaagtccacatgcaggaacttcctttgaaagtgacttgctccctcaggctgatgaattgcatgtgaataactgaatgtgactgggcatatcaaagctatgggacagcaaagcgtaatggtgaagcactacaggcctggtaaggattttgaatagtcatgctgatgtaacccccagtgttatatactcttcagcaaaacctgagtgtgatccaactatttgttggaacgatggtaaagatattaccattccttgagtcaaaataggataagtacattagattttaggacataaggctatttgtaacatgacttattggggggtaaatgagagaaaaatgtttggaagttttctgttaaagagtggcaacattaagattgacaaaaattccaattatactctgtgcaatgttaaaactgatataattcttaaagatatttagggtaagtgattgggacatgagatgatgagagagagatgtattgactgttaggaaatttaatttttatgaaatcagcattatggggaaatactgtaatctgattcattcctgcagaattcccaggaggaagaggcccagcctcgggagttgaaatgtttcattatgtacatgtgtgggaaaaagatgaaatgtggtttccgtgtgctgattttctgtaaaacatctattagtatgagagtagccaggctaggcaacaaagcccccaaaccatcgtagtctagggaaaagtgaacccagaaggcatttctctgatggatgctgacatcaggagcaataagtttgaaagtagcaagaaaaagtaatgacagtaaaataatgttgaaatagtagctaaggaatgatcacatgctgaagatgaggtcagtcctttattcctcatcaatccctgcttaactttgcttttagaaatgtaaggttccccaaaaatgaggaaactgcaaatgtaagctttttataccaatgctaatttaaccaagttgtccatcttatagtgtaaactataattagagccacgctatttatgtaatgtgagccgcaccatccctgagacagggaaaggcgggacatttgcccctgagctctagagtaacagggctctagagtgtcaatggccatctcagcctcttgtatagctggggatggaagaaagaggtgcctccaacaggtttcacaaagagaaaggcacgaggtttataagtctgtgtgagggaactcttttgtcttgtttggctccaaaccctgccaaactcacatcatcacaaaacacgtgagtccctttgcttttcccagttccaaggctgtttgttagtttttagtgacctctttccctaattaagactggttttgagattcattttaatctgatattaacctaattcaataatgacaggagtttgtttcggagagagggagtggtgggtacagaggtgtgatttactcctgtctctgagactcttaggcctgtcattgaattcaagcccccatggagatggccttggaaatgaatgaaggtctaaggcctgttgctgctgatgacgcttagctcttaaccgtgcttttctttctctgttggtattttggaaagttcgagctcttttaggaaaaaaaaaatccttcggatagtttagagtagataaagttacctgattatagcctaaatacttttgttatggaaaaaaatattatcagcaaaataaaatcagatactaagtgactaaaaaatgggagggttaccaaaaaaaaaaaaatcaggtactaagtgactaaaaaatgagagggttacaaaatataatctctctttcaaagcatgattgttcattcttgccttactacttttaagatgatctgctgctcataaaccagatatagaattttgaaatgtttatattggggagatggcatgatggtgttgggcatgacttcaaggaagtacttattcttttggaattcagatggaaagtctaaaggtttagagaacatactgtttttgagcaaagagaagggtattggcagaagaaattttatttgaaagaaaagaaaatttgtagcctttttgtatactaaaagaagctatgtgtcaatgatggcaattttaattaaatccttagtatttatattgttctagtatcagatgctccccataaagcacagagaaatgaatttttccacaaattgagtttagcaagaaagactgtgatcttctttaataagagsgcaaaatgtgaatttattttaaggaattaaaaataaagagtttggctgggtgtggtggctcattcctgtaatcccagcactttgggaggccaaggtaggaggatcacttgaacccaggagtttgagaccagcttggtcaatgtagtgagactatctctattagaaaaaaaaaagttaaaaaaaaaaaaggccgaactcaatctttttataggatccagtgatctaattttttttacttacatttgattcttgaatctgactgcatttatattattctggaattccaattctgtgtgtgttttctctgtcaatatgattacaacgaagatggaaaagatgatggactaggtatggtttttagacgtgaggaattttagttgctctggtgaagagagaaaatgctgtccagttagacctgataggtctgtctctcagtctctgagaggtgagaagcagcagtgcccaggtcttgccttgctttggcggaggctgtgtggcccgatagaaggaacagcagacagtggtttggagggcttgagttcagtccttgctcttatttttcatgtagccataatttcattagctatgaaataggacaaatcgttycctccccaactaggggaataaatgtctataagctgtaatgtacaaatgaaatgtattattaatagtttttctaggtctattctagagctttgctttagttttgagcatcagtattaaacagatgagaggggataaaagcacatggtgccactgattcatattgggttgtaggggttgattcatttgccggttacctgaattaacctctccaggttcctgtcacagcattacaggctgctggctttgagcaaggcctatttaaaaccaaacatctttttaatggstacagtgtgtcatttggaaagatgaaaaatgttctggagatggatgatggtgcttggttgcacaacagtgtgaatgtacttaattccactgaattatacacttaaaaatggctaaagtggcaaattgtatgttatgcacattgtgttttataattaaaaaagaacaaaaagtatgtatttatcccacaaaagttaagaaaaaaatacaaaaatcccctcatatctgaataagataactttactaagtccattgtcttagtccattcttgtattgctataaagaaatacctgagactaggcaatttataaagaaaagagatgtaattggctcatggttctgcaggctgtacaagaagcatgatgctgacatctgcttggcttctggggaggcctcaggaaacttacagtcatggtggaaggrgaagggggagcagttatgtcacatggccagagaaggagcaagagagctggtggggaggtgctacctacttctaaatgaccagatctcacaagaactcactcactgtcatgaggagagtaccaagaggatggtactaaaccattcatgagaaatgcacccccgataattcagtcacctttcaccaggccccacctccaacactgggtattatgattgaacatgagatttgggtggagacattgatccaaaccagatcatccatatgttctaaataaaatgttggcaaatttctgttatctactaatagatacaaatatgtatgacctatttttcccttttaaaatctattatgatggactgtagtgctccagatgaggtttagttaatggtttaaaataaagttgattaaatgtggcctttgatccagctatccattaaaaagcaaaaatttacatttttattataaataaataattttctttttctgagatagagtctcattctgttacccaggttggagtgcagtggcacaatcttggctcacttcaacctccaccttccaggttcaagggactctcctacctcagcctcctgagtagctgggattacaggtgcacatcatcacactcagctatttttttttttccagtagaaacagggtttcaccatcttgcccaggctggtcttgaactcctgagctcaggtgatctgcccacctcgggctcccaaagtactgggattacaggtgtaagccaccatgcctggccaataaataatttttaaaacaagcacagacacacctcttacttctcattcatatttgaatttgtcttttctttctctgttccccttctgccttttagaaaatctgaaccagctgtaaattgcagaaggtgttctggtggatgggtacactatcaccagctcttcctctgcaggaactggcataagtcactgggatgcatctataataactaagaaggacgatcccattggcttgagaagacctgacagaatgagctaacaaataccccgacccatacgcagcttttctcagattggcctcttagaagcagccctacagtttgtgccaatgtttcatcagtatttgttttttaaatcttactacaaggtggacaatgtatggaatatgtgcttcatagttcatatttaccctccctcctttcaccaactgtgaagaggccaaaattgatgtgaacaaatagactttactttctatcagcccctttgtgtttttattctacccaactttaaactttaacttttagtttcttaaaagagggataaggaaagcaacaagctaggctatgaggtgataaggttttgtgtgtggggtgcaggggagagggggagttgtcattggtttccagcctaaattggggcttgactcacgataaattaaaagtatttaaacattgggagaggggagtaaggaaaatataactgaaataaaacaaaagggaggtaatattttcatttcttgacataatgaaaagccttgctctgtaattggtttgtactgtcttggaagtggcgtccgtggtcaacaaaggaccactctgtgagagatctgcaaggaatttatcattccccctggctgagccaaagcaggcttgatatacagttttgtttcgtataaatattctcatgttactgtttattctgtgggaatgtgaggatctcactgacagggtacgtgctccactgccttgcttttaaaggcatttatttgactctgttgtttgtacttgcccagaaacttcagagaacagcccaggaacttgtttgataagcatccagaccgtgctcccgaagtatgttgtgcttggggggttaggaaagcttattgttttaagcgagcctgcacatggcctccaaggagcccatttttcatagataaaacaattagaacaccctcagcaatctcttagaatgcttctccaatgtgtaataaaatgtcctggtgagcagggctctggttgaactcagactgcctttggattactgtgccacttcttttgttcctatttgcagtattgtgaggcaagttagtgtattgtgagttaagatgtgagatacagacctaaacatgggactaatttctttctacatttttagtgtgggtgttaacctattatctctcagctccgcattcatccttccatatactttttttttttttcaagacaaggtcttgctttgttacccaggctgcagtgcagtggcatgatcatggctctctgcagccttgacgtcccaggctgaagtgatcctcccacctcagccacccaagtagctgggactacaggtgcacaccactacacctggctaataattttttattttattttattttattttttgagacagagtcttactctgttgcccaggatggagtgcagtggcatgatctcagctcactgcaacctttgtctcttgggttcaagcgattctgctgcctcagcctctggagtagctgggattacaggcgcacgctgccacacccagctaattttttgtatttttggtagagacgggtttcaccatgttggtcaggctggtctcgaactcctgacctcaagtgatccgcctgccccggcctcccaaagtactgggattacaggtatgagctactgcgcccagccagtttgtttcatttttatgtttagtagacacaggaccttgctatgttgcccaggctggtcttaaactgagctcaagcagtcctcctgccttggcctcccaaagttctgggattacagtcatgagtcactgcacctggccccatactctactttctgatcctgggactctgcaaaccacatttcttctttgccagccagttccctattaggctctgccaatatggggtcctggactgaggaggctgcaggggtggaggatggtgagggattgctccttccttttgacctcctgtttctagaagccccacttcagcagtgactcttcaccttgacagtggctcttagttccaggctccagctgttctttctccccaccccccaacacttgtcagagcttgccttgttgcactcctcagaagccccagcatcagctgggcagtgccaccttcctcagacgcctgagccccagctctgcagggcctctcctttcagcttctaggctctgaggacccctgctgtagtgagtggtgctgcctgcagttacagctctgtgatcccttgttctctgttttgctttttaagttcaacaactgttgacaattttttttgtgatctcttttgaaatgcttagtgtggtttctgttttcctgattgggttcagactggcttctgtcagaaacaaacatcagcagacccaatgggactgggggaaatggagagggaaaggagaaggcagaaaatactctttgtgaacatagctcctaacacaaacagcccacgcatggttactctccttttcttctcattcgcacattattctcttatctcactgtcttcttcttgtcaaattcgcagtttccttttggaattcgtgctattttttccaccagtagggagtctgagtgttgacttgaggtgagggtgggaaatgccatggaaagcattgggccaggttttccaaaggatgtcttttgcgtagtagcatattccatcatttaaaatgtaaactaatgtaattatataatttaaataagtaaagtcttttgaatcttataatagttacttgtctttycttgtgtagccatctttacctgccatgtagataatgctttttatctggcggtaggcccccagccaaacgcctttcccaaacctctgggtaccacgctatcaactttttctcaggaagccccgtctgaagccagtcagtttcctaacttcttaggtacctgtatctccatgaagactaactgctttgaaaaaagtaattatatggatgtagtttagctaggatccattgttacaaaactatattgtttctagtacgtataaaggattttcggtaactgattaatattaatctgtgtctatcccaaaattctttttagtagttcatcttcatgatatccactttgttatttcacaaagataaaaggaagataaaatagcaagatatgggaaaagaagtcttgagtgaacccttttggcatcattatttgtagctatcttttactgagtaccaactaagtattagttattacatgattttcacaacaaccctctggagcaggtgactaaagtaataaaattccctaagtgctcttagcctattgggtcaaccaggaacctcctcctaccatatcccatacctgtaggtttataccactgccctaaccctaaacagtaccccttgggctgggcatggtggctcatgcctgtaatcccagcaattcaggaggcccaggcaggaagatcacttgagctcaggagttcaagaccagcctgggcaacatagtgagcctttgtctctactaaaaataaaaaattagccaggcgtggtgatacacgcttgtagtcccagctactcaggaggctgagaagtgaggatcgtttgagcctgagagatcaaggctgcagtgagacataattttgccattctatcctcggtgacagagtgagaccctgtctcaacaaaccaaaccaaaccaaaccaaaccaaaacaaaacaaaacaataaccttggacccacattctcagatctccaggcctctcttcctaggcctgatgggccttcacctctagtttgttgtgttccagttcgaaattgtacatccagttagttgactcacccctctatggcagttttataggatggtccactcaggatcctgagacttcttccagatcttaggcctctctccaatacttctgtactctttcctcatttaaaatttcttccaggtcttttttttttttttttttttttgagacggtattcctccatcacccaggctggagtgcagtggcatgatcatggctcactgcagcctcaatctcccaggctcagataatccttgcacctcagcctcccgagtagctggggttacaggtgcacaccaccacagctggctaatttttttatttctttttatttttaatagggatgaattctcactctgttgcccaggctggtcttgaattcctgagctcaaatgatcttcctacctcagcctcccaaactctgtcttttactctattatcatattctgagttcttgcccatttattcctttttgtacctgaaagaactattagcttctagttttgtgacttcctcccctggactgtcagcgcctcctctgtaggactgtgcattttgtgctgctaggcacaaccctctctcatcaggtggggaagtggaggatgaactgcacatcgccagatttctcccagatgaatttctctgagttgggccacagacttgctccaactcattgggagatgcctgaaatcactcccactatcttgaaatagccaagtcagccataggacccagagtagtccccatcagtatttaaatcagggaggaaaattgccaccaggtgaggccaacactgctgctagaaccaggatggatgtggattgtgcagccagtgctccagaactcctggctggctaaccatgcagagtcacctggtcatttcttttacttttaattcacatccctacattttatgcaattttagtttatggacttgacacattgacttgttacagggttttattgatgttgtttgttttgctggctagactgtaaagtccctgaggatgaagcttcattcataaatatttattgagctcctactgcatttcagcaggagcagatttatcattatcctagtgatacataagatgtaggtgccctcacttgtatggagacctagtaagtcctgggtaatatgttcacaggccctagtaatatgcttacatggttgtatgatttcgaaaaatgtacacaagttagatattttaggcacaatctgttgaaactgctgtctcttcccacctctatttctttgttatatgtcctttcatgatgagtggcagcggagcarctagtattggcttcatgagcttgcaacctgtgcaatagcacagggtcctatgcttggttcaatgttctgctgttactgtcaggaaattctgaataatttttttcttattcctttttttttttttttgagatggagtctcgctctgtcgcccaggctggagtgcagtggcgcgatctcggctcactgcaagctccgccttctgggttcatgccattctcctgcctcagcctcctgaatagctgggactacaggcacccggcgctacgcctggctaattttttgtatttttaatacagacggggtttcacggtggtctcagtctcctgaccttgtgatccgcctgcctcagccccacaaagtgctgggattacaggcgtgagccaccgtgcccggcctattccttttttttgagacacattgtcactctgttacccaggctggagtgcagtggcgtgatcttggctcactgcaacctccatccccaggctcaagtgatcctcccacctcagcctccagagtaggtgggaccacaggcaagtaccaccacacacctggctattttttttactttttatttttgatagagacggagtctcaccatgttgcccaggctggtctccaactcctgagctcaagaaatctacctgcttgggcctcccaaagtgctgagattagaggcgtgagccactacccccagcagggacccatattttcattttgcactgggccccgtgagttatatggctggttctgggagtggctctggacatttttggactcaaataaaggagaagttgagttgtgaatatttgtgtggttcatagtcacatccgtgtctagtgaagtcattaccagctcttccagtgcaggaacggctcccaggagtactcctcttgccctctgtgatggctcactcagtgctgtgactcacaaagcagggccagaggaccatcacaggtgagtgtgtcctctggtgcccagcatcagaagtatgtaagaagtggaggaaaaacgaggatcaaaagctatggagccagaagctaatctgtgcaaaatctttctagttattggcagcacaaggttgtaagcaaaggatgtggtttttaataatgtccatccaatacagaagctgtagctgcacttatgtatatgttgatgtagtatatacaattataaggacaccagattatttcattttttgtgataatcataggaaacagaattgatcagaatttctgtttctagaggaacaaatctgtgatatagctatcaagaacaagtatgtcccatgggaatttgcctgttgggaaagttgtatcccaaacattaatgattaaaaacacatttctgtcaaccattctaaataaaggaatgagttattttatattctgttcatataaaatgacagattactatcatttgcataggtgacaaaagagtagccataaaaatgtggaaaacatgtatagcactatacagataataagtatatgttatttttctggaattcacaataattgtagttaaaaaatgtatagtttgttgtaatttattttctcattctaaattcacttacaaacctatttttgggttattttttaatgatggtactcaaaatggtgtaagcttccagcttcacaggacctggacctggccgtgtgctgagtacatgccaagcatttggcacatctattactttatttaattctcacaacagccctctgagagcaatattattcccactctacaggtacagaaacggaggctcagagaagttaagtaacttccttgaggtcatatatcttgtaagtttcaggaccaggtttctgtataggtttgtcctttctgaagtctattcttttaccctttgctctccagttcctagagtgacaatgtcatttcctcagaaaagtctcctaagatcaccagggtaggttacatgctccgttatgcctgtcctttctttcctagctcacatcacaattaactaattactaaagtgattatactgtgattattatataatcacagtgttttattatactgtgattaaaagtgattatcctgtaacctccatggaggaagctgtctgttttacctacagcatggaaactctgggtattcagtgaataatgcatttagatctactaattttcagaggcaccttagagcagcttcttgcctcaagcactttctttctcacctttccttctgctcagcaaaggaagggtctgggaatggcaaaacattcaggctcagaattaacacccaagagtattagggttgtgcagctgataatgtagagatgttatcatttatacattcacaccttcatatggattgcctggtaccaatttcaggtaccagatatctatggggctgggatattcatgccaaaagggtatctgttacatagttttatatttttgtaaactgagtcatcttaaaatgggagagcacctgtgttcaattttccctggaatgagctgctaaattctcttgtactcttcacttcggatgaggttttctggatgacaccatctgggaaatgtcactttgattaaagtaaatatgcagcatagttaacactgggagcctatttgaatttctctaagtagccacatctacagaagcagaaggcagccggctctttgggctgggagaacttgagagagatgcattccacggtttggtgtcagtcgagtggcagtgtgtggccaactaagctctgaaggattttgtgtattttccttttcttaccattgggctattttttttcttttccagtttattttgacacgaagaagaaaatatataaaaataaaaaactcagctttacgattgccaagtttttctttcaaactaagaaaagaaaccagttgttgaaaaatatgatgaatggcatcctttgttttattttcagcgtagcacatgagggcactgccattggaaaggggccaaattccccaggcaggagggaaccctgggctgaaaggcggcctagtgattttggaggctggtgtgtcaggatttcctttcagctgttacaaatatctctcttctttccacaagatttcctcacagactcacccccctcccattcttcaggcattccttgtgttttcaacacttgctactgatgaggatgtcatctatttgtaagaaaacgccattggtacaatgtggggctttcagcatttacattgtggttttcccgacttccacagctattgacttatttggctgtgggatcatgtatggttgagggcaacagtcagtagttgacgtgtaagcaatccrtaagattgttagcatgattcctgctcattgttgtcttgtcaccaagtggtttgggagaaccaaggggagagagagtctaactttcttgttctgaaagtcaacctcagggcccttctgatctctctgtgccgctcacgtggtggaatgaagaggaagggatggatgagaagaagggtcatgctactctttcaaggaagtgagggaaatgtctcagatgccttgagctcatcctcatgtgtcccatgaagtgaaatctaaaattgctctgaggacgtaggtgaactgtacctccacagaacctgtagcactttcccaatttggaagctccttctgaaaactttatgcactttggctggggtatttaactcatttattataacttttgtttgccagggtgtttttctcactagactgagatctttgagaacagggctgttttattccacttggtaattccaatacctggtctcagaaaacctttgctaaataaattaatgtaccaatagctgaattccaagccctggtgttgagtcagaactagataactctctaggtatagttggtttaatcatttatcaagtgacttcaggttctgttgcatcaagttgagttacatttataagggacagttaaaggaaaaagctgttctgaacttctagggaacagaaagtctggctcaacttatgtgtgaggctggggaaagagggtagagacatcacaattcctcataaagacagacatcaaatgactcgagaatgcaaacacctgacttacttcctgcagaaacgccagtgggaaaaagtgtgagttggagctcctcatgcctcttcctgttgtctttactcttaaattcaggctgtcttttaaatgccccatgatctacttgtaaactctttaagcaaaaacgatgccaggttctgttctgtggctaccagattggagcttttctctcccggcttcattcagttaattgagctgtgctggaaggttcagtaatttattctatggagtctttctgtgcaaacaattccaggctgagggaaagagacttagctgaatctctcaaacacttgaaatgcagaatttatgttttggaaaacaccagtgagtcagtgtcctcaaatgtaatcaataaaagacagtctccatcatcagcttttcattaactgagcttagagttgcctccttttattgctttttacatgtttacagtatctcattctttccttgattctggattttcacaccatatggccacatctttaagtcatttttcagctgctctattaaatagtaaaatgagattcagaacagatttctttgattttaaaatagcattttgggtgtgtgactttgttgtaaataaaaaaagaattaagacactcaaacgcatgaaatttcaggtatttctacccagacagtgtaatatgtagctttctgcttacttagaataaatatatgtttatctcgtggaatttcacctgctgcataaatggattcattcattctgcatattgaaattcatttctacttaaataagatttagcctccactgttgctaatgaacatagattgaaaatgaaattgaaagtgtatctttataactattcaatattatactgtatttctcattagaaatgattgctatcgcttataagcatccatactacatgtcaataatgctctattgctgtaattatggtggtgtttctactatttgatcatataaaaggggattcttttatgttttactttttttctgggttatctagtggtcagttccttgagaagctgcaaaggagagatttttgactgccaacatttggatctcacagtttagagttggtcaatgagggcttaaggcgtatagtcctacaacttaatacagtttactttgtaaagggttacacatatttaaaagactattaaatatttactacttgttttctgagccagaaaggacattttggtgtagattgtatgggatttttttttttaaggatactacttaacaaaaggaaaccactgcatgagcaaattttgtaatatgagtaaatttgccattgatccagactttagcagcagagactgtgtcagtcacaattaatcagcttatgagtatgtgattcagaatcttcaattatcctttaaaatctggacatcgacttgaagaaatgactgacctacagttgattgtttaaagttaaaaccaagtgcactcaacatctgaaaggtcaatagtctcttaattgtaattcaataaagttaatttaaagtggtatacaatttgtgagtgttataattacagttcacatatttttgacttcagtgayggtaccgtttgctagagaaatatgcttcagttgaggataagtccattggatgtgtgtattttgatggctatcaatattttaaagttcattacttaatatgatacataggaagatagcaatttggagcaactattctaaataactcaggtaaaattctgctttttcttgaactattctggcattattcattgttttattgtcaccgtgataaacttgcacaaaatttttaagcaacagtaacaaaaaagtaaaaccttgtttttaattctgtttaaaattttaaaatcagaatcacttctgcatgttctattgtatttttttcaataacatatatctctagaagacatagttggtatctcccaatctgttttatatcatttctagaatgtaaagattgtctctgaggccaaaattaagagcatgctatcctttccacatagcaaagatcatcacccctcagcatgtactaagtatctaaaacttggtggtggcagaaaatgttatagacatagtgcttttacctaagagcttgacattaagagagataatagcatttaccgagacaagaaaaggaaatatggatgacaatgagatataaacagtacattgacagatcagaaagacaaacatttctcaaaatctccattgtcattttcagcttggaggtcagcacagagggcccccctgctccttgaatgagatccattaggagttttggaagaagtgccagccttctggtgtttccagatcactgcctggcaggaaacagtttattattttgagaaaattacttatttaataaatatttgttgatctactgtgtgccactcaggttataagaaacagagctgtgaataagacgaagtccctgcccttagggagcttgctttctagtggcaggagacaggcagtttacaaataaaaagaaatggaaaaatgttcatatgatgtaagtaccatgtagaaatataaagaataaggaggacgtttttgtaaggtgttcaggaaagccctcgttaataagatgccctctgagcagagaaaaagaaagaaccacgtgtttgtattgggaggaaagtgaggtatcgaggctcagctggaagaaacctgcaataactcctctctctagccatcctgtattcagccatcacgtctgatctagcctaacaagtgggtaaaagacaaattacaagattactcaggtcaaagggtctcttattctccagtcagtgccatactggaaaagtaattttatcagctaccacttattgagtgccttgtatgtcaggcattgggttgggcattttgcagcagtccaagtcaaatttttattatttccttttctctaatagggaaactaatgcttaactgaagttaagtgactttctcaggcccacatggctttgaatgatggagccagaatctgaccttgggtcagtctgactccaaagtccctacatgttgttgcctcttcaagagggtaaggtgcctgggaggacaacaacatgaatgcattgttattattattagtagtaatagtagtatttgagacaggatctcactctgtcacccaggctggactggagtgcagtggcttgatcttgggtcactgcaacctctgcctcactggctcaagcaattctcccatctcagcctcccaagtagctgggactatagttgcgtgccaccatgcccagctaattttttgtattttttgtagacatgaggtttcactatgttgctcaggctggtctcaaactcctggactcaagtgatccacttgccttagcctccctaagtgttgggattacaggcatgagccactgcacctggccatgaatgcattattattaaaatatcctcagaatgtgacaaatgttaatgttcttaatttaatgagaatggctgagttgttctccaggaaaagtcagaataacaaatggctaccagcctctgattggattcactgaaagatgcaaggttttgtaccatagagaagtagaaacgtggttattagctagtacatttggaatctttgggccactgatccrcataatccatcactccattattccttcaagtgagaaatatttgctttggccacagtgcttttatatttttaaacttttgtgtaggaatgctggttcttctatgcaaatattgccagcccactattttgaataaaaaccacccagttcctttcaggagcattggaaatatattaaaaattttctggctcttaaattttccaccagtgtgtactcaaatagataggattaataagattaatatccattactattcatccagaattataaaatttcaacgtatctgtattttcaatgatgaaatttagagtatttctgtccatctaagacacatcagagtccactagggtgctgactcatttgaacatcaacatatggaaaagtgatcttcagctgggataattagaaatgcagcttttactctttatgccacctctttctataacgttttggtcctacactttgaactaaccttgcggagaaaaaaatgataatgaagtgaagtacacgtataatgagtatctgttaaaataatagctctggaaagaaactaaagtttaatgcaacacaggaattttccctactttttagtggattcacattacagctggtcttaggtcgtggcctgggtggttgtgagttcttgatgtcaatgccgtatgtttaagggggaatatcaatccgatagccattttctttactcatgtgtgctatgcatttattgttacactgggactcagctttttttaaaaatgtaaatgtctatgtcaaaaaataatcttagatttttcattgtcttgatcaaatcatggttagctttgaagaatggatgattttgtggtgaaaattcataagggaaaaatgtctatataaacggactgcaccaaacttcaaaatacttttattcctttgttgttctccagtttggttttggtagccttattatgactctttattgatgatgggtagtcatatatattttatgtttctttcacttgcttctcaagtaatgccccccctcctccgtctattctcaggaaatatgaaactaactctcagagggtttctgttgaggactagataagaattatgccttggattatttatcctttattcacagctcacctactttattatttttctgatctcatgtattatttccatttccactcatctcattatgtttctaagggaactttgggtataaagatacttgcaggcagttagagatgttaattccatatgtataagagcagcaattagcatcaagagctgtttctagtaggaggaaggaacttgggtccttgtaggcaaatgaagagagactcatttcaccactttcccagaagtattttgaggtcattgtttttgtgtgtatgctccctaatctatccattaaatagaaatcagaaaattatacattaataacatatttgacaatacaatgagaatctagaggggaaaaaatatgttccttaatttaaccagtattgatggttaaattacttatgtttggtactagcatatttggaaattaaaaaaatagcacccacggtttctgtttaggatcttgctttggatacaaaggttgcacatgtggagtcattagaaagcaattggaagcagtgcagagacacgaggagataaatctctatgctggggataagtggactgtagagataagaagtcatcagagggaaatgctgtcaggtttgcaggaaacacagattagcgagacgggtgagaatattaaagattgaggtaacatgggcaagagcacagaatgggaaataagtgatgtgtgagtgggtagttggtaggcatgtatgtagtcaggcacgaaaggtacagaaatttggttttgccctgtttgctcacaaccaagcagggagaagaatatacarccccctaagtatagtaccagtggtaaggacagaagggaagagccaaaaagtcctctgctggacagagtcagggaaggatcctcaaaggaggatgtaatatttgcaggatgaggcagggactttggaagggtatagcagatttggttggatagaagtgagatctctggtgagaaataacgttcaatgtactttaaaatctagtatcaattatttctatatttaccaaaacacctactactttaggagacttgattgcacagttgctttggggcttcatatttcaaatattggtgaaatttgaatcattaagagtgatagaaaaataattttttcaaaatttcatctcccaccatttgctttttcttttcaacaaaatttactgtgattttttttttacacataaaattgaatggataaggcaaaacggaggaaaagacaaaattcatagtggtaaatatgctatattatttatttacatattattttcttctaaaggggataacgtagctaattcttttagtactgttatggaaattagctcatgtaaataatttataaaaggtgatactatatacaaatgtagcatatactatagcggtagtatatacaaataggtatatacacatatgcatatacatatatttgaatggggcacattatatttgcttgtagtctctctcatcactttgtactgcaccatcaaaaatttttctttatactattagtcctttggaaacacagttatcaaagtaaacaaaaatagatggccttgactgcataacattatatggatttaacataaattttatattatgtacaatgacactattaaatgtgttaatacaacacataaaatgaccaattctctttaaattttagtgtttagcatatttgttttgattgtacgtgtgggagctgtgagaacagctctgcaaaaatactttgcaagttaccatagtgactaaagtgtagtgctttatgatrttgtctttcccctgggtcttaattcagttgcgtgctttttaaatcataatctaatagttgacgtttaaatttttctatttttaaaaaactgtatacacacatacaggtttataactttacttaaatgtataatttgattatattacacattcttcaagtaaaatgttactttttcctttctctttttgctgggttcccagaactcttttttctcctttttcttccccctctcagtgatccatgttgacaaatgatatcttttaaattttttcctctattttcatacaattatatacagacctatatatgcatgtacaaaaataaagcaggatttttataagcaggatttcatggaaatagttctgaattaattgatacgtaatagttcctatttattccttttaatggcttcttaatgtttcatgttgtaaatgggtcataatttaatcactttgcttccattttttgttctatgaataatgctttaataaatatcacaatacctatgtccacacttgccagtggtgtttttatgtctctgggataggttttaagaagttgagattgcagcgttaaagagtatattatatattttaaattttcacagaaattgaaattaccttttgaaagagctgtaacacatcaaatttatacctagcagtatttgtatctttatcccatgtgtctgccaagcagtaggaattaaatatgattctctttaatttttgccactcaagtgtaaagtaaaatttcattgttactttagtttgcagtttcctaactattagtgaatttgctggttgacagtgtggatatgtttaaggaatatgtttgtcaaaaaaaagtatttatttaagaattgcctattcatatatttgaataggcatttatttgatttttatttgatttttatccttttcttatcaaattgtgagatctgtttgtatattacaaagatacccctttgtatatcaactctgacacttttttttttttttttgagacagagtctcrctctgtcaccccagctggagtgcagtggcacgatcttggctcactgcaacctccgcctcccaggttcaagcgattctcctgcctcagcctcccgagtagctgggactataggcacacatcactatgcccagctaatttttgtattttcagtagacacagggtttcaccatgttggccaggctggtctcgaactcccaacctcaggtgatctgcccaccttgaccttccaaagtgctgggattacaggcatgagtcaccgcgcccagccgcatttttttttcttatagccactgtgtctcttttgcctttcaagtgtcttatgctatacagaaattttaattttttacatagtctttcaaaagtgttttagtataaaattatctaattctttctcttcccaccctctttgctttcataaaagcaaaaaccttgtcaaaattctaatcaaaatgacattacatttatataactgatatttttaaataaaattaagtattccagccaagaacatggtgtatccttccacttgccagaccttattttatgtcttcagtagagttaccatcctctttatgcaggtcctgtatctttcttggaaactttattccaagtattttatttgttgctactgtaaatataatattttcctgttttctatctctaagtacttctatggagaaaatatattgatatttagatatttatcttatatccagctaccttgtcaattttatttattctaaaggtttttattttttaaacttgaatttcttgtgggcttcctgggcatggattcatgttaccaatgaaaagaagtaattttgtatcttcattttcaattcttatgcaagctatttaattttctctaaaaatcagagataatattaaatagtaatgaagatactgggcctacttgctaagttcctaattttaattaagatggttgtgatggtttaccatttaggaaaatatatgtgcttgctttttcataaatattctgtgttataagttgtgttcttctattactattatttttaaagtttttaaaatagagatgactactgaattatatcaaataacatcttggcatttattaacattttcaataattcttctcccttaatgtattgatgtaagggattatgttgatgtatttgttaccattaaaccgtcttgcattcccgaaataaactactcttcgttatatcatattactcctttgggattttgctgatgttttgcttagtatttgtagtatattcactgtaagattaatctgtggcttgttttttcatttttgtgttaccatctttcataggttttggtgtaattgctgtaatataaaataaattcaagaactttcactttttttctagagtctggaataatttaagtaagtttacaactataacaatttgaagattggataaaattgccctagtgacttcttttttttttttcgtaatgatagctttcttctatggtaatttccatattcaagttttcatttgggtaattttggtgacttatattcagctatgaaattatccatttattctagattttcaaatttgttttccatagagttacacatagaattctcataatttttaatctcttctctgtctgtatctgttatacatcctattgctcttatttttaggatctctcctttatctttaatcaggcttgtgagtcttttttttaaacatcattttataatcttttcaaaggaggaactgtttgtaatttgtttattctttcagacttgggggtctattttattaatttcaccttttattattattaattcttcctagtttctttaagtttattttgtgtttattatcctaattttaaagagggaatatttaattctttaatttttagccctttttttgtaatagcaaacaataaatttttctctgcaaagatcttgctgtatcatataggatttattatccaaacagttcctaatttctctttctattttattctcgggatttacttcaggcttattcaagagagtgcttttaaatttccaagttgtcgagatcattttggcgacccttttattatttacttttaattttattctactgtgatcatagaatatgctgtgctaaaatatctactaaaaaaatattcccctagaatttctcttcttccctctctcagctagaatgcagatatgccagcccctgcttcatgccaagggcacagatgcctttggggagggcagagcaacaagatagaaaggacctggtccctgaatagccatatggaaaaaatggcatctttatcaggactgctcacttaagcactactttgtaaaagaaaaataagctttcatcttctaatattgtttatgttctttttcttatagcatcttagcccttaattctactcttataagccttatctgcaagctcatattcacattgccttttcatgttttggttattattttaaatgcagaaatccagtttctgcatggaatacaaatctgcagtgcttacaattccaattttgcatttagtgctaatgacaccatcaccacagggatgcagaacaaaattatgtcctcggaaaagtacgtgttcatatacatttatgtattttatatttttacttaaatataaaatattaaaattgactatctgtgaatttatactctgtttccttcaatctaagatgccattgactctagaattacagtcaaaatattgcaagtcatatagttgacatttgtatttttttcccccatataatgtcatcgtctgtgacacaaagagctgtggcaatgtagaatattttcaaagaatgcttctctcttgtctctgagattttctttcaaacctctgacacgagttctgcaagttttatattgcatgtatgtggtaggtagaatattgtccctccccagaaagtctcaatgtcttaatcccgagaacctgtgaatatgttaggctacgtgggatagaaaattaaggttgccaaggcttggagtggtggctcatgcctgtaatcccagcattttgggaggtcaaggcaagtggattacttgagcccaggagttcgagaccagcctggccatcatggtgaaaccccgtctctactaaaaatacaagaaattagctgggcgtggtagtgtgcgcctgttatcccagctactcaggaagctgagtcaggagaatcgcttgaacctggaaggtgaaggttgcagtgagccaagatcgtgccacttgcactccagcctgggtgacagagcgagattctatctcaaaaaaaraaaagaaaagaaaagaaaattaaggttgccaatcagccaaccttaaaatattaagattatccttgatatctgagcgggccaaaggaatcacaaggtccttaaatgcagaagagggagacagtaaaggaggtcagagtgatgcaatgtgagaagaatccagatgctgctgccgactttgaagctagcagaggccaaaagccagggaaagagggcagcctctaaaagctgaaaaaggcraggaaacagattcttccctagaactcccctagaaccatagaggaatggagcccaggtgacaccttgattttcacccaatgagacccacttcagacttttgaatcccagaactgtaagataacaaatttgtgtggttccaggcattatgatggtagcaacttgtcacagcaagttgccatagaaaatttaatacaatgtgcaggcagtgctagtgtttcaacactgatcgccggctaacagcaatttgaaggttcaccctgatctcaagacattaaaatatgaaaaaatatgtactgtaaatttgatgaaatatggtaaatgtatgttaaataggtgtcataggaaggaccatttagaaattgtaacagtggactcagtcttgtgtgatactcagaatccagttagacatcattttaatatctgaagtaattgtgtcactcctaaataagaaaaaatatgagaagagtggaattcgatcaagttcaaaggtttttagtaagggctaggcaggaaaaacatgcaaataccttaaaagccaaagaaatgtaaacctcagtcaaatgatgtggcaacctgggctaagtgacacccccttttaaggttctgaagtccccaatatatatatataaacagggctaagtgacacccctttttaaagttctgaagtccccattatgtgtatgcatatatatatatatatatacagggctggaggtagcccagactgttcatgcctgtggtcactacacaactccacaatcagggtgaacacaaagttgtttaggacgggggtcctcaattgccaggccacagacaggtactggtctgtggcctgttaggaactgggccgcacagcaggaggtgagcagcaggagggcaagccgagcattactgcctgagctccactttctgttagagcagtggcagcattagattctaataggagcacgaactctattgtgaactgcacatgtaggggatataggctgtgtgctcctatgagaatctaactaacagtttcatcctgaaaccatcccccctgccatctgccatccatggaaaaattgtcttccacgaaactggtctctggtgccaaaaagtttggggaccactgatttaggacatcattgttctgttggtgactaaacaacattaaactcagtcaagtgagccaggcatggtggtgcacacctgtagcctcagggaggacctgtacttgggaggctgatgtgagaggatcacttgagctctggagtttgagactaacctgggcaacagagaccctgtctctaaaagacaaaaaaattcaatcatgtgaattgctgccaataataactaaaacttaataaaaatgtattttgaaataatatctacaggttacaagtaaaaaggactacaacttaagaatttggaagagttggctgggcgcggtggctcacgcttgtaatcccagaactttgggaggccaaggcaggcggatcatgaggtcaggagatcgagaccatggtgaaaccccgtctctgcaaaaaatacaaaaaattagctgggagtggtggcgggcacctgtagtcccagctactcggagaggctgaggcaggagaatggcgtgaacccgggaggtggagctcacagtgagctgagatcgcaccactgcactctggcctggtcgacagagtgagattctgtctcaaaaaaaaaaaaaaaaaaaaaaaaaaaggaatttggaagagtttagagaccctgacagaaagaaaggtatgtgatgatatatgacatttcatatcccccatgtatgagatcatgaaaacactcaagaatatgtctaaccaaacagtcaataaagcagaacagataactcaagttagggaagatgaaagagcaaacggggtgagcaacaaaccttgttaacttcattatatagttgggaaatcctaatttttagtttcaggggaatagaaktaaatactgttactatttttgttcaaatgaatctcaaacttccccagcaatttgagttaactgggcatgtgttctgtgtgttttaagtgttctcagtctacaaatcccactttgatggagtcttgaatgctgtaggctatccttaggccacttttctagaagcccctgtttccccaactcctggaagagttagttgctgataactcacagatgagtttctccccaggaactgtccccagccggagagtcgccttacccaggccacacttcctccctggggagagcccacatcaatgactggctgatgtatggtacaaagtcccgcctcaattggggcaagtctgagggagagtcccagctccaacagctcccagtgagatgactgaggccttcatagcaaatacatggcactgaaagttctccctctgcccaatcctgcttccctcaccccgacaggtattgtttttgagagtcctccccaataaacctctggcatgcaaatctcagagcctcagagtctgttttccaaggaacacgatctacaacagggattttagagctgaatcccatggcacaggttggcagcaaggacccccatcattggtgtgagatagagcactgagagcccctggcatacagtcttggtgcaattcctaatcttcacctggtgctgaggaggaattacacataggtagaccagaatgccctgctggaggagtatctcaggcatttgagtgtagtaattacaaggactttggaatcagattgctgttgctgggagtctttaatacattggagcgagacaagtttggggataatcaccaagaagtcctacttggtagcatataaagactctttcatctcctgtaaatggagggtagaaaaagctgaggttcaggtcccaaacttaattataagggtagtgagccatgaaggaagattaaattttcaaccctaagaggttkgctaccctgaggttagggcctcatttgggaatgggaacctgagacttgaaatagggacatgtggaatgatgcacttatcatcttgaatcttgaatccccaaattcctctgaagtctctgggatcactcctccccatcaaaagctagcattgtagcatggttgaacatgatacaaaatcctttttgttttttttttcagcacagaaagaccccactcagaaggtaccacacctggctgcatggctttagaccagtaactcacatgatgaacaatgtaatgtgtctagagaagtgctgggcttgctgagggaggaggagaattgtgtcctgaaggtgctgctggacccacctaacatgggtaggcaggagccaggagaggctgtatgggacaggagcctgaaagtgctggtgtgatgaaggtggaacataaatctggataagggagaatttattgatatgagcactgttctgatataaaggatttaaaaccctgacagggtcccagaagatggtgctaatacctaagctctaggaagcttggagatartgatggcccataccatgtaacgttgaaatattagaattatgatggccaataattgaagggtggatcaaaagacccaaagatgtatacgagaacttattaacattggtgtcattaaagtaggtatacaaccccccactgctaaatttgactggctttaacaacaacaaaaaagactcagagatgtaggcatactaaagtagatattctacatagggccagaaaactcaccagccaactatgttatgtgggcttggagaatacttgtttattgtataatgagaaaagtactggtaacaggccatggccttgcagtaaagcttagtggcgtcttctattgtctagggctgacagtaggcaatgctgcttcagaaccaggctccctgatggccctgtatgatagaatgcagagcaggcaccattatcatcatgaatagcaagtcaaagtgatatccaagagtgccaaacctacagaaatctgtagagatgggcagtcagcaagagggttgcttattttatacaatcaaaagaagtcaagaatggttgacaatatgttaaggatgaccaccccaaaaaaatcatagtcctttgtttaatatatagaaccaagtttttagacatggaagccactaactgaaggagtggctggatctgaaggatgaaggaccctgcaaaatcgtgaatgactrtagtatacagttatgaaacaatgatggaagagcaagtcccagacattttgaagactattgaatagaagtaatgagctagaaactgagattgaaacttgctgttttaacrtggccccctcttaggaggatacgtggagaccaggtgagaaatggaagagttctggttcaggtccaccagtcccacaaacccactgggtgagcatctctctagtccctcagtatattattgcagcggacataactgccagttagtagaactcccacattgaatctcagaactgtaggttaagaaccttcccagtagagaagctatgtggaatcctttgaaactttccccctcaatcaaaatagtaaattgaaaagggtcacaaaagaacatagtggggtgatggaaatgttctatattttgattgcagtggtactgattacattcattcatacgtttgtcaaaaagtcatcaaactatgcactcaaaatgagtgcattttattgtatgtaaattattcctcagtaaagttgattaaaaataccattttgcccaagtgtgacagacattgaagaagtaaagaaatcatatctctaattcaatagtcagcctcctgaaaaatccaaatggatcctggagcatgagagtgaactatcacaaattcacaaatagtggccccagttgtagctcttgtgccagttgtgctgtctttggtagagcaaattaacgacacctcacaaaggcctggcgcagtggctcatgcctgtaattccagcactttgggaggctgaggcggcaagatcacgaggtcaggagatcgagaccatcctggctaacatggtggaaccctgtctctactaaaaatacaaaaaaggaattagccaggtgtggtggcgggcgcctgtagtcccagctactcgggaggctgaggcaggagaatggtgtgaacccgggaggcrgagcttgcagtgagccgagatggcgccactgcatgctagcctgggcgacagagcgagactccttctcaaaacaaacaaacaaacaaacaaaaaacaagaaaaaaaaacaatacctcacaaacatggtatgtgacattttgtctgccaaatatgtattctattctatctccttccacaggaaagagaatcagacatagctcacatgctctggagtgaacaagagaatgtatggtttttccctagggctatattaactttcccaccccctgccattctgtagttctaaagagatatgaactgcctagatattctacagaatatcttactggtctattgtgtcaatctattatgacattgtgctaattggattggatgaaagagaagcaccaagtaggttcaaggctccagaaagtggaaataatgcctatagatgattcaggagcccattaaattagtaaattttatagggcttctgtggtctggaagatgacctccaaggtaaaggaaatgttattacatcatatacctcctgtcagtaggaaggaagcacagagcctgaggagctgcttcatattttggtggtagcatattccacgcttgagaattttgccttagagaagaataaatatgtacatataggtaatggtttatatcctggctgtttggtcaaatgcctggagggagaaatactggataaccaaagacaaggaggtctgagtaagagacatgatggacctgtgggagcggacatgaagtaagagagccttgaatatcatatgaacatctatgtggaaggagaaagtcatcagccagcctctgacaccagtcactcggtgctggcacaatgggcatgtgaatagagtacattgtggcagagattgtgtgcttcctgtctctataattctaggcagtatgggttagacaccttggttccctagaggaagagcacttccatgaggggacacaagagaacagcaggcacagaaagaagtgactcttctggcagggacatttgatcctggtcacaccaggaaagggcagaggagctggtacttaatggtgacagtggagaatgtatttggcaacaagacaatttgctgtggcatctcttggtattcccctgcccacttgtgatatcaaatagacaagtgcagcagccatgccctaagctagggctcagaaccccaaaartgagggtgtgygctactttgccaagctgtctagatcagcggaagtgctacctagggacaaagggaacctggattaggtaatagaggaagagatgggctggttttgagaccagctgcagaagcaggaagagaagcatggcaattcatccctctagttttcatctttaattttttttcaggaagagaccagtgagaatcctgaagaaactgatcccagaacttgttacatgaagcacatgggggtgaatggcctaagagtggactgaggtgtggggtgctgccagattcccatcagcaggagtcattccacagtctgctgggagtgctggcagaacacagctcttaacagagtccctcctcaggatttgcccttggtcaatttcttctgtgaggaaggcagcatctaatggtggactcagggatataagggcccagcagccccctgccctatcctagcgaggtgggccatccgggctccagaggtccctgtagagctggataaggtctttgctgtggctgcatcctagttcagtttctctgtccagtcctgcttccttcactcgacaggcacttctgagagcacctcctgcacaccaatcttaaccacagtctgttctccagggaactccatggattgctatgtttcttgctttttatttcatcagggctagctgtcggcacgtgataagaggtggtacttttgcaggtagtgaaagcaaagtgtctcattttgcaggctgtggtcctctgctgagccccctggaagaagccctcagttgtcttgcatgtttgttctttcagagtcaaggaggatacagtctggctgttgagctcttcttaggagcgaggacaaccccatacacttaggactgacgtcaccatctccatctcaagcacatttgctggaggctgatgtcacccttatcaccacagttccctgcccctacctggggtacacaaaccacactgggccatggttttccaggtttgattgtccttatgtccttgctccagatcccctgacattgctctccaagattggtgcaatccctggaggcacatcgcttttttgcaggggttctctcctctaagagtgtaggggagccctttggttcaagagaggcagatggattgaaatcatgagtgcacatgtggaaggtggagggggagctgcattcaggtcactgtgttcccagaatcctctcctattttcagtcttccattttgctttctgtttccccatttgcttttgagataacttgtttgtgtcctgattagtttgtgtgctgatcttctgtatgaaataattgtcaggtctaggtaactggcaaggacacttacacaattggtccagtaaatttgggaagtttagcttccttggtagagtgaataactcttctagaatatgtttcacttcaactttatagttctagttaaaattttacttgagcaaatatcaatagtcttttgcccagccgatagagccaatttataagaaatattgtctgtgtatagtttgaatatagtagtgggtatttcatttggatttctctttacttacataataaggaaaacaggacttttaagtctttattttacctccaatttttgcatttcagaacttggagaggtacattttaagaccgagcaaatctatcaattataatctgatggaaaaagatacgactgagtgttcctccttaccaaaaaagttcttgtgattacttatttggtactcatgtctactgagaaaggcttccctgagctatttattactcatgcgctttatagagcattacagtcagtaaatatcctttgcctgtcacaagaatttgcaattatactagaatgtcatcatttcaggaaactataaagcaatgaacatgtttattttcagccacaargggaaaaaatatcctgagaaccacattctcttggcagtttgaggcatttattagaaaatctgtaatttctttttgtaatcccacactcagtgggcataccctttaatggaggtatgtcaagtctgcagaattatatagtacattctaaacttgctttgctgggaaaataggactcatggcttaatttataggcttgctgagctcaccaccctgctggctccctagaaggaggaattaaagtctcctaatggcttaaaggggccgaaagtgctcgcaggtgcccttagacccttggaatggtgggcactgaatttcagcatttgtattttaccttaaggaatgtgttctctgcaaaatagatgacttcagggatttctgcgtaatcccactgagtagagattgtcaccatttttctgtgtttctaccatgttcccagttttttattcctcagtacctagaaatgtactggattttaggtgtttgctccttcaaacgtgctttcaggagggagagaacaagaatcattgaggtgttagtgagataatgcctagttcctctccagacctaaatatgtatcagctggccacattttgcttgctggttgtgatctcctaaattattcttctttgtgtatggtgatagcttcaactgggaccagacttcctgttttggattacagattgaatgttttggaccacctgttttaagtggcaggtgtctgtggtcaaacctactttggttaatgtttcttcctcttggttctctacttctatcgttatattttttaattcattaaatggagtgaaatctacattttcttttgaaacagagcctgattctattttttgatatcttttaagctgcaccccttcctcttgcccttgtgccccacatttagacatgcaggataagaaagcctgcaygctccctcctttggcgctggagggaggttcaggccacatgaacctctgccctgagtgggaacgttccacccccttgtcagccaaaaatccctaagcagcctctttcccaagctctctcaaaccatttttgggtgtgctttagagtcacccttttccccacagaaagcctcattatgtgaatgtgmtggttaatkttatgtgtcagcttggccataatatccagatatttggtcaaacattcttctaattgtttctgtgaaggtattcttatgatgagattaatatttacatcggccaactttaagtaaagcagaggaccctccatagtttgggtgggcctcatccaatcagttgaagactttaatagaaaaagactgacttcccttagagaaaagaaaattctgctaacaaaccactttcagatttgagctgcagcatcaactcttcactgggtctccagcctactggttgaccctgcagagtttggattttctagcttccacaattctgcaagctaatttcttttctctctttctttctttttttctttttttggagacagagtcttgctctgtcacccaggctggagtacagcaacgcgatcttggcttgctacaatctccgcctcctgggttcaagagattctcctgcctcagcctcccacgtagctgggattacaggtgcatgccactgcacctggctaatttttgtatttttagtggagacggggtttcgccatgttggccaggctagtctcgaactcctgacctctggtgatccacctgcctcggcctcccgaagtgctgggattacaggggtgagccactgtacctggcctcaatacacacacacacacacacacacacacacacacacacacacacacacatatacacacatctctgtgtgtgtgtgtgkatatatatatatwcatacacatatattacacatgtatatgtgtctatacatacgtatacatagacacatatatgtgtgtgtgtatatatagggaatatgtaatcatacacacacatcctattcattctgtttctctggagtatactaatacagtgattaacaaacttttctgtacctttttagtgttgtatgtggaatcatcagtcttaatatctgaactccagtttgggtggggtccaccctctatctacggagtgtctaccacaccttagttttagcatattttgctttcatctgccaaccttcccttgcacagttgacttaggggttgtgtgcagttttggtaatgtgagatgcagaggaggacccgagtggtacctttgatgccaagatgtttagttaaatcccatacttgtgcaggccactttcagtgctggactagatatgccattggataaaaggcagcatctctgccatttttcatgggacataagctgttagaatgattaattggcaacacgagtgcattaaagtagtgtgattaaaactgagatggatgttgtgaggtgttgttttggggatgtatgtaagccttagctgaattgttcttgttggagctagatgtcagacatctgtttccttgttctcattatataacagatatggccctgaaacctaaggttctttgggcaatatcagtttctggctttcctatcttatctcaggattccaagaggccatggccacttaaaaggagatcctggccaaggtgggtggattacgaggtcaggagattgagaccatcctggctaacaaggtgaaaccccatctctactaaaaatacaaaaattagccaggcgtggtggcgggcgcctgtagtcccagctactcaggaggctgaggcaggagaatggcgtgaacctgggaggtggagcttgcagtgagctgatatcgcgccactgcactccagcctgggcaacagagcgagactccgtctcaaaaaaaaaaaaaaaaaaaggagatcctgctactgtaccagcctgctctgagccccggtttctttataaactagacatgatccttatttcattgagtggttgtgagggacaaatgaagaaacatatgcaagagattagtaccgagcctggaacctataaggtcctcaagaggtactcatttcattggctttctctttcttttttccttcttaagttcctttctttatgttctaaactaggttgtggaaagagggggaacagtggagaatgagtggatattacccagtgctgccattattagcagcagctaggcacatgagcgtggatatctggagcagaaaaaggaagactggagtcactgactcagatctaagccactgatttcccaagctgcaggaatgttggagactgaaactgtgcagctgagtccccacaggaaattgctcctggccttaacggagttgcttccctcaagttttcatcagttcccagggaaatgactggtcagtgtaaggaaacaaaggccagcctccttgcctcaatttgggccaactctgatgggccgttatatctgaagacatctcaagaagtctgtgggggattggctgagtctgctacaacaacattgttttcaacttttccttctgcttaatattactggcttcactccctcacacgtatcactcctgagcattctctaataaacgttctccaaaacaggggttgcaggcttagaatctaatcaccaaagcatttggtgtcaggagtggttggagaacgcagacaatgaatgtgatttyggagctgcattacttgctggccagctggcaatatggaaactattgctggtgtcaggtgaaacatggaagatccctggcattctatagcactgaaactattattacttgatcagtggtgaacagggatgggatagcagtagaaggaatgcacttaaatatctcagggtttgttagattctgagaggactggtacttatgaggatgatggaattgaatggctgttgtggactgcaatctcatgccctggagaaagacagtgaatgactttgagtcagtaatcagtaatttgagagatactgtgaatgtcagaggagctctttaggaacatataaagagattcttatctctgtgatcaaggacagaaaaacctgagggtcagttctaggccataattttcaggatggcaaagctccatagaaggttgaagtctcagatgcagaaagtctatcatgtcaaggccatgccctggttgagagtcttagaaaggggatacctgggtgggtgcactaaaaaaaacccttaaaacccgttttgcctggaactctctgagctggtaaatgttcaaggctagcatgcccaccccctaaagcccccaccattaaaaactgcagaggcctgtgctttgtaagacaacatgtacccctcaggaattacctccaccacccgtcctggcctagtatgagacaaatagagtcaattccaacataatctgtccaggaaagatggagcctgctaagggaggaaagggacaatataataaatcagctgtgacacctggccacataatccatatgggactggatcctgaagatgctgaatttgtagggcagagcatgaggttgggtaagggagagcatattgatagtggaccactgtcctagtctacagtatttaatgccctgacaaaaatgctggttgcatttgcaccttctaacacacggctaggatggctcttggaagactggagaaggttatgacccacactaaatagaaaagccagaacttttgtgtagaagatggtagaaaaggaccaaaaggccccaaggatgagtacattcaagaatggatgtattacaaaacattgcaaatactcccagctgactacattccagggacaggacagaggacactctattgactaaagtgatatgtaatgcatcactcagacagggaccagcatcactgagaagttcagtggaggctttctctgtaagccagggacctgctgctagagaactgggctccctcactacaacagggatgatgggatcctgaaatcataaaggccaggtggtggtgcttaatatcagaagcgagatgcaatgcaattatcataatgaaaagcmatgtcataatagtagttggggggatgtgacccacacagagccatggagatggtttattggacatagcaagatagatggacagtcatcaagggaatcactcaatctatacaattaaaagaaatcaaggaggctaagtgcaggtgtccctctaaagagtcacagtcccttatcagtgtctggacatgagccacttctcagactggatgccactgactgagggagaggccagatctccaggaggaaggacctgcaaaatcatggcaaatatatatgacaatgactcctacagattttccccaaagggacctatggccatttattcaggtaaccttacaatggggaaagagtagtactcagacacttgtgagtacttctggatacagggtcaaggtagcactgatacctagggaggtaaagggttattgtggccctcctaagaatgggggtagatggggactggtaataaaatggagtccaagcctaggcccaactcttagtgtatgtttgtgtatatgcatatacgtatagttgggatatatatgctgatagctagtgaaaccctccacattgatcctttggcttgagagtgaagagttaccatagtggggaagaatttgaaactgtccccacccctattacaacaagataataaataaaaggcaatgttttgtttaggggaaatggcagcaattaataccagccttacaggggtagtgagcctcatcatatccccattaaattaatcagtttctggccaaacaaaaaagacaagaaaaccacaaacaaacaaaacaggttaacagttgacttctgccaactcaaccaggtagtagctccacttgcaattactgcgccagagtagtatcttacccagccaatgaacacagctaattattaatacagggcgtgtggctacagatctggcaaatgtgctctttcccatctttctcagaaaggagaagcggaagtggtttacgttcacatggaacagacgacagaatacatttaaggtcttatcttgaggctatgttaactcttccttttctgtgataatataatctgaagggacccaaatcatctgaatgtcctgaacatcatcacattgatccactatattgatggcattgtgttcattagactggatgaccaagaaggggcagatgtattggaggccttggtaagacacgtgcttcagagggtgggagataaaccccacgatgattcagagtgtggggtcatggggaggattagggctcctgtgtagatatagagcatactgacatttacttaacccctactatatgtcataccttggaaatgtgtcccctgctctttgggaccctgacagagaaaactagagttargtgcccagaaagaggaagcccaacgtgtcacaagatgatttcaattacagcagttgtctcccttatctgcagtttcgctttccgaagttttggttactgttagtcaacggtggtgcaaaaacattaggtggaaagttccagagataaacaatttataagctttaagttgtatgctactctaagtagtgtgataaaatctcctgccatcctgctttgtcctgctccaratgtgaatcatccctttgtctagcatatccacactgtctatgccacatgctcattagtcacttaraagacaccttggttatcagattgactctcacagtatcgcagtgtttgtgtttaagaaacccttattctgcttaataatggccccaaagtgtaagagcagtgatgctggcatattgttataattgtccagttttattattagctactgctgttgatctctcactgtatctaatttataaattaaactttatcatgggtatgtatatataggataaaacatagtgtatacagagcttggtactattagaagattcaggcatccactggagtcttggaacatatctcccatggataaggggggaagtagtatattctaattctactgctttaattgtaggtagtattctcttaaaatctaaatgatatacaacgccagttctctacaagaaaatcataacattgcttgctgtcattgggtggtatggaaatgatcttttgcctagagtttataaagaatcttttacttaatgagctaaatgaccatgaataatacatttaaattatgacatacttttcctatttaccatttgcttttgttcttttataccataagaaattaatgaggctgagagtcttaaactgtgttttatgtatttaaaataattatgattaagggtcttttacacatgtgtatttatcatkaattcttgttcaaagaactattttttatggttcaagaagcaaaattaatttaaatcagcagctaatgcacagttctcaattccatgagtcaactggatactgctgacatttttatatggagcctcctttaatgtaataaaaagtatggcactaaatggtgtctgatatgggaaggggtagaatactcattgtctgaaacccacatggcgatgttctgggtcatgtcgtgagccataggtagcactccgttggcttcatgttctctattgtcttatagttgactcgtagtgacaatggaatggtgtcatcagttgctaatttttacattcatatgttgcaaaactaaggtggctaatccatgaatgcgcatgcctgtcattctctatcagaatagcaaataaaattcattattgcatgctcagaatccctaacataagccagtaaaagcattacaaggaacttgccttcagtgctgtatacatgtactgtgagcttgcatttggtctgagtattcaggactccagggctcagcctctaacagggctggattccttagcagagtaagagcttacggctctgtgcagctctctctgtgcatctgctggcagccaggtgctccttgtaggacagagtatgtaattatgaatattttaaatgtgggtagttgatcccttttctattcagcatgtagctgtgagtgaagcggcagacaatggccagaatactctttgtgtttgcctgaatttatctgagaatactgaagtaaagagccaaagggctctattctccccttcccagatacacagggaagaacagaatccagtctttgtctgggtggttaatttttaaaatgatatgtgaaggataatgcatgaataactaacagccctggggggctcaggaaaattgtatttcaccaggaggaacaaatatatgctgtttttgaaatggaagggctatactaaggattcagatatgaagaagtagatttttgataagaagatattgagatacataaaactggtatcagaggcagcaaggaatgtaataaaaatattctggctttgagccccagatgtgccactcactgactatgcgatgttggactttaggtcatctctccaagccttagttttctcatcaccataatagggagattaggccagattatctccctagtttcttcttagtcgacttacctgtgatcctgtgacatgctctcttaagataaatgtgcactcacacctcttttcaaggtgtgatcgctaaggagtgactgctacagctcaagaaakacttttgttgagtgcctaatgttgagccaacacaggatcaagcagtaagggtataagcaaaaaaagttatcaactgtactggtggtgctgagatgaagaagaggcctgaaacagaggacaaattgggagctgtagagtatgagcttagagaacatcagatgggagacgtcagtgtagttgcacaagcatgaggatgagatttgaacgaaaatgtgagctgagctttagaggatagataggatttgggtaggttaaaaaaaaaaagaatagatcattcctggttggaggctgaatcagtcaggttccttgtaggaaacagatgattcaatcaaactgggtactgagaagagtttagtaaagagatcatttacacaggtgttgccagggctgaggaaaaccaacacaggtggtgctgtaccctgggctagtgacagtggtgagccatgaccaccctgaaatagcaaggggtaggcgtggggaccacaaccagacctgactgtctgaagggaggagaagccttcagtagaaggattgttggagaccaacagattgcacactggcaagcaggaatcggggaaaaaaatgcccaaatatctttcttccctctccttgtattagtctgttctcacactgctactaaagacatacttgagactgagtaatttatcaaggaaagagatttaattgactcacaattccacrtggctgggggggcctcaaaatcatggtggaaggcagatgaggagcaaagtcatgtcttacatggtggcaggcaagaggacttgtgcaggggaactcccattttatcaaactatcagagctcatgagacttattgactagtagaacagtaagggggaaactgcctccgtgattcaattatctccgcctggcccacccctgacatgtggggataattacaattcaaggtgagatttgggtgggaacacagccaaaccacatcactccttcaatttttttctggtagatagtgaaggtcagcacctgtgggaaaggatgaaaaatgggtctgaagaagcaaatggaagaactcagcagagcaggagatgtgaatgctcacagagatacagctagagaccagcatgaatggtggaagtctcttggtagagtcttgcaagttgggaagagaaatcacacatgttccgcccctgagcagtgtccccttgattgcagcaccgtattagattgctgcaggagtgtgggtgtgtgtgaaagagcttgcagaacaccccctaacattcctggccatggtgagggtgcccacgatgcccacccatccaaacgtttcctttgtggagagacaaacttaaatagctcctctcttctcattcttacctccaatctcagcagccaagtacgtgttaaagagggagggaatactggagcctcagcaaataatgatacaagtagaactcttgcttttcacatgagaactcaccctggtaggcctccaatgctccatttcacaccttgctgtcatccatctagaacttgccttctcttggcttgtcctggcacaccaggtacctgccattactctttaattggtctgcttttccttccttattcttccttctgatttcctaattaaaaaaaaaactaatctcaactatgggaaaaggggaaatgtcaaatacaaagtttaccttcttcatgattttgctctgggccattaaaactaagtggggttgtagatcctttcttcagaaaggcattgagatgactgtaaaatggctcatttgtctggaaagtagtaaatgtagtagtatataaaaacataaaatgatgtagaagacttctttactccttgttgcccctttaatctagtaataactcacgggggaatatgtggtgttcttatgaatataagaagctcatcttaagcataagaacctcatattaagaatttttyggcatgcaaatataagaacccaatgcaatcttttacacaggattgattttggtttttgttaagaatttgcaacttccagaatatattttggaatcagtataattaattcccatgtcttacatctcttttcatatttctaaaagtctatactttctygagaatatgtataatgaggcacaatactcttcactgtctgtattgtactctacttatcaagcctagaaatgggctaaatgttaaatatgtatgtttcaggttatacagaactcaataatgtcagttaattgagaaatttcttactttgtccttttaattcattgaaataaaactcatgctttgcttatctggaggttttaaaagttagattgtgcaaaactcattgtcttagtctattcctgttgctattgcaaaatacttsagactgggtgatatataataacagaaacctacttctcacagtttttgaggctgggaagtccaagattaaggttctgacagatttggtgtctggtgaggacttgctctctgcttccaagaccatgtctgttgctgcttcttctggaggtgacagatgctatgttctcacgtggtagaagagagaagaggtgcaaggaccaagcagctctctgaagcctgttttataaggatatttatcccattcacgaatgcagatcccccatggcctaatcacctcctgaagtccctacctcttaataccatcaccttggggtttacattccaacatatgaaccttggaggggacgcatatatttaaaccatggcattaattaatgcagttcttttattgtcctaaaagattgagttaataccaatagatgaaagttaattcaaacgaagctgtctcaaataaagtaagatgataactggagggattcaagtagaagctgactgttcttggctgttgtgaaatgagaggattcagctatttatgaaaagatctggcttcaagggcttctaagccctgagttctcagactacctgaaaactgaaactgataagctcactcacaaatactcagagaaacatggtacctggtatggaaaagaatctgttttttcaagaatctttttgttttctaaaagattatttggcactttacttagaaatttttatagaaaatcattttgattttataaacttcttacttctcaccctggcattgtcatcttgatcaaatataacttttttatattggggtctttttattattaaatcctatttgtatcagaatggcttgatctcgatatttagtactaatccaaaatattgctttgttttttcttacttcccctacctcaataaccagaaatattgtatatttttaaggcctttttgtatgttcctccccacacatttcagtaaatcattattgtctagacaccaagaggaagtcagaaaacattgctggaagtgaaaattctttagggattttcattcaatactagggcaattaaatcggacatattattgatcaatagagagtactttctttactatctgcatacatagcagtcacatcattaaccatcaagctgacgtttaagttcaaggccacataaaccaaaaaagcactgttttgtacatagctacctgatctgtctttggaaaatacttaacactttacttagaaaatgaaatattacattctatattaaagccacaattaatatagtatgttgtgattatctacatatttctgattcctaaattatatggcagaaacaaaattatcaaagtataactactctgctcatttaatcagaagatgtaggcctaaaaatgtgttccttatggaattcaaatctgccatagcttaagggaaaccatgctgaaggacagtgggtgtctgttcaaaggccaatatgggaaggctatgatgatgtctcagttcagtttacaatttatatatcctgtcagctttaagttagataatctttacaagtgtttatttgtggtggctacacattatttcaaaatttgtgcctaatgggaagctgtgttaatattattaaaattgcactgttctcaaaccacacaatttaatactgtgtgcaattcaaatttatatttgcacttataatgccactttattgcattgagagcacttccagcttgacattttaaggaggktttcacactggcctgcccaggttgtctgtacactgttgaactgatgggggtgaggggaatgaggaaagyagcaaagatagtgaagcttgattgacttatttaagaaaagacttattgccactaagagtgaggtgtgcctatgtgtgtggacctgtagttagaacaaacagtgacagagggacagagaaggagaaagagacccagagagaaagcagggtgtcaaggcaggagaatcacaaccacagcaggtgggctggagtcaaaaaagaatgaaggccagacacagtggctcacacctgtaatcccagtactttgggaaagtgaagcaggtggattgcctgagctcaggagtttgagaccgggctgggcaacacggtgaaacccggtctctaccaaaaatacaaaaaataagccaggcatgatagtgtacgcctgtggtcccagctactcrggaggttgaggtgggaggatcgcttgaacctgataggttgctgtgagctgagatcacgcccctgcactccaacctagtgagacgccatctccaaaaaaaaaaaaaaaaaaawawwatatatatatatatatataatgaagacaaaaaagagatgccacgtggtagtagtttcaggctaggatttcctttttgcctccttttacaaggctgaagtaaaggtccatattattactattattttgtaatagactttatttttagagcagttgtagctttgcaggaaaattgagcactaagtacagagttcccatatacttcttgctcccctgctcccagcctaccccattatcaacattccccccacagagtggtacrtttgttacaattgatgaacctacattgacacattatcatgtcaagttcatcgttaacattcgggttcactcttggtgttgtacagtccatgggttttgacaaatgcataatggtatgcagccaccaatatagtatcttacataatagttttacttacctaaaaatcatctgtgcactgcctattcattcctcctcatgttattttttgatgttgaatattttgggattgaattcccccttgctgatcttgagatgggcgaaagaaggcccacatactcaggtcctagttgtgggctgtttacccatgagtggcactgaggtttactatgaggcactcagaccactaagtctgtacttagatgacttgagaaagcttcacaatggctgtgtgcgaaggtctgaatgcctgggtcagggggagtagggaagcgggtgcaggaggagagctggggcacatgacacagggtcttggaaggtcctatttgtgcagagtagtcacaacagaaagctcatctggattccaggtttcacatgcctaggggcactgtggacattttctttacagcattctagtaattctgctccggtaaaaggccagagtcctccgatttcgctggactcagggaagaggcagcttttactacctctccaggcatttcacagaagagtcctgactcctgcacttactcagaaagcaacttataaggtaggaagtagagagaatctggccaaataaccactgtactttatgaatattcatgttccaatgtgacaaaaatgaaggctttgggggagctgaatcacgaatattagcacagcatatgactttggtgatagtctaagtggcagcatggtacaaacgctaacagaaggccccagagccgggcttcctgggtccagagtccaggtctgctgctttgtcatctgcatgattttgggcaggttacttcacttttctctgcctcaagtttttttcatcggcagaatgggggtaataatagtgcttgccttgtgagtattaaacaaagtaatgttttagtaatttggtagtgttttagtaacttagccatgttttagtaatgtgtatccctttggagattgtctagtgcacagtacgtgccatgacaatatttgttaaataaatattccaggccaggtgcagtggctcatgcctgttatcccaacactttgggaggctgaagcggatggatcacttgaggtcaggagttcgagaccagcctggccaacatggtgaaaccccgtatctactaaaaatataaaaattagccaggtgtcgtggcaggcatctgtaatcccagcaactcaggtggctgaggcaggagaattgattgaacccgggaggtggaagttgcagtgagccaagattgtgccacttcactccagcctgtgtgacggagcaagactccatctcaaataaataaaataaaaataaaaaataaatattccaacattgtcatttgacagatgaggaaacttctcttagacataatttatttcaaattttcacagggatttcaccagtctgactgtaaatccttaaagtttataaagtctctgatgccagaaattttgagatttttcttcttggcattgaatagggggagaggtccttccctatgaaatagtctcggcattcaaatccccaagttgtctcatccctggacaggactaccagaaacaagtaagagctctggcagatccaggcaggaaacacaggtgggtaagtgggagcttggggaaaggtgagtagggagctgggaggaggctgaggaaggcttcattatttcttctatgaagatccccagtgaacctccaggtggtgggggctacataaaaatatttaaggcagggaatcccctgtcccctcccacccttrtaatactatatcagatgtgttttgggagaatgcaaatcacccacattgtaaaaggctctgcaaaacttggtgcacactacaagtcacgctgggggagaggacagtgtgaacgctcagagcccctggagcatccagcaaggagcctggttttcctgcatggtctgtggaatctacctcattagtaagggtgaagccctggaaaccactggagcattgtcatctctgcatgacgtctctataattgtagtgacttagaaccggatgggccctgagcagtgctttttggtcagaagatagtaatgtgttgttacttagaactagatgtattgagaaatgtctctttcactccttcacttttttataactccctgtttaattgactgcattgaacatgcatctcatgacaagtatgtgatttctctaagtgatattacaaagcagaaaatgttaagattgaccccaaatgtgtgcttttatgttaacactgaaccttgcattttacaggaatgatgttgtccttgcagttttcaggatgctattaccttatctcacttgattgttatatataacctataaggtgaaatatgctactatatataaatgtacaattatatgatagatataactgtatatgtgatataatatatatgacataggcagattagtttcttattgccgttgtacagataaggcacctgaaagtcagagtgtatactatcacacaataaagggtaacattgcaaaaactcattcatttattcataaatgaattatttatttacttgttaaatatccatttgtgctattttactgggccaacactatctaagttctggagagacagcagagaacaagacagaagagaccccagttttcctggaacttatttttcagtaggggaaagataagcattaaaccaagcttgtccaacccatggcctgtgggatgcatgtgttccaaaattgctttgaatgcggcccaatagaaatttgtaaactttctttctgttttttttgagacagagtttcactcttgttgcccaggctggagtgcaatggtgagatcttggctcaccgcaacctctacctcccaggttcaagtgattctcctgcctcagcctcctgagtagctgggactacaggtgcccaccaccatgctcggctaatttttgtatttttagtagagatggggtttcactatattgggcaggctggtctcgaactcctgacctcatgatccacccacctcggcctcccaaagtgctgggattataggcgtgagccaccacacccggccataaatttgtaaactttcttaaaacattacaagattgtttttttttctcatcggctatcgttagtgttagtgtattttatgtgtggcccaagacaattcttcttcttccaatgtggcctagggaagccaaaagattggacacctctgcattaaacaaataactgaaagataatgtgagatagtaaacaatgttaagaagaaaataaaatagaacaacttttgatcaggttctgagggcggcttctgaggaggtaagtgacctgaggcttgagaaaagtcagaacagacatgtgaagacttgggactgagcaccccacatgaaagtcacagaaagtacaaaatcctgaagacaggacccaggaagacagcatggctggggtgtagtggatgaagatgttggggcttgggattttaccctacttacaagctcataaattagcctgttactatttcatggataccagaagatgacatgaggctcctgggttaggctcatagcacagccagcaatattgagcatcaggttttcctcagtttcatttgtctccaaagtcccaggagggcaacagatgggccaggtgggaggcatgtactcactgagatgtgtccagctgagaaacatcgagatcaggaatccactgctctatttatggcaagtgggaagcaagattgttctttttgtcttggagagagacgtaatctcatccaaccagcctgggtcaagggtggccagagtcttgcattttcgacgtacacagtgagaacaggcagcatgctcaggtccatggcagatcgcctctgccaacagggacagagcatgcagagaggcagatgtgggttgtgcaggacctgatgtggccctggctgggatttattcaggagtggcatgagccttcatttaccagttgctgtcattacaccagaatattcatggatacctgcaggcttcttactctgtgcagggagcagtcagggtcctggcaagaaactgatggaacattcaaacgattaactgaaagagtagtgaagggactacttacagaggcgtgggctgggtcaaaggcaccaataagtgagagcaagtgacttagggatcactgtcaccagaacccagagaacgtgaagccttggaagacagctgccaggtagctactgtcagccagacagtgaagcaaggaaaggaatgggggttgagtggagaggggtaaggcctcaaccactctttctcttccaaatactagtctctccttcccttattcccagtggacaagcgcaaccaagcctaaaggcaagtgctgttgcgaggtcgacatccaggaaccagaggagggcagagcaatccacagaatggatctggggtgactcatggaggaaaaccaacacacagtaccatttaattctttttaaaaagatggaaaattataccatacccagaattactaaattctaaatagagggtatattgcatttacatttgtaaaagaatgtttccccatgtatcttttaaaaattcattttaaagatatacaataaaaagtgtttaactctgtttttcaaaaataatttgtttataaaattggactgactcaccctcttatatacaaggtgttaaaggcatttgtgtttgtttggtttacactccggaaggagccctggcctaagggacaggaaaagtagattccagtcccaaatttgtcattaactggttgtaaatgacagggttgtcaataagctctgaacctctttccagttaactgctatgtttgaatactgcatatgatcaagaaagcagaactttctctctgttatgggaaagttgggttggctgaactttgtaattagctttgcctttactgtttggtttttagtagagttttttgtttttttttttttagttctgatttaatcaagattcttccttaygactcccccgctccacccccagaattctggtttattcagatttctctatatcttggtcaaaacaaatccagattcacacatgaaacaagttcctaatcttttttaatgttcaaaggtgatatacgatattgaagatatacagagtgattgacataaatccctacttttcctgttagaatcaaaacatgatacgatcattatagctctttggcctgacaccatctatatgcccaatacaattacgagctgtccacatgcatgattattgtctggaccagtgcattctgctaggatggtgtggccatgttgtttatgttcacatactgatgctactgaaactagggacctaaagatccatttaaattcagatccctagaaaactttgagaaacaattggttttatcaggtttctaatgtttattttaaaaatgagcttctcacagccacagcaatatttaaaggcagggtatctcatgcaagtcatttgtcctatgatgacatgtggaagtattatcattattaactatttcttcaaaggacaaatacagacatagatttagatatacacatacatgtttctgtttattgctttggttaggtttattaagtgacctgattttcacaccaagactcttggaagaatcatagtatgatacagctgaataaaaggacttcggggttaactggcctaattcctctgtttggcaggctaggaatctgaagtcatggaggctgggactcccaaggtaacacagctaggtggtctagaatccaaatctcctaactcgcagggagtgctctttcttaaaattaaaaaaaaaggaagacaaatgttttcacaaataatacctatatgaatttttgttacaaaaaaaaaaacaacaaatgataaggaaaaagccatagttttccttgaccaccatcctaatcccagtattttcaccagaattaagcacatttatcaattggtgtatctactctggactttttgatgagtgctgcacacacacatacatatgtgtatatatatatatacacacacaaatatatatacacatataatacatatatattacacacacatacacagatttacatgtagaaatgtacatttagaaatgtatggctttgttttgtagtttcttttttaaaaacaaatattacactgtacattttgttcttcagtgtttttctggatccacacatatctaccccattcttttaaactctaggttaattttttgtaatatggtaagccatggtagatgatggacagttagcttgttttcattttccctccagtacaaacaatgttttgacacagtgcttctcaaaattttgtgagcatcagaatcccctgaggggcttgttaaaatagatttttggggcccatctccacatactctgattaatttgttctgagatgaaacccctaccccatttcctacaagctttcaggggatgcgtatgctagtggtccaagaaccttactttgagttgtgcagctgttatgggtatcaatgcatagacttcttgtatacttgtgaatggttttgcatgggagccagtgggagggaaggatttgctgggagatgcggtgtgtgcattttaaatttatggatactaagaaattatcctccaaagtggctatactgattacaatcaccccagcagtgtatgaagtatgagggtctttgtttccccagttcttttttttttttttttggtgggaatggcctcttgcttttccctgaccactaatgagttttatcataatttcttaactatacagggcacctgaatctccaattctatgaattgcatatccataccctgagtgtgttttaaaaataagttatttgtttgttttctcatttatttatagcaattttaaaataaatatttcatatattaaacccttgcctgttttatatgtctgaaaattttttttttccagttctctttcctctatacaacgtagttattacttccctcctaattttataatgttacctgaatggtactggtccctctgaggatcataaaaattccagaataaaacattattttccttttggacccccagctcacaccctgtgcctgttttgctgaatgttggctagtgatcagcgaattgtgaggaactcaagaaaaggaataggttggagacttccccagccccctttagccaaggatattccactgtggaggagcaccccaaatgaattaaggaataagactcacatatggaattgaaataaagcaacctccattttgtcaaaaaggaatttctgtaagctcctgagtaaaagttcttctaagccactttgacataggattattctcttttgacatattataaacattaaagaaaatttaatgcccatctggacagttagtttttgccaattgctaccaccaccagctgcaaaactacactgactacaagccatccagctgccatgcatactccatgccaagagagagcaagctgccaacactgcttcaagtggctgggctggtttgcagccaggatttgagggaggatgtgcagtgaaacacaggagtcaggactaggattttcaatgagtgttatttgtgtttgcttttttttctggtcatctactgtgggaggctgctggggacaccatccctttcctggaaatggcagcaaaacatgttgatccttcttcctctgccttttatgtactttctggcatcctttgcattcacattctgcttacacgccatcattagctggaaccgcctggagctgcagaaaatggtgtcatctctccaagactgggtttccccagctcctaatctctctccccatctctagtggcacccctttccttggattttttttcctatttgtttggcatttattttctcacaaaatagcaaagagaaactgcttccccagctcgtgttttcctagaagggttcttatatttgtgtacttgggtccaagcactcctgtgttatggacttttcccctcaacaaagaggaggttcttcttccttccttttaggcacaaatcattttcctgtttaggaggtaaattctccattgacttctgtagtagattgcattagtgtttgccaattattctattttctttcctagtcgtgttctttgtgggaggttagattattcatgccctgcttgttgaagtcaggagaaaccatgtgattcactttggccaatataatgtgggcagaagtgatgtgtgtgactttcatgcagtagctttgagagccagcttatggtttgaaattcctctttccctgtgccagaagaacagccatgtccagatggagactgctccatcagtctgggctctggaatgaagaggacatggaacagggctgcagctgaccctggatgcatgtgcaacatgggtaaaaataaaactgagttgttgaaagccagggggatatttggaagtatttgttactgcagcataacctaacctattgtgaccgatacaacctcctttcctttgtacacctacaataaaatatctaatcaacatattgagactacatagtagaacatgaaatgggagatttaggaaagttatcctgaaaactaggcagtgctgcttgcctgctaatgtgtatttggccaggttaacataggactttagagtgtgaaaaattatagggatctttgagctcttctaattaagtcactgtgttttgcagttgaggaaattgaggctcaaaatgtgaagtgaaactcttcagtcagcccgctggctggtggaagaaaatggcccagagaggaggatgccaggctcccacccccacgccctttcacccacaccttctcctgaagtgttagcttagttagcgttgaagaaaagattcataaataaattgagaagattcttaaataaaattgttctatcactttatttaaagtatgtctcacaagcttaataatattttcacctatccactttaaaatccagattgtctctcattacctgcactactgttcatgttgaggacacctcatattaccccaatgaaatgcatatttaaagaagtaaatttactataaaagacaagtataagacttttcttttagtcactgttccaacatacccatattcataaacctcttcattttaccacacagttgagagttgactctatgtaattatttttccaaatcagttaagcctaattttattttagaacatgtaaagtggtcaggtcacttcccagagagccctcttattctgtatattattactgcttcataataacagaagctaatatttatatcatacttaccgttagcaaagtgctgttcaaatgctttacatctctttaaatgcttaatcctcgcagcaaacatgtattatcatcccttatttatagatgaggaaatggtggcacagaaaagttcagtaatttacccaagttcataccattagggagtggcaaagctgggatttgaacctgggcagcataggtatactgctcctggaatgaccgtaacgatgataataataaaagtaacaatagcagcagcaaccaccatgcacgtattaagatactgctgtgtatagggaatatgtaccattttgtgttcatcatttgtaatccctaaactatatgttttattgatttagaaaactgaggcttaaagacataaaatgacttgcccaagatcacataaatggtgaacctagagttcaaggctagatgcatctgctctccaagtctggccttccctcaccttgccattctgcctttcatgtcttctccacaagaatgcagtgagacagactgaaggagctgcttttagctgagcaaatttgtattgctttatgtatcaaatacactgggtagcttaatagtgaggtccctgtcaatggaaatgtagactctaaacagaacagatagatacctacttatcaagccagtgatgaaggggatacaggcatcagatgggcatatgaaccaagtacccagtaatgtccactcttgccttaaggctacaatccttactgcctttctctggaagagttgcaatcatttctcctcttttggagatgtgaaattgaggttcagagcagcagagtgcttcaggctgcttaactctgaagttagttgtggggctcgtagtaaaacttgggtcctttaactcagagattacactctatatgatggatttcacagttttgaccatctgctaaagtcatttgcagagatttccaaagcttgactggaattttctaccgctaaaagtgtttaaactgttattcaaaagaaatgttagaaacatatatatagtttaaaattatgtgtgtgttttactttttaattaacggcaactaaggaagcagctacagaaggataaggactcacttggtaaatcactgcataactaaactgcaaggcgcagtcatgaggttccgaagcccccaatctgtgaacaacgttcacaggattcactcttgtgggaagagtctgcccttgttttgacccccacacctctaggatgggagtgggtagaaaagtttaaagccctggagactctctaggaaacaacttgtatcagttaggatatggcttaaaataacgacttaaataagatggaagttc

SEQ ID NO: 96364 - DNA, 41299 bp, Homo sapiens
  misc_feature (1)...(41299): n = A,T,C or G
ggctgccgtgcacaagtgtggtggctactgctgctcaccatggcccacagggtcacagggaggaggctgaggcagcagcagcccttgctgccaggtgccttgagacatttgggaccacctcctttccttagacagcctcccctccacctgccagaccttgaggagaccctggagccaacagccctcaatatacccgatgggagctgcttgcttcctctgggaaggcactgtgagccccaccgacccctctccagctcgccctgcacacaggctgactcctccaaaactgagagactttcagggccaggctgtccatccctggtccctcaataaaggactgagcaaacactagcctgtggagttgggtgggcatggggcaccggaggcatctgcctccccccaggaggccactgcagctcagcccttctgtgccctgggcccctcctcaccgcaccccccccaccacaccatccggggcagaggaaacacaggaggctacagcacagagcctttttaattttttctgtgctatgcacagaagctgtatgaggacagatgtgtgccttctttttttttttttttgagatggagtcccgctctgtcacccaggctggagtgcaatggcgcgatctcagctcactgcaagccccgcctcctgggttcacgccgttctcctgcctcagcctcgcaagtagctgggactacaggcacccaccaccacgtccagctagttttttgtattttttaatatagacggggtttcaccatgttagccaggatggtctcaatctcctgacctcctgatctcgtgatccgcccacctcagcctcccaaagtgctgggattacaggcgtgagccaccacgaccagccccagctgtgtgccttcttatggccacaccaggaggcactatggtccgggcacacatcaggccctccagaccctgcagcacttctcacagctgctgctgtggggcctccagcatcttgggccaaataccagatcttccagggtggggccagtgggcctgctgggtcttggcggctctcagaaccagggaagcaggggtggccctgcctgccgtgggagctccggacacgatctgtggccagggtctgagtgactgagcgtggccaggtcggctctgcttctgcaactcctcgtgtgcttatgagtggacgccctgccctgccttacttcagggacccctcacgccctgccccctgcctcactgcagggaccactctgctcccaattgtccacccagagaccctccacagcggccacctgaccactggctttcaatggaactctctcccgcgataggccgagggccttggtgacctccagctcactcagtctcagggagccccagggtttcagcacatccttctagagtctttccagctgcacccatgaggctggggccaggtgaagacagagaagcatccaggagcccacatctaaggaggcccccactcccagcgccatccgaatgcaggtaggtcttaaaaaggaatgcctcagggccaggcgcggtggctcaagcctgtaatcccagcacttcgggaggctgagatgggaggatggcttgagcccgtgagttccagactagcttgggcaatacggcgagaccctgtctctactaaaaccttaaaaagaaaaaaaaaaaaaagccaggtctggtggtgcaagcctgtagtcccagtgactcagctgaggtgactggatcacttgagcctgggaggcagaggctgcagcgagctgcaatcatagccctgcactccagcctgggcaacagagcgagaccttatctaaaaaacaaaaagtgcttccttaaattttgcacccaggtgccccctctggcctcaccctgatcctgaggcctccgtctacctgggttcgttctaacctgcgtgaccatcattctagcatttgtctggcacaggtcatgtggctgtgccttgttctcaggctcctcagccagctgggtggctcctggggctgtaatctcaccatctcagatgtcgagattacttttcatacttccttatcttgttaataaagatgggacaaaatcatagcttgtaaaaaactgggatgatggtgaacccagttctgaggcttcactttctgcttttgtttggttctccatgctgtcaaattctctgaagaggctgttgccctcctgagtcagctgcagcccagcaaggccctagaagagcctctgctggtggacagaggagctgctgcatgcagacgaggaagctgggctgagggccggcaccagggcacggggcagggaggctgcgggtcccgggtctcatgggtctcagttctatggaggtgcctgtcagtccaggtattcagtcccccaaccccgtctttgggtctcagtggtactggatccaggtgtacctttgggagaagctgttgagaagctggctgagggaggaccacccacgtgcacgcccatgctcttatgtggatccccgggatcataaccttgtggctgacacatttcctctccaaggctgtgctgtcctccacgacttgctgggtcccctcaaggcccttgcctgtgtgggtggggtgctcatgggaatgagggtcttgggaggggggggtgggaaatcaaacaacacagggatggggtagctgccacagtccccaccaatggggtctcctgggcagtgacccggcattctgcctccagtggctgcagtgggagtcctgatctcaggccagggaggggacgtgcaatggtggtccagacctggtcccattcctggccaggctcagtaaagttactggccagtttctgggcctcggtctcccccaggttattcagccttgagagttagtcaccatgcctgtgattctgcctcatcttcttgtgtcaaatagggagggtttttcttggcagaatggtggtaagactctgagccagaaggagactctcccagagaaggcagcagagagcaagagcaccagggccttctcaaggcctccgagagccagctgggcctgggcagtagatttgtgggagggtgccctgttgggactctgctgacagggagtcctcagggcttgtgtgagtgctctcaaagtcacaggatgggatgatcacctcctttctccaggccaggcagccagcgccggaaagctctgcagccccctgcgcggcctggagaagggcttccttccagttttaagtcagtgtttctgtctcattgccatgctcgcccccagtgctacgtcctgcaccaaccattgccacttcatactgaccaggtggaaccaaacactcacattccagttggctccccatccctccccagggagaacagatccacaggtggtgcacctgtgagtggagtggaggctggccacgggcctcatcacacctgccttccttgctcaaaagccctgcccagaacatgcctcggtcccaaaaaagggtacactgggccctaacccacatgcctcataatctttaagcagaaacagcaagcagattacgggacaggacagatcacgctagtaggattaagcttagaatatcccagataatcgcggatgcccctcccccaatgggggagttattccccttaacttctgaggattaaggggaataagaaaaagaagaagggctgggtgcagtggctcacaccagtaatcccagcactttgggaggccaaggcgggtggataacttgaggtcaggagttccagaccagcctgtccaatgtggtgaaaccccgtctctactaaaaatacaacaatcagccgggtgtggcagcacgcacctgtagtcctggctactcgggaggctgaggcagaattgcttgaacccgggaggtggaggtcgcagtgagccgagatcgcaccactgcactccaacctgggtgacagagcaagactcggtctaaaaaaaaaaaaaagaaaaaagaaaaagacggataaaagaagacagaaacatgggagtatttcctttgcacaagaatccaaggtctagaatgaagagatggtgaaatgaagccagcctccaggaaggtgcactgtgccttaatgggacctggggatgggaaggccaacacagaggtgtcagcgggacaaacacaaagtgtttctaacaagagcaaagatttccagtcttctctttatttccaaacactctgtaggtaaagcagagcctcagtaaacccaagaagcagaaaacctggcctcctgcctggggcagcttcagtttagacttttcttcattcctaacagcataaagaggctgtgcaaatgggaggcactcagcagagcctgaagaactctggggtcttagctcctgggaggccacacatgcttggtggcaccctgccggtcacggtgcctccaaaagctcccaatgatcagtggcctttcttttttttcttttttttcttagacagggtctcactctttgccaggctgcagtggcgggatcttggttcagtgcaacctctgcctcccaggtccagggagtcctcctatctcagcctcccaagtagctaagaccacaggcaagcaccaccacgcccggcaaattttttgtatttttagtagagctggggttttgccatattgtccgggctggtctcgaactcctggcctcaagtgatccacccgcctccgcctcccaaagtgctgggattacaagcaagagtcaccccactcggccagtgtggcccttcttcaggtcatcacttgccagccgcaggcggtggctctgcccctcaccggacacgacgtcacagccgggatgtgaacagcagattctgatctccaactccagacaatcactgatttacttctgcaaaccggagctgtccggtcttgcagggtcggaccatgtaaacaagcctgctgccaggcaactgaagacagaaacacgaataaagatgccccataaggaatgaaaaacaaaactcctcttgggaaacccagatttgggattcggaaacgggcttgagatcaacctgaagcttcatgacgtcttactgtttccactgcctttcctgttccactacagcaacgccctccacttcacgtgccaagtcctgactttctcctaatagttgccgacccagcaccccgtaggctgnnnnnnnnnnnnnnnnnnnnnnnnnnnnnnnnnnnnnnnnnnnnnnnnnnnnnnnnnnnnnnnnnnnnnnnnnnnnnnnnnnnnnnnnnnnnnnnnnnnnnnnnnnnnnnnnnnnnnnnnnnnnnnnnnnnnnnnnnnnnnnnnnnnnnnnnnnnnnnnnnnnnnnnnnnnnnnnnnnnnnnnnnnnnnnnnnnnnnnnnnnnnnnnnnnnnnnnnnnnnnnnnnnnnnnnnnnnnnnnnnnnnnnnnnnnnnnnnnnnnnnnnnnnnnnnnnnnnnnnnnnnnnnnnnnnnnnnnnnnnnnnnnnnnnnnnnnnnnnnnnnnnnnnnnnnnnnnnnnnnnnnnnnnnnnnnnnnnnnnnnnnnnnnnnnnnnnnnnnnnnnnnnnnnnnnnnnnnnnnnnnnnnnnnnnnnnnnnnnnnnnnnnnnnnnnnnnnnnnnnnnnnnnnnnnnnnnnnnnnnnnnnnnnnnnnnnnnnnnnnnnnnnnnnnnnnnnnnnnnnnnnnnnnnnnnnnnnnnnnnnnnnnnnnnnnnnnnnnnnnnnnnnnnnnnnnnnnnnnnnnnnnnnnnnnnnnnnnnnnnnnnnnnnnnnnnnnnnnnnnnnnnnnnnnnnnnnnnnnnnnnnnnnnnnnnnnnnnnnnnnnnnnnnnnnnnnnnnnnnnnnnnnnnnnnnnnnnnnnnnnnnnnnnnnnnnnnnnnnnnnnnnnnnnnnnnnnnnnnnnnnnnnnnnnnnnnnnnnnnnnnnnnnnnnnnnnnnnnnnnnnnnnnnnnnnnnnnnnnnnnnnnnnnnnnnnnnnnnnnnnnnnnnnnnnnnnnnnnnnnnnnnnnnnnnnnnnnnnnnnnnnnnnnnnnnnnnnnnnnnnnnnnntgcgggtggcggccggcgcccggtggggcatggcgggttcgcggggtgcggggcgcacggcggcgccgagcgtgcggccggagaagcggcggtctgagcccgaactggagcctgagcccgagccggaggtgactgtggcgatgcggggcggcggggcgcgtccctagagggcccggcgggcacgtggccgcgctggggcgggtgggcccggcttctgtcacctgggcgcccgcgcccagtgaatcggtcttgggcgtgggtgcagctcctctatcggggggtctcaggcagagcggactgcggggtaaaggacggcgtccgggaagcaaagaaacgggggagcggggagtggggacggggcgccccttgcagcagcctctccagccgttccatttgtgcatcctgccaataaaagggctcggcttgcgctcccagtaaatgcttaacctacgtatacgctagttaattgcgtttttatgctcatgggatagacatgagaataagaaaacctgaatagaacccagtgtctgctgcatttgctgtattagaactcactgttgctctctgctagctcagccctgtcttggttgtggggatcatcaaattgggtggtggaggggatggacagccagcccctcacagccccctcggccgcggccgckctgggttgttgaaactgccccattgctttgtgaagcgaattcaactcatcctggctcccatgggctgaatggcccgcaggccactctaggcgccaggttctgcgacttccacccttggactaaacggtcctcaggagccagttgtttgcgcccaggccacggatgccatttccactagttattgtgattgtgtagccgactgaataccaagacacatcatgactctgtgtgagagaggcattgtgtgaacactcggtatgcaatagctaatacatgcaggtcgtaccttaagtgagacttgtaaactattaggaaaacagtaaaatctagaattctgcattcaactgcttcctttttcttttcttttccttttctttcttttttcttttttttttttttgagacagagcctggctctgttgcccaggctagagtgcagtggtgcagtcttggctcactgcagcttccacctcctggctaactcagcctcctgagtagctgggattagaggtgcccgccaccaccagctaatttttgtatttttagtagagatggtttcaccatgttggccaggctggtcttgaactcctgacctcaggtgatccacccgcctcagcctcccaaagtgttgggattacaggagtgagccactgtgcctggccttcarctgcttcctaagagtctaagttcttgttccaccctttaaggccagtgaaggacccraacactgtgtgtgccggtgtcacgcagccagcagggctctgctcagaggcagctgtggtcctgctcagagagaggagtgggtgggttggtgcgtggttgcggttagagtctctatcattcctgtgactcttcagccaatcctttcaatttactgatcaatcgttggtcccaatctggttaaatgaggaggcgtctgcttcaggtggtaaaagccctttggggacccatttctcttccagcccccagccccttttctagtgacctcttggctctggggccttggatgccagggtgaggtgtggagagggctcaggcaggctgtctgagggacccagtggagtccagcccagcctgaccccacagggcctccggagtgtcagtgggtggtagagagcagtgttagttttgcgatgagagctgagctccaagaggaggaggttgtccttgaaaagccccttccctgtgaggtgctaggaattaaaatgtcgatggcaaaggcaagaggctgtcttgtcagtggaggtagaagatgaggaaggctcaggttgggtggatgcttttggtggaagtttgtgactggaggggtgtggtcctggaggccacatggagctgctggtgggtggctggaggggcgagaggcagctctccctgcagtgttcagtgccccatgcctggaggggcagttgtcaccaacccagtgtttccttgcagccccccctcctctgcacctctcctctcagccacagcaccggcagcgattctggcgtctccgacagcgaggagagtgtgttctcaggcctggaagattccggcagtgacagcagtgaggatgatgacgaaggcgacgaggagggagaggacggagcccttgatgacgagggccacagtgggattaaaaagaccactgaggagcaggtgcaggtgggtgagcgaggagccccctcgagggctgtcccccatgtgcaggtggccttgggctttctgagactgccactgtactgccttctccaccgtccctcagaaccccaaggccggcgtccctccttcactgcacctggggcacgcttgggctctaggacgctggtttccatccccagttgcgtgccgttcccaggaactctgaaaatccacatgcctaggcccttccccgtcagacgatgctcgggcaaccctcctggcaacaggttgggtttccttgaggtggggattttactgcttggaatccagtggcaggacccagctgaggagggagctgagcagcatggcagggctcaagcaggcggcatgggggccccaacggaacccagctgggcctgaccccacagggcttcaggggcctgagcagccgacgggtagagggtttaacattgtacctgttgcagcgatggtgggggaggatgcaccctactcttattgagaacaacaggagaaaagcataatttaactaaaacacagcatttgttatttttttttattttttatttttttgagacagagtcttactctgtcgcccaggctggagtgcagtggtgtgatcttggctcactgcaagtaattctcctgcctcagcctctctagtagctgggattacaggtacatgccatcacgcccggctaatttttgtacttttagtagagacagggttttgccgtgttggccaggctggtctcgatttcctgacctcaggtgagccaccacgcccggcctattttttttttttttttctaagacagagtcttgctctgttgcccaggctggagtgcagtggggcgatcttggctcactgcatcttccacctcctgggttcaaacaattctcctgtctcagcctcctgagtagctgggattacaggtgcccactaccaggctcggctaatttttttttgtatgtttagtagtgacggggtttcaccatgttggccaggctggtctcgaactcctgacctcaagtgatctgcctgccttggcctcccaaagtgctgggattacaggtgtgagccaccgcgcccagcccagcatttgttactctaaacattctggaaatcgtttgtaaggatttactctcccagtagtttcggtgttctggaagttacggccttggcagaggtccccgtgatagaagccaaggaaccatggcttgttcattgtgtgctagctgtgttgggttggcttgtttgctgggaagaaaagatttaaaatcacacttaattcaggctttaattataccactaacatacacagagaaaaaatgatgtgctgtgttggcagtggtttgtaagattatggacaactacgttaccccttcttgagtttttaaaatgatacaatactgggccaggcacagtggctcatacctgtaatcccagcagctcgagaggccaaagtgggaggatctcctgagcccaggaatccaggtcacagtgagctatgatagagccactgcactccagcctgggtgacaagcaagaccctgtttcaaaaaaaaattatgagataaaacatcctggaaaataatgtagatattgtagcagcaccattcagtagggtggaagctcccactcagggccctcacacctaacccgtgagcacagttagtggtctggtgtacatctttctgggtcttctgtccctttttaaattaaggatttacacatttacatgttaatgatttttttattaaattctttcagcgggcgtggtggctcacgcctgtaatcccagcactttgggaggctaaggtggatggatcacctgagctcaggagttcaagaccagcctggctaacatggtgaaaccctgtctctactaaaaatataaaaattagctgggcgtggtggcgcgtgcctgtaatcccagctactcgggaggctgaggcgttagaatcacttgaacctgggaggcggaggttgcagtgagccgagatctcaccactgcactccagyctgggtgacagagtgaggctctgcctcaaaaaccaaaacaatgttttcgcataataacatatccaagtacttgaaaggtactagaggtgtctgcggagtctagggaggcgccatcttctcttctcgctgcttgtctcctggcccctggagcaccaggtcctctgcactgctgagtgtgtgcttgtcctgcccattgccctgctcgggtttctgtgactgcgtaactggctgccccatgcaggrtgtttyccaaagtaccgctgtctgtggtctgtgtgctccgtcatccagcagggcctgaggtggcaaggccggccgggctggtggggcggtcctcagagttccccacgctgctggctgcccaagtccctgcctgaggccctgccctgttgtggcgctcatgcacctgcccgcrtgtcctgtgctttagctgaggggccgaggccctgccctgccatggcgcccgtgcatctgcccgcgtgtcctgtgctttagctgggaggccgaggccctgccctgccgtggcgcccatgcacctgcccgcgtgtcctgtgctttagctgaggggccgaggccctgccctgccgtggcgcccatgcacctgcccgcrtgtcctgtgctttagctgaggggctgaggccctgccctgccatggcgcccgtgcatctgcccgcgtgtcctgtgctttagctgaggggcaccttgggccctgtcagggtgttttcagttctaaagtgtgatcctcatgactgggtttaaattcttccaggtcaggagaatgaattgatgaggtgggggtgctttcagcttcttagtgggaacccctcccttttcccccctgttcatcagaagccacccaggcaccttggcctgctgagcggccactccctcctgcctgccctccgcgcccctcttgaatggtgggagtcctttcccattgtgcagccctgcaggtggaaactcagccggcagcccagtgctgcctcctgcatgttctcttggcttccatgagcgtggccacgtgaggcctcccagagtgccgccaagatggccccgtcatgcccagttagtggcctcaggttaggcctgtttctgtgtcatcccgaaggcagtccagggctccttacgcctgtatctcygccacctcccactcgcatcgtgggtccacggggccgggccaccaggggctctgccagacaccctcgcccgccacagccatctggaggattctgcccccgatgcccctgccagtggttgtgggtcctcaacccaagaacccttccgttgagcggcttctagaatcagtgccccttggttctgggaattcacaccacagtgacacagcagcttctcctgctgctaagtgtccttgccctgcagtgggcgcacctgggattctgtggtcctggccacggccactcgtgtggtcttgcagatggttcatgggcctcggtgggttacttggtaagtgagggtaatgtctgcctggcagcccctgaaggacgagatgatgtttttgctaatttctcttctgccacgtgcttctgcctgtccccccactccctcctgtcgctgtttcctccacagtggttggcaagacgtggcccctgtggcctctgcctcgtgcrtctgaaggacatcccagccacagcatcacatcagactggaacagtggcgggatggggctgggcatcaggcagcatgcatgtgtcatgtcacggacacctcagggacacacgaagtcaggcagggcgagggcctcactccccaggccgcctagcccttggtgggtatacccggccccgatggtgctgtgaagaaggggctgtgtgactggcatgggagggagctgcggcttttgttcatctctgccatcctggcagcgatgtggctgatgggtcaccttcagagagcctcctccataaatctgattccaagtgtgtgccccaaaccaacccagaccggcccggggcgtcctgcggagagccccacagtgggaggcccttgtagcggggagcccggtgactgctgggggtcagctgctggcggcccctgtggagacctsgcgacctgccaagggctccggacctgcctgggtggacccagggtgggcgtgcttctggctgcagggccgggccacaggcttccctctggctttctgccctcaggcctttagcattgacatgcacacgaccctgcctcctttmtaaggactgtgtagaattacgtggcattcagtgagcagctgcacgtggtgttctagggcacctttggatgctcaggtgctcctgaggggtgtgccagggaacgagtctcctacccttccctcctggctcctgttgctgcatccaggcaactactgtttccagtgctgaagtctctttccaggatgttctagacatatccaaactcgcacagagtttttgaatggtggtttcttaagagaaggggcagccgtgcgctgtctcaggatggttctgtcagggaggccatggctctggtttgtacagtgcttggtgcccgtagagtgcctggcagctcggcctcaacagctccagtgggtgggcagttgcaggcttttgctcttacagttgacctgacagtaacatgctgtttctcacatgtgcacaccattcttggggmaaattccaagagaatttctaggtcaaaggataaatgcttttttttgtttgagacagggtctcactctgtcactcaggctggagggcagtggtgcgatgttggctcaccaaaayctcaacttcctgggctcaagggatcctcctacctcagcctccctggtagctgggactacagggtccccgccaccatgcctggctagttttgttttgttttgttttgttttgttttttgagacagagtctcgctctgtcgcccaggctggagtacggtggtgcaatctcggctcactgcaacctccacctcctgggttcaagtgattctcccgcctcagcctcctgagtagccgggattacaggcgcccgtcatcacgcccggctaatgtctgtatttttaggagagacgggtttcaccatgttggctgagctggtctcgaactcctgacctcaggtaatccacctgtctkggcctcctgaagtgctgggatgacaggcgtgagccgccgcacctggccatcaatgcatttaattgtgaaggtgcttggagcgtccctccgctaggcggtgatgccatgcactactgcagccgcccctcagctgctttcccrccaccagcctccctcatggtgttgctgcttcatcttttcctcttgtttagtgatgtttttctttcattaagaatgaggctcgcacagctgggcttaactgaaaaaataaaaataaaaagaatgagtcacaggctgggcccagtggctcacacctgtaatcccagcactttgggaggccaaggcaggtggatctcttgagcccagaagttcaagaccagcctgtgccatataatgagaccccatttttacagaaaatttaaaaaatgagccaggcatggcggtgcgtgcccgtggtcccagtcccggaagcccttctgtctctttccctgtggcggcatcatccatgcacttagctggctggaaaccctcatggctgttgcccaagggcaggacagctagctggttcttgtcattttggtctgagctccctgggccaggagccctttgctgttttctctctgtttgtttgttttgttatctggcaccacaacaaactgccccaaaccatggagcctttcctttttttttttttttttttttttgagatggagtttttttgctcttatcgcccaggctggagtgcagtggcacaatctcggctcactgcaacttctgcctcctgggttcaagcgattctcgtgcctcaacctcctgagtagctgggattacagatgccagccaccacgctcgggtaattttttttttttttgtatttttagtagagagggagtgtcaccatgttggccaggctggtcttgaactcctgacctcaggtaatccacctgccttggcctcccaaagtgctgggattacaggcgtgagccaccgcacctggccaccatagtgcctttcaacaacgagcatttgctgtctgtgtttctggggtcaggagtcctggtgttttgtgaggtgcactcaaggagcagggtctggctgtgccctttgcagctcctcccctgactgttggcatgaggagctcaggagtgaaggtgaagaagggtactctgtgtctggggggtggtcagaggatagggatgaggacagggacagggcccaagaagatggggtgggtgctgtacctccctcttccttccctggggtatctgtgggccacggcagggcccacagctgttgctagtagcctscttggggccagtgggtttgatttatttttgtgtttgtgtggtttgagggcaggcatcccttccccaccctttgcgtccctgctacagtgacccctctttctgggtccacctgctctggcacgagcttggtgggccagcctcaccccagggcccaccccatctccagcctccctgccttgggcctggcagtcctgcctcttaattgcgttctgtgccacctgatgacccacgagttctgtctcctggcctggttcctactccctgggactttctgcagcccctgcccttccagctgttgactgtgtctgcgagccatcccactggaggggcgccctgggctgtgtgctccctgccctgcagcacccctgacacgggtgctcccagccctccactgaccagccagggaggaagctgcctcctgccggcctgtgcctcgcttcctgtcccctctccagcagcacacggcagcgcgggccgcgggctcaccggagcgaggactggttgcagggccttctctttatcgctggtgtctagtggatctgtggggtccgtgcgctcagagctgttttttcctttctgtgctcatttagattcatttttttcccagctttgcttggttttgtcttttcatttatgtgagtttttctttttattattttgtgcagaagtttctgtttttatcagtttaatctgcttgtcacagtcaagaatgtgagaaaagactggatgcggtgagccaaacctgtaatcccagcactttgggaggccaaggtgggcggatcacttgaggagttcgagaccagcccggccaacatggtgaaacctcatgtgaattgcttgagcctgggaggcggaagttagagtaagctgagatcatgccactgcctccatcctgggtgacagagtgagtgggactctgtcttgaaagaaaaaagcactagtaagagaaggcctaagacctagtattaaagtaagagaaggcctaagacctggtatgaaagtgagagaaggccaaagacctggtatkaaactgagggaaggccgaagacctggtattaaagtgagagaaggccaaagacctggtatgaaagtgagrgaaggccgaagacctggtattaaactgagggaaggcctaagacctggtattaaactgagagaaggccgaagacctggtattaaagtgagagaaggcctaagacctggtatgaaagtgagagaaggccgaagacctggtatgaaagtgagagaaggccgaagacctggtatgaaagtgagagaaggccgaagacctggtatgaaagtgagagaaggccgaagacctggtatgaaagtgagagaaggccgaagacctggtattaaagtgagagaaggccaaagacctggtattaaactgagagaaggcctaagacctggtatgaaagtgagagaaggccgaagacctggtattaaagtgatgattccagatttttttttttttctgagacaagagtctgtctgtcacccgggctggagtgcaatagcctgatctcagctcactgcagtctccaccccccagattcaagcagttctttctcctgcctcagcctcccgctgtgattacaggtgagcgccaccaagcccagctaattttttgtatttttagtagagacagggttttccatgtaggccagtctggtctcgaactcttaacctcaactgatcygcctgcctcggtctcccaaagtgctgggatgacaggtgtgagccactgggcccggccttcccagataatttaaggagagtttggcctgtgccggagcataatgcacactcttgggcaggggatcccgccagcgtctcagcgaaggctctgggaatggcaggtggcaggccgcgttgctgcagcgtgggaaccctgggctcgggccccctgtcgctgtggttctggggtctgggtgctggtgccgtctgctggagagtggtctggagctgcagctctgtggagtctgraaaggggctgcccagtgattctcaccagctagtcagtggtggagaagttgcctgggtgtggaccacagagctggggatggaaccaggggccagggctggtggtaaactccgctcttgcctctgcctgtggccttgctttgggttcttttgaagactgccagctccaagcttcttggcccccatgggggagtcaggcagctgttctgccacctgccctgacactttgcagcatcaaacagatattttgtagcattctggattcgaggggtcagagttcaggccgaaagcagcagggtcagtacaccctgagtacagtgtcatgctgaggggccggggagccccagagggttctggtacattccacctgaggaagatcgacactcagctcacatcctgtgctctgggacttgggtgaggatctcaggtgagcacagccgggcctcttgtgtgtccagaccgcccctgacagccatgttcacgaagggtacccctgtccagctgtcccctctcccagggctcagggctgcaaggacgtggtctcctgtgccaggcagagccacacggccttcacgacctcagcccagaatcctgtggtgtcagtgtgggctgcctcccttgggtgggtaaagcagccacaagcccacccagatttgcggcgggggggacatagactctgtctcttgatgcgatgaaaatcaaaggtttgtggccgtgttttaaaatggtcacagtcacccttacgcttgccaaatagtctcttcccccagcgctccccagaacctcattccactgccagggtctcatctaaaccaggcctgatagatgggggtccttgggcccctctctgcacagctgtctgcagtggggcaccgagtcacagtgctgtggagtggtctctggtctgtggtggtcctaaggtggctgagcacatggctggtggtggtcttggccatggtggtcttggcccgtggtggtcttggggcctgtggtggtcgtggcccatggtggttgtggcctgtgatcgtcagggcccatggtggtataggggacctgtggcagttgtggcctgtggtgatcgtggggcccatggtggtcttagggcctgtggcggtcgtggcacgcagtggtcttggggcctgtccttgagacccatgatggtcttgagacccgtggtggtcgtggcctgtggtggtcttgaggcccatgggggtcatggcccatggcggtcgtggcccgtgacggtcatggcccttggtggtcatggcccgtggtggtcttggggcctctggtggcagcacacatggccagtgcctcatgcagggttggcctccatgcctgggaacgaccctgccactcttgggctcctgccccgagttaccttccttttccctgagtaaaaagggatgtttttcggctgtattttctctgggcttttcagttcctgctgatgtactttctttaaaacaaaatgtgggtttcctaggtacctgttgatgagtcgttgctgtcacacgagccatcggcacagagctcttggatagcagcctgtctctgtgctgggcaccctgcggctagcgtgggcagggccctagggagccttggccgtgctgaggtgctgggtgtggggtctgtggtgcagcgctgggttgtcttggtgtccttggcaccccgacagcgatgttctggctctggtctctgggcaagttaggactgcttccctcctgctgtccacgtctccagcagaaccctcttgtgggcagccctgggagcagagttctcttcccaccgaaccgggacaccgcagctctgtcgccatcctctcccaggaggtgagggcagagcccgtgtctcatgcctggttggtggcagtggggcacggcctggctggcctgatgctggggaggggaggctctggtgtggtcacaatagggggctcatgcgcttggacaccgtttctgtctggctgagcccactgtgggtttctccctttggtcctcatggtgacattctagccctggggctgggcagaggccacgcagggttcagggactacagcagcctttccttggccccagcggccccgcatcctgctggcacctcgtccttgcgctccccctcggcggctccctgcccacccgtcggtccttcagacccgcctgcctctgcccagtggcgctcgcccgcccactctctcagcttttacttcaccctcacgcaactctcgtgctccatcgggcccgacccctcctcagtcaggccacgcacactgcgggtggtgctggagaccctggagaatccgggctgactccaggcatgggcgtggcgggagggggtcctgtccccaggagtccggagcgtggcgtgggctcatgttccgttgtctgtgtcgttagggttttggtggccttttcctctaatttttaagttaaaaaaaatacgttcaatgccccacagcatctgcctccaaaatctgaaggggccttctaggtcaggcagttcccagcagtggccgcccctgcctgcaccgcccctgcctgcaccgcccctgcctgcaccgcccctgcctgcaccgcccctgcccgcaccgcccctgcccttcgggcgctgggcctggctgagcgctgtcgccccctggtggactctgtgccccacagctgtcccacggggatgctgcgcccctgggaacccagcacctycgaaggccacctctgccccctgcccagagcctgcctgtgccgtggcctgtccacatccagcacaggggccacggggcacagagcgctgggtgacaagtcttttgtcacctgccaggaccctgggactgcggcccatgagcagcgaggctgggactccagcgtgcggtgcttcagcccckgccactgtgagggktcgggagcccagcccggtacccgtccgcagaggccaggcgggggcagccgaccgcagccgggtgtggaactgcccttgtgcgcgtctggggcttggggccggggtcacggatctgctgcggctgtgggggctcatgtgctccaggcaggggcaagagctccgtgtcactgagcgccccaggccactgtcagcagcagggggagacgtggaaactgaatccttccttgttcctggcctgggaaaaaacttagtctcccatctctctttatattgaaggaaaaaacaggcaggggaggagcccgggccggagagaagaggggctcggggtgggggcgggggcgtgcccgccttcgctctggggttcctgcgcccgagcactttactgcccccacgggtgagaggtgggcctgttttccccatcagccttggttccrccagtaaacccgatccggttggagccatcctcacctccgcagtcgagggcagaatctgttttccaggttgggatgtgaattctcagtggcgcccactctgtgacccggcgggatggggtcagcctgggctgtggacgtggtgggtgggagaacgctgggcaggccttctgagtgttcggggccctctctgggccctctgctggctggactgggcgggacgtggcccccgggatgggtggacaatgtgtgtcccccgccccttcaagagcattggccccagtgaccctgctgcgacggctgcgtctccttcttccccccgaccatgctgcccccgtcccaggcggggctcggcaggagcgccatgtggggcccctgggaggagtcctgtggctttgacatgaatgggggtrcgggtggttggcggtgggtcttggtcctcagctggcggctttgctcctgactgccccagtggcttccgtgtctagcctgacacccgtgtcagcccagggacagaggccccgggaggctgcartccagccctcacagaggacagggccgtgggcaggacctgcggcgccgggtgccagccacagcccccagaggcccccttagagctgggtgttctcggccttgtgctgaggcctgtgccaggctggagctgctcagagatttcggggtggtgggcttcctgggatccccccaaggtcaaagggtaccctgtatcccctgaagtraccattttctctctctctctgcaggccagcactccttgcccgaggacagagatggcgagcgcccggattggggatgagtatgcggaggacagctctgatgaggaggtaggactggggctgcttcccactgggcagggtggggcggcttccatcacagcctagcaggtgctgggggttggggctggggttgccctgggggtgctgggacctgccgcaggtgggccgcactgttggagccgaggcccacgtgggcgtcctgcttccccatctgcaagagcaatttcggggtctgggacacaagactgcaatgtatgtgtgtcatcatggcttgtgaaggggaaggacctgggtgtggctccatgcccctgtgtctggcctgtggacgggctctgggggctcctgtggcgtctgcagggtggctgtgggctccctgggcgtggcgtgcatggtctgggtgggggtcatggtcggggtgggggtcacgggcatgggtggtgcccctgtcgtgtgtgctgtggggtgggccacaggttggctgggggccaggcgggcagaacagggccagggccacctcctaatgtcctgatgttctgggcagtggtggcccttcccttcccctggggtccccctgccccccacccctggtggtggctgatgtgggctggggccgttgcctctggacctctgactgagtcccaggagcacatctcaggaggggcaggaggtcggctgtttctcataaggagcttgcaggcgaagggggatgcgtgctgctgggctgggctccaccagcgtggagaggctggcaccgggctgggctccgccagcgtggagaggctggcaccgggctgggttccgccagcgtggagaggctggcaccgggctgggttccgccggcgtggagaggctggcactgggctgtgtccaagagcagatttggctgcggggggctgccctcatttgggaggggctggaagctctgagaagctctgaagccagaggcagtgcctgcctataccctcctcagtgtggcctggccccagggtaggactgtggtcccagtggagcacctgggtgtgaggcagagtctcctttgggccctgggggctgtgggggaaggagaaggctttggtgtagggccttcctgaaggagctcttcctgcctgcctgtcaggaactgtccccggggggcctgggggagacacgcgcccccctccccccaggttcttcccccatccttcggctctcttggctgtggctgcaggagccttggccgcccgcccgatccggtctctgctgcgcgttcagagaacagagacaaaacaaaataaattggtttcctggccggagcagcgggctcactcagagcgggggggccacgccgcgcactccctgcctgtctcccctccccctcccaggggctctggctgtcggcagccacatcctgtcggctacttttttatatttggtattttgagaaatcgatgatgattgtaaacggagcgcggaggccgggggaggggcctcggcggggcctgtgggaccctgctgcccctgggggtgctttgccaggcctgtccagtgccaccgccgcctgccgggtgggcagccccctgctgtgctgggaggaagccggccagggatgtgggggctgcttcctccagtgatgactatcccatatgttggtctgagtgacagcgagggagcccgggtgctgcccggtgctcctgccagcacagccggccagtggctcgagggggcggcagagctcagctttcaggagccaggccaggcccggacagatgcctcccgtccagagaagtgcgcatctgcctgggcctctgttcccttggagcaaagtggggtggccctaggggagtgatttggggccacaggtgggcaggaaagaggcttgggaggtgggagacagcctgcagctctcccatgagacagtggggtgaggagagcagggcccgtcaggcagccccgtgtccttggaggtggccgtggcaccaggaccatggtcctcctcggcactgggcagagctggctgagagagggccgacctcactgccggggcccttcagggctgtggagagggcccctggtagcagggcagggagggcgccgctggggcgtgtgctcctgcgagcggcgatctcagctggagcgcgtgggtggcagtggctgtgatgctgagaaggtctcgggccaagctcctgctggtgggaggtgcctccctgccaccccctgcccacctacctccccttctcctcaggccacttccctgcccttcctgggtctggatccagggcctggacctggatgacactggggcttcagggaccccctgctggacgctgacttttgaagacctgagcagcccctcacaggagagctgtactccagctcttggtgtcttattcccctcccccaggtgcgcaggcagcagcgagcaggcggagggaggcgggcggagcccctggaggaggcgctgggcctggctggggtcctgccgccggcagtggggggcccccaggagccggctgagctgcggctgccccgcccccgcatggccacctcacccctctcccaccgcgcctggagcttcacagacgtgatctcatccagccgctgggacccccggggaggtgggccggggtggaggggcggggcaagggggctctcggcctttgccgaagcagcccctccgctttgatttgagcggttgggagaaactgaggccgggtggctgctcaggcagaggatgcagccacccaccctccccctgcctgtggccgtgtttgtcaggaaagcgtagcaggctgagggatctgggtggccgtccactctggccggaggagccgccctctgctgtccctttcctgtgccccgtggtgctggcctggggccgtcccccacgaggcctccactggggcctggagtctggggctgggtctggggtgcagcctggcagctcctcggtgcccctgaccctgcctgggctgtgagtcaggttcccgcagggatgcagccgggcctgtctgcgtccagagcccgtggtcccctctgctctcgcgccaagcgccgttaatggcttctcccagctactgaaccggcagctgcctccagtgctggcggcctccgctcctccgggccgcccccgcccccgcgtcctggccccgcgcactcaggcttgcgtcgctgctggcggcgcggcctcggctcaggtttcccggcgagcgaacggccctccccacgctgcttgtggagggcgcccgggcctgcagaccgccccaatctccctggcggccatccacccccgcggcctcctgcatgcctgcctccgagggggctgctgactgggctggggctggccctcgggtctggtccctttccactgaggagggaaacgggcgcgccctgctacccaggctgtgggtgggtgtgtgtagcctgactgccgcgtgccccttggccggcttgaaggccctcctaggcctggcctgctgcactcagttgtccggtttgggagaggagagaccctggggtcagtgatgaggggcagggaagccagggccctcatgggggtaccctgggctctcggatgaagcagggctgggcagtggctggtaggtgggagtggcctcttcagagccgcgtcctcctgcttgtgggctgcaagggtggtgggggccctggcctgctgtgcccactcggggccagtgtccttggcagctggaacccgggtgggcagcggggggtgctctacagggctcttgagcggaggctttgccctggggctggcagagcagcctgtggagtggagccggggaaggcattggagggcaaggtctgttgggcaggtggtgacggctgcaggctctgggccctctggggaggccggctggggagagctgggtctgggtgtacgtcccaaggccggggctgttctgcaggggacgggagtcccaggtacgtgtgtgtgcacggatcaggactgggggaaaagtctccagaatgagattttggaggtgtccggagttgggggctgagcgggtgtggacctctagagccctgtccccaccccacctggaagttgtagctctgagttgtggggctcagagcaggccgaggaggggtgagcactggtgggtgtcggtggggggtgtttggggtgtcatgccccaagcctgtgccccacccccagcatcctggtttctgggagcccctgcttatgagatgccaggcgttggggtgctctgcctgggaacagctattgtccctgggtcagccccagcagagaccgaggcaggccaggtctggaggaacccctgggtcggtagtggcttctctccagcctgcagacccccaggaggtgacttgctgccctcccagctgtggaggtgcaaggacccctgggtcagtagtggcttctctccagtggtggaggtgccgggagaaggccgagctgtgtgcccagcctctagaagggcagatgcgtggttggcgggagccgggccggagctgagggcgtctgggctggtggctcctcctgcctggggccccaccttgggctgggggttcgctcagctggtttggactttgaggaggaggagactaagcaggacctggctttctcccctctggccccggcgccrgggcccagcacccctgctggaaccttcagtagggtgagatgcagcaggtgagcctcccgccctggccttgccctgagcacttcaacagataaaaccctgaggaagaggaggcggcctcacgtcgcacaggaaggccgtgtggcgctccgagacaggcgggcgttttgtgcaggggagcggcgcgaacgctgaacactacccgcattgtaatcggagaggggctggggaagagagagacggagcgagggcggctgaccccacgctcccgggggacaggtgggagaggcggaacgaggagagagtgaaggattccagaggtgggccggcttcctctctcgcagacagacacgggaggaggcgggcagcgggccagccccatacctgcagttccaatctgtggtcctgacagctgcagccactttggggagggggagggaagggggctcatcgagagcggaaaaatcccagccgacacatcagccggttgcggcctgtgtccggtgcagtctgggctgggggcctgtccttggggctgggcggcccccaggagagccctgatgctgggtctgtgtgtgcccccggccggccggccggggctctccgtgcggggcctgacccggaggggtcacatgtgtttcctggcagcccgcaggtgctgcgctgggcggggcgggtggtgggcgcaggcgaccgtgatgaatcatgtgtcccgccagcagctcgttccccaggccggggacaggagctgacagctgaggcccagcagagcgtttccagcccagctcggctcgcaggggcggctgctggcccaaggtgcaggctggggccccttccgtcccagctgcctctgtggggcacaggcggagggagccctgggtctctgtggaggtgaggccagcactctgggaagggagccaggggctgtggtgggcagggagcacctgccactcgtctgcccggcggctgtgagctacgagtggattcgggtgggctgccgcaggcctgggggtcagcccacgccacccccggtctggtttgaatttctggagcagtggagggtgacggagtgttcctcccccgcccctcccctcttgctggctggcgggccgggccctcggccgctgctaccggtgcagctcagggagcggctgggctggctgcccaggcctgaggctggccaagctgcagccgcggtcggagtcaggcccgcagcggagggcttggctgtgagtgctgcaccccaaccagcagggccctggggatcctttcagctccgaggcctccaggtcgttgttccctgttcactttcttctagcctcgttagacaccccaaactctgaccccagtccacgggggctctgacrtctctttcccctgcactccctcttgaccctgcccagacctccccatgctggcccgcaccttcccacctgctcctgtctggcctcctgcattcccgctctgagctggctctgccctgtccttggtgccggccgccgacgccccgcacctgcccgctcaggccagcagcccctgatgtccctgccctggagactttcactatcttccatcccatttgtccccaacgttgacyggccactgaggttgggggttcatgtggaggtttgcaacccccactaggcccaggtctggaaatgggaggcctggaggtgaggggtaggtgggctatggaccctccctacagaactacacccagtgcccagtggagggagggctggcgtgggcgccgtgggccttagggtgctatgcagagtgcccggcctggccatgctcctgggtccaccctgctcctcactcaccagcgccttggtgcctgggagggtggcggggcgggggtgtgaggaaagctcccaagaagggaaggggctgcgtcagcccctagctgcatgtccgtgtcccccgggccctggcttcccggcgggcggaggcttctgcagtgactgagcttgtcctctcctcccctccctctggccagctgtgggctcctgcaggattagggagaggaaatttggggttgggtttctctctgaacgaaacctgccgttgtgactttttatcctgttatatttctatcagattggactcagcccccctctagcccttaatggctctggctttgagaatttcctccaaaattacaccactgcttcctgctccgccattccctggagcctgtctttgcagaggaggggcagtcctgggccagccctgcaccgatgcccacgtgggccacagcacctggtctccccccgagggtgcgtccctgcctgtgctagcggggaactggggccggccgccgccctgacgcccgcacctggcaccatcagccattgtccacccagccggaagttaggctgtggcctggcagggttggggggaggtggtccacacagcaccgcccttcttctctctgtgcccactgatctcacaccactcaatggtaattgtcacctgcagggttttaatggccagccagctgtgcacagagcactgtgggggctaaacccacctcctgtggtgggcggggtcttcagggggctggatgggccgtggtggtgggaggaggatggccaggggtcctccttcccacgtgggcagtgcttccaggggccaagtggcactggtgcatgaggagatgcccctctctccagtcaaggctcgtggaggcaggacacccactgccctcgctggggctgggagccccccctccgctgggcagcacagctcgctccactccttgtggccacctgcagcgccctcctcaccctcagggcccccgggtgcccgacaggcccgagtcgggggcacccttgccctgctgctgcctctgtccctgccgctgcctccctgtccctgccttacagcgtccctgccttgtgcctcgccctccccatcttctgccacgcagctcctcccccaccctctctcccggcgtggctcccttgtccccaccccacagcttcccgatatgaggctctgtgggtgagctaagcccatcctcaccgcctcagcccagggaggggtggccctgagcctggaaagtgggggcttcccagggagccggggtacttggcccaaggaggatgggaccaccaagggtgggaatggaggctcaggctgggggctgggggtggattctgaacctttcatgaggacagttggcctccatatttggaagatactgttttgtttttaattatacaaaattttcagactttatattatcatatcaaaaacacaagatgccatcacacagtggccggaagaaaagccagcgcagaaagttccagtgggcccgggcaggtgctggggccagcgcagagtcccgctgccggcgcctgtctgtacgtccgtctgtccctcggccccgctcgcagccagggctggcctgggggcatgcttgcggtgggccttgcccagctcaggtccaaggtgggggctgtctgcagtcaccccgggcgtccacctcccccagcagcgtctgcctcctggctgctgccggccacctcctaactgcgaatcgctgtctttctgtcgcggtccttgctctgcagaggggagggaggagtgtcaggccccggcagagcccagcgccagtctgcgcctctctggcctccctgctgggtgccatctcargtggccagcgccaaggcacctccttcccggctctccccagcttccctcaagcgttttggggaggggagcatactgctgcacagccgaaattgtaaaattaaatttcccagatgttcaggccccaggagctcgcgcgtgctgtctggagaggaaatggggattgggaaaagccgtgccgtattttctccctgctcaccctgcttttccggtgccaccaagcacagcaggagctgtaaatcacagctggccagcgtctcctgcaggggccctcacccccagcccccacatctcctgccagcctctgccttcgtgtcccatggcccacgtctcgggcagccctacaggacctggtgtcttggtgtgcggcctaggtgggggacggacagcaggtgcccaagatggcttaagccagtgctgggccgcaggggctaagaacccggggtccttcctctcttgccttgcagcctcttactttctgaactcagctgttttcactccgcctttcaacttactgaaaagggaagcttgcagcggcctggtccagctccccagcctccccgccctgggtgggcccctttggccatccctagctcttacccctcatgcagctccctgcaggggactccacactccactgggagccgagtgtcctagggacgccctsgagaggagccccaggagaaggccccagcccccggcaggcctgtgttacaggtgtgcctgcctgtgccctgttggggagccctgcccgtgtggcctcgcctcctctgcctggcaggtgtgggctgaggggcgcgttggaggcccccctcggcgccccacggcccgtgctcaccaactttctctggttgctgaggcagaaggtgcagatctgtttgggctgggtgttctcgccgtcgcgggcgggaggcggcgggggcggcggcggggggctgccggcgcgcgccgcgtggaagaaggcgggcccggagtggcagggctgtccgtcgccgcaggcctcgcccgccagcagcacgttgcccaggtgcgagatgtagctggaggccaggcgcagcgtctcaatcttggagagcttgcggtcggcgggctcggtggggatcagcgtgcgcagcgccgtgaaggccgtgttcacgctgttggtgcggtctcgctcgcgcgcgttcgccgtgtgccgctgccggggctcacggcctggccggccccctggccccccgcccccggcccgccggccccccgccctgccgccgggcgccctggaggccgcagcgcgccgcgtgcacgcgacagggnnnnnnnnnnnnnnnnnnnnnnnnnnnnnnnnnnnnnnnnnnnnnnnnnnnnnnnnnnnnnnnnnnnnnnnnnnnnnnnnnnnnnnnnnnnnnnnnnnnnnnnnnnnnnnnnnnnnnnnnnnnnnnnnnnnnnnnnnnnnnnnnnnnnnnnnnnnnnnnnnnnnnnnnnnnnnnnnnnnnnnnnnnnnnnnnnnnnnnnnnnnnnnnnnnnnnnnnnnnnnnnnnnnnnnnnnnnnnnnnnnnnnnnnnnnnnnnnnnnnnnnnnnnnnnnnnnnnnnnnnnnnnnnnnnnnnnnnnnnnnnnnnncgcacatgtgcgtcccgggccggacggggccccgactgcgcctttatagcggcgtcccggcccctcccccgcgcacgccccgcccctctcagcccgggaggctcctcgagcagcgcccgccgcgtccctcggccttctgtggccacgctttggcgggggtggggggggcggggctggtctttggggrcatcgttccgtctctggggatgcggaggaactgggaggtcgcttctgggctgtagttactcagggccccaaaactgcagtgccccccgtccccgggagaggggaggaacccaccaccccgttttctcccgtggcacaactgagttaacccagccgccctggccctgctgcctgaccgcaccctgtctgtctttgcctcccatgtgcgccagcgcctgcctgtgccaggccgtgtgcagggggcgggcacaggcgagtatttaggggcctagagctcagtctctccgcctgtctgtcctgcacctgcctctccaggcttggcacagactgtgccttctgctagctggccatgtcccctgttcttgtgctgtgtggacctctcaccccgtcggtctccttgccccttcctccttcccccgttcctctccagggccaccaggcccctcaggaagcacacacatacccccattatccaatttggggatggccccctatctccatggggaggagagggaaggaccctcagcagggggcagggcccaaggggtccctcctgcagcagggggcccggcaggctcccagctgtgctctgtcttgcctgggcccctccccgtggctactgttgcaggaagcagcctcctgggcagcggtccccaggctggaaggagcgagggtggcggctggcaggggctgcaaccaggaatgtacgtccaggaacgtggctgttctgcctggggaggggccgagggcagacggtggggggtcccccacagagaggtcttggcttctgcctctctgtggaatgggtcagttggggtcttccccgagtccccgtcttatagctgcccacttctgcctaaggcccctgccaggggagggagcccgtgggtgatgaggtcatccctgtctgtggctgcccagagccctggccaaggaatccagtgaggggggagctctggggttggcaccacttcagtggaaaatgtgaaggtgcagctccggcgcctccgagggcgggggtgggggcagcgtggccgccatgccacgtcagaccccagggctggggaacaggcgtaggtcagggccagtgacctcagggcacttgaggctgggcctgcactccccctgcaaccccctcacctgctcccctgggcggcccgaagcgggggtgggccttgtaggatcagatgccgacatggtggcccccggctgcaggacatccggaacacggtgggcaacgtgcccttggagtggtacgatgacttcccccacgtgggctacgacctggatggcaggcgcatctacaagcccctgcggacccgggatgagctggaccagttcctggacaagatggacgatcctgactactggtgagggctggtggggtggggccagcagccggggtgggcccgaggggtggggcagggctggcggggtctgactggcggtctccaggcgcaccgtgcaggacccgatgacagggcgggacctgagactgacggatgagcaggtggccctggtgcggcggctgcagagtggccagtttggggatgtgggcttcaacccctatgaggtaggtggcaggggctggcccctgggcggcgggggtcctggaggcaccagcagggcctcagccactctggcccacacgcccacatcttctcccccagccggctgtcgacttcttcagcggggacgtcatgatccacccggtgaccaaccgcccggccgacaagcgcagcttcatcccctccctggtggagaaggagaaggtggggcacacagcccctggggcttggcctgggctgaccgccccgcactgcccgtcctgacccggctgtctatgcaggtctctcgcatggtgcacgccatcaagatgggctggatccagcctcgccggccccgagaccccacccccagcttctatgacctgtgggcccaggaggaccccaacgccgtgctcgggcgccacaagatgcacgtacctgctcccaagctggccctgccaggccacgccgagtcgtacaacccaccccctgaatacctgctcagcgaggaggaggtgggcctgcatcctgggggccgggaccctgtccccatgcttccctgtgaccctccccacccctgtgtcttggtctccacagcgcttggcgtgggaacagcaggagccaggcgagaggaagctgagctttttgccacgcaagttcccgagcctgcgggccgtgcctgcctacggacgcttcatccaggaacgcttcgagcgctgccttgacctgtacctgtgcccacggcagcgcaagatgagggtgtgtgggggtggcacaccaggggggtggcacagggggcaaggctgacctggcgctctcctgccccaggtgaatgtagaccctgaggacctcatccccaagctgcctcggccgagggacctgcagcccttccccacgtgccaggccctggtaagtggagactagggggctggggttgcaccctcccagtctgactcctcactgccgccgcctcctcaggtctacaggggccacagtgaccttgtccggtgcctcagtgtctctcctgggggccagtggctggtttcaggtgggtcygagctgggggcagccttgagctggggggcaggtgggatggccaggtgttgagagctgtctctgccgcatccaggctctgacgacggctccctgcggctctgggaggtggccactgcccgctgtgtgaggactgttcccgtggggggcgtggtgaagagtgtggcctggaaccccagccccgctgtctgcctggtggctgcagccgtgtaagtggaggccctgggggctggggagccaggggtggcactgtgcttaggggccgtgtctgggcctggctcacagggaggactcggtgctgctgctgaacccrgctctgggggaccggctggtggcgggcagcacagatcagctgttgagcgccttcgtcccgcctgaggagccccccttgcagccggcccgctggctggaggcctcagaggaggagcgccaagtgggcctgcggctgcgcatctgccacgggaaggtacgtggggcgccttgggggtgaggctgcagcgggaggggccyggctcagccactcagccagccttgctctcctgcagccagtgacgcaggtgacctggcacgggcgtggggactacctggccgtggtgctggccacccaaggccacacccaggtgctgattcaccagctgagccgtcgccgcagccagagtccgttccgccrcagccacggacaggtgcagcgagtggccttccaccctgcccggcccttcctgttggtggcgtcccagcgcagcgtccgcctctaccacctgctgcgccaggagctcaccaagaagctgatgcccaactgcaagtgggtgtccagcctggcggtgcaccctgcaggtgaggggtgggggcggtgcaccctgcaggtgaggggtgggggggnnnnnnnnnnnnnnnnnnnnnnnnnnnnnnnnnnnnnnnnnnnnnnnnnnnnnnnnnnnnnnnnnnnnnnnnnnnnnnnnnnacctgcatcacagcctttggccctaggtgacaacgtcatctgtgggagctacgatagcaagctggtgtggtttgacctggtatctttccaccaagccatacaggatgctgaggtgaggaaagctgggggtggaggcggccagcagagcccctcccttcagcccgagcctgccttcaacctggttccctccccccagacaccacaagaaggctctgcgggctgtggccttccacccgcggtacccactctttgcgtcaggctcggacgacggcagtgtcatcgtctgccatggcatggtgtacaagtgagtgctgaccctgcctggccccctccccagggcagtggtgtctggccgtgccctgagccctcctcgtccccacagtgaccttctgcagaaccccttgctggtgcccgtcaaggtgctgaagggacacgtgctgacccgagatctgggagtgctggacgtcatcttccaccccacccagccgtgggtcttctcctcgggggcagacgggactgtccgcctcttcacctagctgttctgcctgcctggggctggggtggtcgtgctgaagtcaacagagcctttaccctgtgctgcctggtgctcccaccttcttgaattggggttgccaacaaagccgcccccaccacagcgccgagccttcccctcactcaattttgcaaaaacagtggggacaacacagccagtccagggcaccctctggcccatcccctaagaggctcagcatcgcaccctgtcagtcactcgctgggagcagatgagtttattgggcacatccctcactgaagggcttgggtttggtccccagcagtgcctgttctggggccaggcccctccagtcgtgtgcccaggctgtggtcctcaggaggccctgtcttggagctcaggcacaggtctgggtgcatactcctcgctgggggtgctggccggagccttaggcgagcttcaccaggcggcccagggcctcagcagccctcgtccgcacctcgggggccgggtccttcagcaggatctggagcgctgggggtagaggaggggggctgcctgcgggctgtgacctcggcatgcccatgcctgcgcgtgggccacgctctcctgacagcctctgctgggaggctcaggagccaacggaaagatcgtttttccttttttagtgttttttaagctctcttggaacagttaagaagtttccgtgaattactagagacgatgaggtcaccagtgacagggaaaaagtcctgaaatccaggaaaatcacttagtccctgcgggtgcctacagggtcagcagggcccagcggaggggccccgtggaggggtgctcacccgcaatgagctggtccaggtccacctgcggctgctgcctgggctccgagtgcagcaccaggaaccctgtgaagtgggggcatcaggcggggctgccgggcggcgtgggggtggggcagggggtggtgcttaccggtgaacaggggtgcagcagctcggacgttctcccagctgctcttgaagtagaacaggcaggtggtcaggagacggcccagcaggtctgggaaatggtgcatctggggagaggcctggtcagtgccgcctggccccgccccacccaccacgccccgcctggccccacccctcaccaggtgcttgcaggtggtgttgaggaactccccgaagtgcagggctcggccctcctgcaggtgtttctggaaagcagctgagagctcctcacatgccagattggggccacacatgcgcagggcaaacctgcaggcctaagggatgcggcactggggccaagtccagttgaggccacccaccccatcccactcaccccctggctactcacgctggccacagtggcctgagggtcctgcaggtgcagcagcaggggcgccagcccgcccaccacctggtccaggaagacgtcctcacagtctccgtggcagaccttgttaaggtgcccaaagaggcggatagatgccgtccggaactccatcttctcctgggaaggacatgcagcatacgtctcctcacaggctgtgcccctgcaggcctgcctgcctagccccctgccattgatgggtgcccttgcctgacccgggccaggaaacaccccgacgggtgggggccttacgggtgggggctgccaggcccagcaaagcagcagccctgcaggtccgcgctctccacggtcacctagccgaggtgggagacagggaggagggtggggctggggctaaagctcagagtaagaggcaggaagggctggggccctcttccctccccctgccccaaccagcctacactgtcgaagaaaggccggatgcggatggccacgtgcagcagccctgagcgcaggtcccaggactccaccaggtgcaccagcctcgcaaggcccagcatggcctccagggccactgggctgtgagggttgtccccgtcgtccagcccgccaatcatggctgtgaggagctgggggccgtgggttcgcacctgaggataccttacactcagcctgggtcccagagtcaccgtctgctaccccacaagacagggtggcctccatgcacagccccccacccatgctgcctgggacccagaggggctggtggccaccccaccttgtcagggcagccggaggccaggttggccaggccgcggagcaccagcctccgcacgctggcgcatgtgtccttctggcgagccgccaggctctccagcagcgagtccaagagcatgaggtcgttggccacgttgctgttcagcagctgcaggcagaggtgctgtgacttccctctccccgctgaccccagggctcaacccaccagcccaggcccagaacaccagaggctgtccccacgccggtgtggcagacagaggtggagcacctactccctgggtctccgatcagtggcgacccctccctgttgtgccactggggcctgctctgacgcccgctgtgctctgctgcacggccttgggcaagattttggcatctttggccacgaaggccaagaccacaccaccaagggcacctggggtcccaggggccagccctgtccagctacaaatgtacccagcaggacttggggagagtacaggctgcagggagcctcggtcctcctctcaccaggcacagagggggtgtccctgggtgggactgagtgagttctggcatgggggaggaggtagctagcatccacataacctccctcacagaccacggtcgagggggccttttaggggtaagaaaagggcatcccgtgcctgtcctgagcaggagccccaccttggtgcccagcatccgtccctggaagggcctacctcggccaggaaggcggtggtggtcaccctctggttctcatacgcactgctgtgtgtgcatgccagcgtcttcagcaccagggggagtcggggccctgcgtgctcagccatggccctgggaaagggggccgctgagggtgcaggggctgttgctgtgctgaaccctacccaggcaccttccaccctgcacagccctggtccgctccaccgccagctgccaggttctgggagttctatgtttcagagatgcctcccagcttgcctcgccaggcctctgcaggggtgcctccctacccctgccccagagagtgaacaggcaggagcccagggcaccattggcctgacacgcatgggcccccgcctgatcctgtcatgttctgggctcgagatccggtggagcccagccagtgctggagctgcagtgggctgggcccgctcacctggccaacctggtggccccctcctcatgccccgccgaggtcctgagcagttcccagcctccctccaggtccatgcgctgtaccacatcctcgctgccgctgcggagtagcatggaccgcagggtgtccactgcagagctgcaggattgccagggtgctcagctggtagggcacacacgcctacctcccttcctgattaactcctcaggtctgcacccaatgcgtgttgcccacctggtggctagccctatccctgccagagccactctccaggaagcaggctctgggccatctgctagaggccccccatttccccacccaaggcaaggacgcagatgttggcttggaggtgagctagtagcaaggtcagcctgtggccacctggccaccagcctgagagctggacacaggcaaagccctctggctgcaccggccttcctttccggacacccagacgctgctgggcacccacaccacaggtgccccccaccccgggcctgttcctgcctggcacctcgggttctcacacctgtaccccaggagactccacagccctctgggaggcgagcaggcccctgatccactcccagtgtcggctgaggctggctggcaagtgagcgggaggatggtgccgagagctggaggggctgctggcgtgctgaagagcaggcgccctgggcgtgcaatgggggccaccttggccaactctctgactccccagacctccaccaggcaagcaccttgccctctggtctccctggcagtggctgggccagaaactggcagggagagtctgatgttgaagcctctacagggcccagcttgagcctggcatcgaccatcggctcagatgagcccttccctgctgaggctgctccactcctggctgccagtgggtggggcgtagtgtgtgacccaacaggcacggtctggggcagaggatgccctgcaccagcgtccccacccagcaggaccctccatttcaactccacagcccctgccatgtggctttccgctgccctcgagcacctcacacttaggcccccgccgcctttggacctctgtccccacaaggcttcgtcctcaggagcacctggcccaaaagcagacaacccccgagcggcatgggccgtgtggtgaccgctggtggtggtgacagtgccactgccctggtcacctcctgccaggtgtcccacagggcccctggtgtgctgcgacgtggagtgggcctagcagggaacaagtggccccgccaagctgggggccaggccctactcgcctggatggtgtgtgaggccctcatgcaggtgggatctaggaggagggtgtggtgggcacaggagcatgagacaagcttgttagagatctggtgatgggccccatgaggcttctggacggttgggtacacagggctggtgatgccggcaggaatgaggcggcctgagagctggacaggggctgtaggagctgagggccacgggggtctcggcagcccaggaaggaggtgctgggggcctgctcccagtataccactgtccccatggggtgtgcctgggtggtctggtgctgaccaacagcagggccagcccctcacacagcccttgatgagtgtccccaggctcctctctctcacgggttccctccccaaggtcggacgtacgagaaggcagctctggaaaagcctggagtcccatggttccagtgttggggcctgatctttgagcccaggtagcctgggtgccaagggggcttccagccctgggaacaggacagccagcactgaccacaggcagaggacagagccacaccagtcactgcagttcctgggagatgcccttgacacatacaggccaggccagccgcaggcggagggaggacccaccgggccacagtcagttcagctgggcctcgtggtctgagccagggcctcatggtctgagccagggcccagcttgagtgcagctctgcctccagctccacaccctgctccaggcctcgagccctgcaaggccccatctggaccaggggctgcgctccaggctgcaaatggcgcaggcacagcaactcacaaccagcatcgacaaatctaacgggaagcgtgtgtttggctcacgaatgtgttagtgatttggatgagggtgcctcccttgtttgtgtgcccaggacatttaagaatgtggcacccacaagggtccgacccactggcgaacggcctgtacaccaggctctgcaatcgtcccagtgaaggggcacctgggggtgggcgtggggcccgcagccctacagctcggggcggaggcactgattcgcagcaggccaggcccaggggctggtggctgccccatcccattcacattttccactcagtttgctaggggcagagcagcgctggcagccggccccactgggctttacgagctggcctgggtctgagcagcctgtggtgctggggcagggggagggggctgaagtgcggctgtccccctggtgtgtcctggccaaggggggcagggggaggggctgaagtgcggctgtccccctggtgtgtcctggccaaggtgcacacccaaacctgggcgcctgggtgggatggaaccatagccctcctgggcaggtggggcatggcagccctgcgttcacatgggcttgtggtcctggggtcaggccacacagccacgcctgcccagggtgtcagcctcctctgtctgtgctatggccccaggcaggtgtgtaggacctggaatgcttcatgtcaggcacctgggcagctcttacgtgtggggctgtgaacacgtgccaaaggccgctctgctggggcagtttcagggacaaagctggtcctgccatggttgaccccagcctataccccaaagactccacacaactccactcccaggagaaggcaccacccggatcctgcctgagctgccacacgaagcccccaccagctgcctgtgttcagcaccaccgtgcagaccgcccgcagaggcgaggagggaggccttcacagccagtgtgagaagggtggccatggatgtcaccactgacagctcagccctgcacctgggtgaggcgccagctccctggaagca

SEQ ID NO: 96365 - DNA, 24051 bp, Homo sapiens
gtgtcttgtggatggtcctcttgtataggatctcacaggggttctctgcatatcctgaatttgcatgttgatctctctagcaaggttggggaaaattttcatggacaatatactcaattatgttttccaagttttttgctctctctcccctcttttagggacaccagtcagccatagatttagtctctttacataatcccatattttctggacatttattcatttttagaaattctttttctttatttttgtctgactaaattaatttgaagaaccagtctttgagctctgagattctttcctcagcttggtctattctgctattaatatttccaattgtgttatgaacttattgtagtgagtttttcagctctaacagttcagtttgatgctatggctttgcacatatgcttcattgtttaataggtagtttaggctgggcacagtggctcatgtctgtaatcccagcactttgggaggccgaggtgggtggatcacctgaggtcaggagttcaagaccagccaggccaacttggtgaaaccctgtctctattaaaaatacaaaaattagccaggcgtggtggtgcgtgcctgtaatcccagctactcaggagactgaggcaggagaatcgcttgaactgaggcagaggttgcagtgagcccagattgtgccactgcactccagcctgggcaacagaatgagactctgtctcaagaaaaaaaaaaaaggtagtttaaacttgcacaatcacactgcattctaacccacaggaaaaaggtgcatcttttctgttaacttccacatacatcatttccttacatctccttacactggccaaagcagcaacacagtcacacctggctgaaaaagagattagagaatacagtgtttagctgggtggcaatgtgtctagttgttaaaaattagggttcttattaagaagttatctttctgtatagctctttcctttccaaatactctttccttgaaactctaaccaccttcttctctccaaactctcggttccatcttctcaactcaaggagtttcctgagctctgtctgggttccaccaccctacattcattccaacttagatctttctctgatcagtaagctggggcaattggagaggtcaccttgtttgtttccaatcttgaaggattattttccttcactgcctcatatccagtgtcacaaaaacctttgtttcattttctttttttccttccttctttcctgcctgcctgtcacctccctgcctccctccctccctcctttccttctttccttcctttcatgttttaggtaggaagtgttaattaggtccttgttttgtcttggctgagagtaggagctcactttttcctacttattttgtattaatatctctcatctgcatggtgctttgcaaagtattttggtatccttcacaatttgccagaatgtaagtgaagctggcatatacgtgttactttctgcctagcataaaagtgactttgaatagtcacatctgtaagtatccctccttgcccatggaatttgagcctggggaaaatgaggattagttgaagcagagaatgtgtatgggctgccagggtgttggcccaggaacacagtaagcaatgtcctgagcaagactgtattgtagaaatgaccagaggccagagtgcatgatgagcagatgatcttgaataacacttctgtgcaattttgcctgatcaaaattagcaaaaatttggtataatgtttagcaattaacgcattatagtaacaaatgtactgattttaagttattggcagtctgattacctagatgtggtttgatttgtggaacaaatattttcaaggtggctgggcacggtggctcacgcctgtaatcccagcactttgagaggccaaggcaggcagatcacctgaggttgggagtttgagaccaacctggccaacatggtgaaaccccatctctactaaaattacaaaaaatagccaggcgtggtggtgcacacctgtagttccagctacttgggaggctgaggcaggaaaatcgcttgatcccaggaggtggaggttgcagtgagcagagatcaccccactgcactacagcctgggagacagagtgagacttcatctcaaaaaaaaaaaaatttttttcaaggtaagtaatctaggttccataagcctcagtttcatacttttgtatgtgtgagggaagaaactacttggtctttctatagcaaatgttatgtttttgtgaaaggttttctgaaggtagatgaaccaaaataaagattctacagatgtcagaggcccaactgtccataagcatcccctctcccaaccttgcaagttactgtattgattggattttccatgtaaaacttcaattgtaacctccagagtttgtggactcatgagaattaattacatttttcacgaatattttggttttttacactttcttccctcctacaacttaaagtttttgctgataccataatcaaaacaaaacaaacagaagcagaaggagtgccacataatggaattattgcccaaaattaaaatacaaaagactttagtatataaattaggctggccgcagtggctcatgcctgtaatcctagcactttgggaagccgaggcgggtagatcacctgaggtcaggaatttgagaccagctggctaacatggtgaaaccccatatctattaaaaaataataataatacaaaaaattagctgggtgtgttggtggccacctgtaatcccagctacttgggaggctgaagcaggagaatcgcttgaacccaggaggtggaggttgcagtgagctgagattgggccattgcactccagcctaggcaacaagagcaaaactccatctcaaaaaaaaaccccaaaacaaagactttagtgtataaattgagttgactataatgactgtatattttttgttgacacattattctttacaaatgttttgggagagatgtgcttgaattttcaatcttaagggcacacaagttttgtagttataaattctattgctgctatattgtttctaataccttttacagaagtaaaatgtcttcataccactaaataacatttaccttcaagtgaagagggaatgaaagctcataaaactgcaatacaaaatttgtcttcagcaataggattaattttatttttgtagatgtatgaacctataaatttattgctggatatttaacatatcaaaataacagaacaaggagcttgtattaagtgtatcgatggctgggcgtgctggctcacgcctgttatcccagcattttgggagaccaaaacgggtgggtcacctgaggtcaggagttcaagaccagcctgaccaacatggtgaaaccccatctctactaaaaatacaaaaattaggtaagcgtggtggcagacacttgtaatcccagcaacacgggaggctgaggcaggagaactgctggaacccctgaggaagaggctgcagcagtaagctaagattgtgccactacactccagcctgggcgaccgagcgtcactgcacttcagcctgggcatctcaaaaaaaaaagaaaaagaaaaagaaaaagaaatatatcgggaaatttgtgattttcctttttttttttttaagttagacaaactgaagaggcaaacgatgagaagtaacgtgacttctcattgagctcaatgaacatgggatctactcaggtgctctgacttctgagccccccactcacaactcctaactgttaagctattctaacgccagggtatgctggaatttaatcatcaacaaaaactgctgaacagttctaaacgaggaaataccatgttaagaaaaaaaacaatgctctggttgcagtaaggaaacagattgtagatgaagatagcatcagggtaccagtagagaggctgttgtggtacacaagagaagtataaataatcacatggaattctctcctggagctcccacagctatcaagttccactaaagaagtagaaaatgtagaccaggcatggtggctcacacctgtaatcctagcactttgggaggctgaggccggcagaccacctgaggtcgggagttcaagaccagcatggacaacatggtgaaaccctgtctctactaaaaatacaaaaattagccgggcgtggtggcaggcgcctgtaatcccagcttcttgggaggctgacgcaggagaattgaacctggaaaacggaggttgtagtgagccaagatcgtgccactgcactccagcctgggcgacagagcaagactctgtcaaaaaaaaaaaaaaagtagaaatatgtcactgatcgtttagagatcatcgtccttgaatttacctaagagaaggcaaaaccttcaaatgtctgtgtagctatcattggtaggaacaatccatactctagagccaaaacactgagagtggggacctgcccttctaggctatgttttacttataggactccacagaacgagcagggagaagtcgtattaatttttttccccaacaaggtttaaaagtaagtcctgtgtgacatcatcgagccatggaaattctgtaattaaaatccgagcctcgccgggtgtggtggctcacgcccgtaatcctagcactttgtggggcagaggcgtgtggatcacttgagatcaggagtttgagacaagcctgaccaacatggtggaaccctgtctctactaaaaatacaaaaattagctaggcatggtggcatttgcctataatcccagtttctccggaggctgaggcaaaagaatcgcttaagcacgggaggcagaggttgcagtgagccgagatcgcaccagcgcactccagcctgggtgacagagcgcgactccatctcaaaaaaaaaaaaaaaaaaaaaacaatctgagcctcaaagtctacaaggaggaggactttgcttctcagtatcatttttctttctttcttttttttttttttttttttgagacagagtctcgccctttcgccaggctggagtgcagtggcgtgatctccgctcactgcaacctccacctcctgggttcaagcgattcccctgcctcagcctcccaagtagctgggactacagtcgcgcgccaccaggcccatctaatttttgtatttttagtagagacggggtttcaccatgttggccaggatggtctcgatctcctggcctcgtgatccacctgcctcagcctcccaaagtgctgggattataggcgtgagctaccgcgcctggccctcagtatcatttttctaaagggagccaggagccaggtgcatgacttccttcccgtggttgcccgcggtcctgagcggttagtgagcctggccaggaaggactcaggtgcgcacatcctcttctaaagacagccagaagtccattagggttgagaattatcatgtcattttccatcacaagatttttatcaaatctatttaagaatatttttgtttgatttaaaaaaaaaaaacccttttaagtccaaaaacaagagtttcaaaattgtagttggtaaaatacaacgacgtcacgagtgcagtggtaggggaagtcccaggatttgagcgcaggagccactcacagcgcgttcctgggctgccgtcctgtcctcgggctgtggcctttcagggctcccaaggctgcacaaaggctgtcttcccaagacaaggtgggggctgcggcgctgctcccggacggaagcgcggcctccctaggcctagttttctgttcctagatgtgagttcaaacccactagaaaggtcgggttcaaaaggtttgccaaagcaaagctgcaaactcttccacttcagaagcacacccctaaataagaaaaacaaaagtcggggggtatccttttgagagcaaaggagcgaagacgtgacgttatgtgacaatttagggtgttctgtacaattcacccacctcgatgccgccgagcgccctttaactcacctgtgggaactccagcatgtcccgggcggcacccaagggcgcccccatagcccattgccccaaagtcccccagccaggacgctgtcaccagggcccgcccctctcgggagttcccgctccgcgactccctggccggagcccaggagcagccaggcccaggctgcgtcccctgcgcgtccccgcggaggtccaagggtccccaaggcccaggccccgtccccggacagccccggtgccccaggacccccggccgcagctcacctgggaccagccgcccgtggagccacccctcgctcagccgcccccaagttcccgcaggaggaactggcgacagacacgtccggcccgccgccgccgggctcctgggacgccccccggggcctcgctggctgggacccgcccagaacctgctgctccaccgccgcccctcggggcccccagcgcgctgccctccctcgctgcgtgccccgggctgcgcttccccggagggccgcacaccgccagagcccagtgcaaattaaggagattccgattccggagcctgaggacgccgctgggggtcagggaaggtcacgctgttgattctggtgatggcttcaagaggtattcaacttcatcacattttgcaagttgaatatatgcggttattggtattccattttacctcaataaagctgctttaaaaaaattctgtgcatgttgtttggcagactttaggaaatacaggactgtacattcctagccattagtatattgggtcagaggacaagtccatgtaaaatagttaggtatatttccaaattatcaccttaagtgtttgagctaattttttttctttctccagtaagaatttttttctttctcattttttccatggactggctcaaggttattaactgttttttaacaaaaaatgtttaattaatgctaacctagttggcaaaaaagaaaaaaaaaagatgatctagttttttccattactttcatggtaaatgagggtgaacatctttccatatctgtggtgtggtttcccacgactgtcattacaaatgaccgcaaacttggtagctcaaaacatcatcaatttattatcttatggtctgggcgcagtggctcatgcctgtagtcccagcactttgggaggccaaagcaggcagatcacccgaggccaggagttcaagaccagcctggccaacatggtgaaacaccgtctctgctaaaaatacaaaaattagccaggtgtggtggtgggcgcctgtagtcccagctactagagagttggaggtgggaaagtcgctggaaccttggaggcagaggttgcagtgagccaagatcatgccactgcactccagcctgggcgacagagcaagaccttgtctcaaaataaataaataaataagcaaacaaatttatgatcttatggacttacaggtcagaaatctgaaatgagactcactaggctaaaattaagttgtcctctaggctgtgttccccttggagtctctggaaaagagttctttctctttcttctttcattctatagaagaacccacattctttcactcctggtccctttccagcttgaaagccagcaatgaccaccaggtccagtctttctcacatcacaccaggccgactctctcctgcatcctttcacttctaaggacccttgtgattttgctgcacccaccaggatagtcaaggataatctctccatctcacagtcagctgaatagaaccataatttaacctgtaatgacatggacaattaacaagcactttaagttgtgagaacttttaattagagggatattactcacttggaaactgaggctcacaaagttgccaaaccgcatggccagtgtgtaggtatttatttcttacacttaatgtttcttaaaaaataattcattaccagatgggaaagatcaagattccaatgccctttcaaagctcattaaggaaaagttttatgaaggcctctggtacatgccaggaaactcacaggagatggtgctgcctcagatgccttagaagacaatgctgccaagaacacgtctagcattgaagccacacacaatggctcatgcctgtaattccagcactttggamggcagagactagaggatcctttgagcccagaagttcaagaccagcctgggcaacatagtgagaccccatctcttaaaaaaagaaaagaaaaaacatctaattttgttgattcctcaaaacttcctggcacagtttgaactaatccaactacctggactataatgaatttcagggtaacattagtgagacgtagtgaagaactgaagtcttttctctcaacccagtgtcttgagaatagcaggggaaactgattcccgtttagcatgctagatgagtcaatgaaggaagggttgactgtgagattacaaaaacacattttctaaagaattgtagaaaaccaggatcacaaactcattctgtaacaaaaatgaagcaccactgatttacagaggaattcacaactggtgatgtctcttaaattaagaaacttaataggaactccctcatcgaggcaggctctgcttcagctgaggaataaattagccagagccagatggaggaaaagagaactgatgtggtaactgtttggacttccaggaaggccaaaagctctcatgtttcttccaccaagaggactacaatgaagaactcaaccatcagtgaaagaagagtcttctccagaaatctgattggaaatgatgacacaaataccaccatcagtcaaagtgggaccctgacttgctcatggtggtaccaggttagaatcatggcaaaaagcaggttgtaggtttcacattacatagtttggcccatggtttccactgccaatactttgggagagaggtaaactggttaggtggaaatgagttaggtgctgaactggttaggtggaaccttggtcttatttcctggagatgtgacattttgggggcctgttcctgctgcgactggcacagcaatcaggacttgcagccaccagagggtcccagggctggggaggagacaggggtcttgcgtatctgaagttcagcgtctcggcagcgtggctacttgcaggagggaggagctcgctctggatccattctagagagacttgtcccttccccctcttctgccccacccctgggccactttcctgtcccctgactcccacttgactttgtttccactaattggagcttagctcagaaaatggagggggctgaagttataggttatgggaggggaaatttaagtttgggaagacggaggctcccttgattggcactaccagccacatctgcagccacatgagggtctcaatgctggggcagggggcagtgagactggccaggaacctgagtcccccggggactcgcagacaccttgccccacacatcctgagtgtgctgagggagacccagccgagatcagctgtgctcctgggtaggtgagagcaggccctgcagggggcccagtccacccaggaaggatgcccagagtggctgagtgtgcacctccctcttctgcctctccttttccgctgcaagcaagaccgggggtcaggagttacagctgccagagtccagaacgggcccctcctccccagcaatgtgggtggggtcaggggctcaggtcaaattcaaggaaaatcttcaagccacatggtatagagccaaagctaaagaggccgccctaataatagacagcagcagccccttacagacatgctcagactcatagggtctcagaatgcaattctccacagtagaaaggacatctgccctgacagaagactgcactcctttaagcaaatacaggtatatcccagtagataaactggggtcatctggcccataatttaaaggtagacctgtatgttcaaattatgttagtgaaataaaattcatgacatraacattttccttggaaagaaacatcctgtaagtggctcctggagcctaaaacatcctctggaacttccttgtgcccatgtaggtcatgactggtaaaattatgatgagaaccaagtcttattttcctacaggaaaatggaacaaatggagacaaagccctgggcagccccattgcatgtttcaggaggaaaagtaacatcagctagggattagactttcagatattctttcctttaaactaattgtcttcaaattctttgtcccatccccctaaagaatctttgtgtatactcccacgcaggttttgtagacacttatttttgcatcatacacttaaatcatagcaaatgattttaattgtggcgggattcaagcacattaaaacaccgcacggccaggcacagtggctcacgcctgtaatcccggtactttgggaggccgaggcgggcagatcgtgaggtcaggagattgagaccatcctggccaacatggtgaaaccccgtctctactgtaaaaagtaaagtagaggttcctcttcaaagactctcctccccatctaattaggaataaatagtaacttctcttagaagcaaaatttattcaaagacttgtgctaacattcttaaatatctgctagctgtaataaagaaatcaatatactttatgttcttagctctcacaatttagcctaaatatttgtctggcatgcttatactggtccaagcaagcattaggtcatagcctgttcctcttccttatttaagagtgtttttacctttctcagcattccacaagttacttcctccttccttttttctcctctacctttgcctctttttaaaagttctaagtttctagccaattgggacaaatacagaatgtgaggtcccattccagccagtgaaaaccggacacagcagtagggtggatgcgtcaggttataaatgactttgtctcctttgttcagtgtactctcgtggcaaaactgccggcgagtgtactttttctgcaataaataaaaatggccttactaaataaattaaatttatgttcaagtgytatttctttacggcactggggaacaagcatttcaaacactactaaaaatacaaaaattagctgggcatggtggcgtgtgcctgtaatcccagctacttgggaggctgaggcaggagaatcacttgaacccaggagggggagattgcagtgagctgagatcatgccactgtactccagcctggggacagagcaagactccgtctaaaaaaaaaacaaaaacaaaaaacaaaactgcatatcactcttttgaatgtgtccaacacaatattaatggggtggtgatttggccctgaccaccatatatatataaatatatatacatacacatatatatgtgtgagtgtatatatacacatatatatgtgtgtgtgtgtatatatacacatatatatatatatatatatatttttttttttttttttttttttctgaggcagagtcttgctctgtcgcccaggttggagtgcagtggtgtgatctctgctcactgcaagctgcgcctcccaggttgacaccattctcctgcctcagcctctggagtagctgggactacaggcacccaccaccacacctggctaatttttttgtatttttagtagagaaggggtttcaccatgttagtcaggatggtcttgatctcctgacctcctgatacccctgcctcagcctcccaaggtgctggattataagcatgagctaccgcacccggccaaccactatatattttttaaaaaaccaaacaattgccacaatttcagagcctgttattggtctattcagagattcaacttcttcctggtttagtcttgggagggtgtgtgtgtccaggaatttatccatttcttctagattttctagtttatttgcgtagaggtgtttgtagtattctctgatggtagtttgtatttctgtgggatcggtggtgatatcccctttatcattttttattgcgtctatttgattcttctctcttttcttctttattagtcttgctagcggtctatcaattttgttgatctttccaaaacaccagctcctggattcattaattttttgaagggttttttgtgtctctatttcctttagttctgctccgattttagttatttcttgccttctgctagcttttgaatgtgtttgctcttgcttttcttgttcttttaattgtgatgttagggtgtcaattttggatctttcctgctttctcttgtgggcatttagtgctataaatttccctctacacactgctttgaatgtgtccttaccaaccaaaaagagtccaggaccagatggattcacagccaaattctaccagaggtacaaggaggaactggtaccattccttctgaaactattccaatcaatagaaaaagagggaatcctccctaactcattttatgaggccagcatcatcctgataccaaagccgggcagagacacaaccaaaaaagagaattttagaccgatatccttgatgaacattgatgcaaaaatcctcaataaaatactggcaaactgaatccagcagcacatcaaaaagcttatccaccatgatcaagtgggcttcatccctgggatgcaaggctggttcaatatacgcaaatcaataaatgtaatccagcatataaacagaaccaaagacaaaaaccacatgattatctcaatagatgcagaaaaggcctttgacaaaattcaacaacccttcatgctaaaaactctcaataaattaggtatcgatggggcgtatctcaaaataataagagctatctatgacaaacccacagccaatatcatactgaatggacaaaaactggaagcattccctttgaaaactggcacaagatagggatgccctctctcaccactcctattcaacatagcgttggaagttctggccagggcaattaggcaggagaaggaaataaagggtattcagttaggaaaagaggaagtcaaatcgtgtccctgtttgcagatgacatgattgtatatctagaaaaccccattgtctcagcccaaaatctccttactcctgttaatctcagcctcccgatcagctgggactacaggcatgtgccactacacctggctaattttttatttttagtagagatggggtttcaccatgttggacaggctggtcttgaactcctgacctcatgtgatctgcccacctcagcctcccaaaatgctgggattataggcatgagccaccacccctggcctttttcttttttcatttcaaattgtttgtggatttttttgtttatttttcatagcaatacatttttaagaccttcagaacacaagcacatggtattatattggggtcaaactcaacatatacatttctttaaagattattgacttcccaatactgttgaattctcctacccaaacatttggtggcattatttttcatttgtataaatctattttcatgtttttcagaaatctttccaccaatttcttactaaattaaacacaattttctgtagaattctgccaattttttttgcattgatgaacatagtcacatgacattctcattcaattaatgtgattaatttcatcattgaatttcttaatattgaatcatacttccctttataagataaagggtgattgattatgcatcaatatactgatgcaatggtttctaatatttaatattttcactcttaaatttgcatgttctatttgtctatagtattccatatggctaaatctaggcaaggttcgagtatcacctttataaacccttcctaaaaagtatttcaggaaagattgaccacactataactcttgagaagtttaagtagcattggtttatggattactttatcggtagaatttccctttcaactacataaacttggtgtttgtgtgtgtgtgaggaaattccttattaaatgtctttgtttcttctatgaatattgctcagtttagagtctatctctattgagttacattttgataaaacatatattccaaacacacacacacacacacacacacacacacacacacacacatacatatgcagtctacatgtgtgtatcaacttgcattgaattacacagatgtctctattttcttggtcaatattgaacctcacgttcttcctggcactgtaaactgttgacaaatacttctcaagttacttgtgtgatcccatttctctatttataattcaatgattgttcatttaaagaatttggggagtaacagaaaatgagagtttcagcaaaaacacatcccaggaggcacagaatccagcacccaccgcgcttcattgtcatccccttctgtctccgactccgcattttctgcttcctccaagatagcccctgtctgcctcaaaggatcatggaaaagcagagcctctccaggcactgccatctctctggaggtgctgcagggaagttgtcattgtttttggtaattgtaactgggacaaaggttttcaaaaatattttcaattccccaagtgtgtactgtcattgctgccacaggtaaagtataattgcagtgcggtggggaggtgaggtcgcagggtcccgagcccatatctcagacctggccgcctccctccacacactccctggccgtgacagtcactggtttccacagcccagcagcagggaggcgcctggtgggtgtgttacattttgatctgtgagagagcacctgtaaggttaggaagttgtcaggaggtggggtaaatgctctggtgtggaaagaggactccactgggccagaaactgaccagtgtcaaggccatgtggggaaaggaaataayggctgggtcatgggctaagttgtggagagggagcaaagttccaagagcatgagccagtccccagctgcagctcacttaacaaaatcctcatgcttgtcattgtcggtttttgatggaagaagccaaaaatctgtttttaagttttttttttttaatttaagayggattcttgcactgtcacccaggctggaatgcaatgttgcagtctcagctcactgcaacctctgcctcccaagttcaagcaattctcctgcctcagactgctgaatagctgggattacaggcgcctgccaccacgcccggctaattttttgtatttctagtagagatggggtttcgccatgttggtcaagatggtcttgaagccctgatctcaggtgatccrccagcctcggcctcccaaattgtggggattacaggcctgagccaccgtgcctggcccccaaaatctgtttttgttgatccttcttgtctaagatctccttacctgttaagtgggaagaatgcattttttaaaaaagtttcctagaataatttggaaattaatccgctagctgttctatcaattccacaagaatcagaaagatttctaggatgaatggaagcatttctacaattccttcatgcctgtgataatgtataagatgtagctgattaaattatcttattcttctcaaaagtattaaacatagggctttaacctactctggacatataaagtacctaatggagaccgtgatgtgtggtgacaggaaacatctggtctctgagaatgacgaaaagaccatattctttcatgaagtcaggggaggagcggtcaaggaaaggtatcttgatgaccttaggttttcatattagaacaaaaatcaaggacttcagtcgttttctgaagtaaattatttggtaatatttactctgtcttcaaaaatgttctgaagccattcttaggctcaatactcatcttagtaacacttaattcagtgaataattttccctacctcgagttttccttttacataayagacttatattttaatatacctaacaattctgacattgaaataattttttttttgagatggagtctttctctgtcacccatgctggagtacagtggtgggatctcagctcactgcagcctccgcctccggggttcaagcaattctcctgcctcagcctcccaagtagctgggaccacaggtgcatgcaccaccatgcccagctaatttttgtatttttagtagagatggagtttcatcatgttggccaggctggtctcgaactcctgacctcaaatgatttgcccaccttggcctcccaaagtgctgggattatagatgagagccatggtgcccagcctgaaataatttcatttgatatttttgtattcataaacaaatactaaatttatctgtaattcatgacaacctgtttctcctttgcactgttttatctcctactcatgtcccttgaccccttgcttagcaacagtcatttctgtatccttcttggttaagatgagaaagaatcttcttttttaatttcarcatgaaatcatttaagcattcaataaatatcatttggtcttgtatgattattcttttaggattatactaaatcagtgcatctatattctacttggatttctgaatcattataggtgatatttgctcatgaaataagcacttagatttaaatgagaaattgccacaatcaaaaatkaagaaaaaactacatccaggtttaaagaaagygacaatatatacaacatgaaatgtgtgaagcattaaaaaaatactatgtccaagggtgagacacacagtgattaaacacattgtccaattttgattctgcctcttacaaagcagttactttagaaaattcattaagcttccttgtgtaagatcttcttacctgtaaaatggaaatagtaaagcacttataccacagaattattgtaaaagttacatgcaaaacactaatatagtactcctctcatggggatgcatatgttcttctttttagagcaaaactcttatttaaaaaacagggtctaataagaaaatgtctaagttggaaacaatggtaagtgtacaatagtggattttatttgcaaaagtgaaactttatgtttccacacagggttctctcactttgaatgtaattatcagtcactgaaaaatgacaaatggcctccaaggattttgcaataggcatgatcttattatctcagatcatggtcggattcctggggaatttctttcttctctaccactatagtttcctttgtttcaccagaggtatgttacagtccacagatctgattctcaagcacctgaccatagccaactccttggttatactctctaaaggaatcccacaaacaatggctgcttttgggttgaaagattccctcagtgatattggatgcaaatttgtgttttatgttcacagagtgggcagggctgtgtgcactgagtgtcttccaggtcatcaccatcagccccagtgaattcaggtgggcagagctgaagctacatgctcacaaatacatcaggtcttttatcctggtcctgtgctggattctgaacacgctggtaaatattactgttcttctacatgtgactggcaagtggaacagcataaatagcacaaagacaaatgattatggatattgttctggaggaagtaggagcagaattccacattcattacatattgtcttrttatcatcccttgatgttttgtgtttggggctcatgaccttggccagtggctccatggtttttatcctgcacaggcacaagcagcaggtccagcacattcatgggaccaacctctccgccagatcctcccctgagtccagagtcacccaaagcatcctggtcctggtgagcaccttgtgttactttactcgctctcctccatctttacatatgtctctttttcctaatcccagttggtggctgttgaacacctctgcactgatcactgcctgttttcccatggtcagcccctttgtgctcatgagccgccatcccaggatacccaggctgggctctgcctgctgtggaaggaatccacagtttcctaagctggtcagatagttctccgatttatgtggattgtcttctttttgtataatgaatggccgtttgttgatttcttcctgcaggttaagcaccrcratgggcagtcaattgcagtgtatataagactcagaatccgtctttgcccttcaaggatttttcacgtatcataaacaacagttacagatgaaatgtttttgcaaagtgctttcataattttcattttgtttgtaatttcataattttcattttgttaatgttgcaatggagaagttaagaggcaaattattaattaaaaatgggcctctaataagttggaacaatgcaactttaaaccaattaataaaaaatgtcatggaattaactgggcacagcagtgtaagaaaagtttgatgaaataaagaagcttaagtaatgatcaatgaagaaagtgagaagaaagtcatagttcatgtccttttttgttttgaattaatcttcattttttcctattttcaagttgtaaaattttctttttgtccttgataattatactttattgagactagttttggttattttttaaaaattctgtccctctataatttttctgatgtgtagatcctgtattcatgcttcttatatttgttcgtttaaaatgaaaagtttatttgctgactacaccaaataggatgcaagcactgtcatgacagaaatatgcagcagatcaacatacaacagtaatttagtttaaatgaagggaaatctgtaaatgttacgacaacgtactcccaagaagaaccctttcttcagttaagttaattatacatttcaataaaataaagggtaatggattagtggaagttagcttgtgaatttttcttaaaaataaaactccaactctattaatccatgccagttaaacactgtaactaaaatttccaaataagcacaaaaggagatgaagcaattagttaccttttctgcttgaacggtctggaggaaaatggttactataaatacagcaggcaaactgttagagtgacctatctagaacatagtgtactaaatttcagtctcaaattgtactaaatgctcatcattagtatggcacatttggtccatgatgtggtttaacgccaagacagatcccaatttgttacagaaacacatagattactgttgctttttgtttttaaatacatatattttaataagccaggtatacttccacatacaaaggcaggtttcccaggagaaatttataggaagtagtctggggtgtgctgtgtaacatgaggctcgccacaacaaagtgctgggtcaaactgaaggaaggaatatcttaaagcgtcatctagttccatgatcgcagcctggttaccacaacaataacagtaattgggtgcactgaaaatagtaaccacattctgatcatgacaccaatggtatccctccattacaagctggtgggcacgagaaaccagtgtgagaccattggcatggttaaaggtttcagaaatgtcttgtccaaatgtgtagccagcacacagggtgaaataccccatccaccacgatcatctggatctgaccgtaatagatcatacattgggccctcatgtggaacttcttgtaaatgacccagggctcttatatgatccagtgtgtatgtggatggagacaggccaccatggaggcagaatatctgtccatctactaaagttataagtggaagataatcaaagagatctgtaaagtattttcaaacattggcattcccatactttcgcggacattcatcataaaagccatatacttgggtaatttgttggcttttgtgatttcctctcaatattgtaatgcattctggataatgaatgctacaagaagagtcacagtctccactgaataatatcctctgtctacatagtcacccattaataagtagtttgtatctggtgattttccaccaattctaaagagttccataagatcatgtaattgaccatgcacatctccacagacagtatcagggcaacgaacctcttgcacatctgatccttttgttaaaatttcctttgccttctcgcacaattttttgtgggaggagagtggtccatttcaaatattttaaggtaaaaatggatgcagtggtctgggtggagtgaaatgagcacaggactgtagaaagaggttttcattagaatttgactcacagccgatgaatatgagactcatcaagaaaactgcctaattttcgggaccctgtgagggtagactatgctgtattagcaataatcccaattagcctgttcagaagaaataagcatcagggtgacctctgggaagtgaatctggtggaaccagtcaccgtcggtggaggagccgacgccagggaccctggggaggcttatgcttccctttttctagggagttggtggtaattgctgccttgaaatattcaaggaagcccatttgaaagaatcataaaacaaatggggtaatcatgtagctgaagtgaaaaatttccacagacattttcttattattgttaggtaaagcaggtaaaatgtcttgaaaattcaaatatttgaaaaatacaatgcataagtttggcctaatggacatatatcgaaattgggctatgtgttgcattactcagcaatatagaacgattgaaataatgcaatcacaaagggagctttaatgaatgtaaaatattttaatcatagagattaaccttgccactattaaatatttttaaatagcttatgaagcaattttaaatactaaacctaaaaactgagcaatattcctaattaatatttagaacttttcagatgaaaagacaataaaaattcttcatattcaagttgtacactgtatttgttcaaaagtagttagagaaaattagatggctgcaaattcaaatgctacaatagaagatgcctgacaatatgtgtttttgatgtcaaactctgaaattaaattataaaaagaagcttaaccttggccaggtgaggtggctcatgcctgtaatcccaccaattttggaggctgaggtgggcagattacctgaggtcaggggtttgagaccagcctggctaacagggtacaaccccatctctactaaaaatacaaaaattagccaggcgtggtggtgggcacctgtaatcccagccacttgggaggctgaggagaatcgcttgaacctgggaagcggaggttgcagtaagcctaaattgtgccactgctctccagtccggccaacagagcaagacactgtctcaaaaaaataaaagaagcttagcctaaataatgcgttatcataaagtataatgtaagtaaaaaatttagaataagtattacatggaatagaataaaataaaattaatgataaaatagagcttactgcaatgttaataaaaatgtgaaaagatatacttaatattaaaaaataaacagtatttaaaacttcatggagatttttaaaaagtctacgttctaagacaaacaactttatgctaataaattagaaaacttagaggaaaaagtgatttctgtcaaataataagatacctaatacatacattatgtcaaaacttaaaactaagcaagcgtaagtcatggatttgcatgtataattaatatacaggtatacaaaatgattgaaaagagttcatttcagaaatacaggacatgccaatgagagaataagctcatattatgacatatgacatgaaaaattaaatgggacaacagcattcattgagtaaatcacttcatgcctttgtaatttttataagtaaattaacttagaaaaatactttaccagagaatgttttaattattggtgataacaatgcatgaggatattgcaataaaacataaatggccaatgagcacatgaaaagatgctcagaattcttattcattagggaaattcaaatcaaaaccacaatgaagtgttaattcacacccactaagatggctatactcaagaagacagagaaacagaactaatagaatgaatatctacatctgtatatcaaggtttacatacttgttcacccacgtgtgtgtgtgtgtgtgtgtgtgtgtatgtgtgtgtacagaatgaagccatttacagtagtgtctcagtagaaggccttccccagccccctccaggttctggattagataacttttttttttttttttttttgagacagagtttctttcttgttgtccaggctggagtgcaatgatgtggtcttggctcactgcaacctctgcctcccaggtttaagcaattctgcttcaggctggcaagtagctgggattacaggcacccaccaccatgcctggctaatttttttttgtatttttagtaaagacagggtttcaccatgttgaccaagctggtctcgaactcctgacctcaggtgaccccccaccttggcctcccaaagtgctgggattacaggcgtgagccaccgtgcccaccttagagaacattttgctcctgcactcattccagtccagcacttgtccttgttcacagtgtggtgtgcctgcctttcacctagggaaatggaatacattacctcatcaacacctctttgtcaatctcttgtctctgctctgtagacttttgagccatgatctgaggagtgaatgtgatgggtcactgggtttctgacaacccaacacctgggtctgctcaggacaggccagacccacatgacatcacccccactgtgcgaacacacatagggaggtggggtgtgactgtccaggtgggattagggtggtggccagacattgactggcctgctctcagctgccagtgttacctttgagtacctcctgaacatggctagaggtgatgatattgagggctgacccaatgtcagcagcttcagaaaaacctatcattcagggttttctggtgccagaaacataggaaattgggatcagcaggatgacatctagttctctttattgtcttcagccaagtgagctgggaagagactgtttctagaatgtgggtgcctggtttccagtgttccaagttctgttggggtctattgtcaaggaagtgaagtcactctttggggtcccttatctggggctactcctgaagggatcttctattgccctcagcactcctggttctcaaaccttcaagtgacaccgctgagtgtcctgggtttctgacttgaaggcagcagataatgggaattctcagcctctatagttacatgagccaatttcttaaaatgaataaacatttattaaatattaatatgtataaatacattgcatgtatttattttaagtaaattagaataatttattaattcaatgatttgagttatttaaatttaaacaatttaaattggttttgtttctctggaatactctgtccgagaggtcatgtcataatcacctgaataatctgcaggtgcaggaatcactttgttcaacgatactcaaccatgatggattgtttagcagaagacagactgacacatttgactctgtaaattctgggaaactctcttctttatcattatgtctcccttttcctcactgggtgcaggttaaggtgcacagatttgattctcatgcacctgatcatagccaactccttggtcattccctctaaagaaatctggcagacagtgacatctttggtttgaacaacttcaatgatttttcatgtgaacttctattcttccttcagagactgggcaggggtgttcctcctggcagcacttgctgcctgagtgtcttccaggccatcgctatttccccagggactccagtagggcagagctcagaataatagttcccgagctcattggacacttgattctctcatgctggatcctaaacacactagtaaataattttcctctttatgcgtctggctataactcaatgcagccatcacaaggaaaatagataatggatactgttatgccatgattcgtgtcaaaatctcacactccctgtgtgcagtgctgttctgattccctgatgttttggatttgggaattatggcttgggccagaggctccatggttttcatcctgcgccggcacaagctgcaggtccaacacactcatgggacccacctgccgtccaggtcctcccctgagtccagagtcacctaaaccataccggtcctggggagcatttatg

SEQ ID NO: 96366 - DNA, 64302 bp, Homo sapiens
gaaaccccatctctactaaaaatacaaaaaattagctggatgtggtggcgggctcctgtaatcccagctacctgggaggctgcggcaggagaatcgcttgaacccaggaggcggaggttgcagcgagccgagatcacaccattgcactctagcctgggcaacaggagcaaaactccatctcaaaaataaataagtaatacaaataaaataaaataaaatcaattatttgctcacttgcacttaaccatgggggaaaacttttgggaaaaggtgaaatggaagttgtcaatataacttctaagctccaagtgtaggacctttcctttttccttccactatattcccagaggctaaatcaatgcctggtacatagtgtttaatttatttagcacctactatatgccaggcatattattcagagacagggtctcactctgttacctaggctggagtgcagtagtgcaatcaagcttactgcagccttgaactcctgggctcaagcaatatgctcaccttggcctcctgagcagctgggactacaagtgtgcgctacccccactgagctgatttttaaaaattatttttgtggagacagggtctcattatgttgcccagactggtcttgacctcttggcctcaagtgttcctcccacctcagcctcccaaagtgctgggattacaggcgtgagccaccttgcctggccatgccaggcatattccaaatattaatttgtgtaataattctatgaggttgggactattactgtcattccctttttacaggtgagaaaattgaggcacaaagaggaaacttacccagaagttcacactgctagtgagaggcaaagctggaatgcaaacccagaactagttccagaggcagtactattaatccttatgtaatagtgccagatatatttctggaaatgacttagttaactactaatttctgcaccttgctttgcttgtaaaggctgttgctacaaatctacagttgactacttctatagaaacccagctgtcttagtctgttttgtattgctataaaagaataactgagactgggtagtttataaagaaaagaggtttatttaactcatggttctgcaggctgtacaagaagcatggcactggcatctgcttgacttctggtgaaagcttcaggttgcttccacccatggtggaaggcaaaaggcttctctcatggtgagagaagaagaaacagtgaaaaaggggaaagtgccaggctctgtttaacaaccagctcttgtgggaattaatagaagaaaaactccctcaccactaagggaaggcattaatctattcatgaggtatctacccccatgacccaaataccttccatgaggcccacctccaacatggggatcaaatttcaacatgaggtttagaggggacaaatatccaaaccatagcaccagcatattagaattgtgtttatttattcttctcaagaatgtattttttttttatcgagaccatcctggccaacatggtgaaaccctgtctctactaaaaatacaaaaattatggctgggcgcggtggctcatgcctgtaatcccagcactttgggaggccgaggcgggtgaatcatgaggttaggagttcgagacaagcctggccaacatggtgaaagcctgtctctactaaaaatacaaaaaattagctgggcgtagtggtgggcgcctgtaattccagctacttgggaggctgaggcaggagaatcacttgaacccaggaggcggagattgcagtgagccgagatcgtgccactgcactccagcctgggtgacagagtgagactctgtctcaaaaaaaaaaaaaaaaaaaaaaattagctgggcatgctggcgcgcacctgcagtcccagctactcgggaggctgaggcaggagaatcgcttgaacccgggaggcggaggttgcagtgagctgagatcatgccactgcactccagcctggcgacagagcgagactccatctcaaaaaaaaaaagaatgtattctttttaaactaaatttatttatatatattttttgagacggggtttcactctgtcatccaagctggagtacagtgctgtgctcatggtttactgcaacctcaacctgcctggctcaagtgatcctcccacttcagcctcttgagtagctgggaccacatgtatgcatcactacacctggctaattttttaattttttgtagagacaggctctccctgtattgcccaggctgatcttgaacacctgggttcaagtgttccttctgccttggcttcccaaagtgctgggtttataggcatgagctaccatacccagccaagaatatattctcccagaatgtcagaggagttgaggcaggatgtgtggctaagagagtagatataaagtcattgctgtggctattaattctccattcccaagtcacccactgtgatataaggaaaagcattagataaattcttggcatcctgtcctagtcctgtcactagctagttgtgagatgtctcaatttattaactcactttaagcctcagattcttcatctgaaaattgggttgtggttgacggagtgagaaaatgtttggattagatcagttgttctgaatcttaactgtacattgaaatcacacggggagctttaaaaactaccaatccctgggtctcactctcagagattttgatacaattagtctggaatggtacctggccactgaggtttttgcagctccttggggacagtctaatgtgcagccaaggtttacaaccagtgaatttgatgaaaacgtgaacatttgttgctactttgttaagtgtggaaacagaaagtcagagaggcttaagcaatactgcccttggacccaggcactgggggtcctgttgtgggccctgatttagaagggccttgctccggctcttcttgggctgtgcccttccctcaggtgaggagaatcatcagaggtgggaggagtctgcaaggtcaagaggacatgcccacaccgagaccctctgtttaaaaccctctttggggctgggtgtggtggctctcgcctgtaattccagcactttgggaggccaaggtgggcagatcacttgaggccaggagttcaagaccagcctggccaacgtagtgaaaccctgtctccactaaaaatacaaaaatcagccggatatggtggtgcgcgcatataatcccagctatttgagaggccgaggcaagggaattgcttgggcctgggaggcagaggttgcagtgagccaggattgtgccactacactccagcctgggtgacagagtgagactacgtctcaaaaaaacaaaaagaataaaccctctttgggtacctaagacctgaagttctctacgcaaagagccctgagcctcccaccagggcctacattggcctcttccccaagtccataccccagggacaaactatgctgcaagtatgcacatccctaagcccaaggggtggctgattttaagaggatgtaaatggaaagtggactgcaggtgggagtgtcaacataggtgtatacagtcattctttgagggctgctgaagccaaaggataaggatggcacaggggtagggggttaaatgcctgcccctactggtttgccaaatgggatgacaacatgggcttccaatgtgagccagaaaaagccctcagggaacgacatatggatatgctgggttagaagtcatactggtgtgtgttgaagtggtaagaatcagtgggcatgcaaggtgggcctggggtaagtccactatgatggttctactgacaaccagaaatggctttcacttgggatagggtgggttggaggtggtgatggaggtgctaagctaggtgttcttgaatagtagtttccaaattaaggacaggtgctgatctgtaataaaattttcttggtgtactaaaaagataagaaaggccaagagcagcagtggtcatgcctgtaatcccagtgctttggaagacctaggcaggaagatcacttgaggcaagttcaaaaccagcctgggcaacatagcaagactccctgccacccacgacccccgcttctactagatatatatatatatatatatatatatatatatattttttttttttttttttttttttttttttttgagatggagtcttactctgtctcccaggctagagtgcactggcataatctaggctcactgcaacctccgcctcccgggttcaagcaattctctgccttagcctcctgagtagctgggattacaggcgcccgccatcacacccagttaattttttgtatttttagtagagatggggtttcactatctgggccaggctggtcttgaactcctgacctcgtgatccacccgcctcagcctcccaaagtgctgggattacaggcataagccattgcgccgggccacaaatttttttttaaagaattagctgggcatggtggcacctgtagtggcacacctagcatggtggcatgctaggacctgtagtcctagctactcaggaggctgaggcagaaggatcacttgaacctgggaggttaaggctgcagtgagctgtgatcgggtcactgcactccagcctggagtgagaccctgtctcaaaaacaaacaaaaaaccaaacttggataactgacagagtttaggatagaattacatggaaaaaccaacaaaacaagacaattattaactccagaaaaaactaaaagttgtgtgggaaaggaaaagtaatcatagtttggtacataacttggctgtgactaccgtttacatgattataatagcatatatactgaagattaatcaaacagaatataactatcttgggaagatggagagattaaaaaaaaaggttgggggtgaatatggggtgaaagtgatggagaaaaagagctgaagtctcctctggtgtctcagcactccacccaaggtagagcctctggatggaagaaggaatctcccacctctccaccacactcccccaggatttaccttcagcatcaggtagctaggggcaagatgagaaatgctgatatgctggtctctgactgggagctgtgggaagagagaggttctgagttgcagcagtctggagtggagtctcttgctgaacaaagggagaggtttggtttaaataccacagactgactctcacattctgatccaagagttttcatagattttttggaacagatgtttcttcatttgctgtttgcccttaggaccatttcaaaggctttaaatggttaatggttgtttgttgttttaaataattttcagtttcactaggggtgaatcccgagctcttcatgccgtcctgctgttagtctctcttggtattattcttcacctttcctgtgagtttaaaattatctcaagaaaagttaaagctctttaagaatcacaataaagtagttattaggaataaataaaaacgtagaggggcgcggtggctcacgcctgtgatcccagcactttgggaggccgaggcgggcaaggatcacttgaggccagcagttggagaccagccttgccaacatggtgaaaccccatctctactaaaaatacaaaaaaaaaaaaaaattagtcgggcatggtggcttgcacctgtggtccccgctacttgggaggctgagggctggatggtttgagagcgggaaatccaggctgcagtgagctgtgatggcgccactgccttctagcctgggcgacagcgcgagaccctgtctcaagaaggaaaacaaaaaaaaacaaacaaaaacatacacacaaaaaaccacaaagtgtgttcacgtttgctatgactcccagacaacaattgtaaacactcgcgccgggcgtggtggctcacgcctgtaatcccagcactttgggaggccgaggcgggcggatcacgaggtcaagagttcgagaccattctggccaacagtgaaaccccgtctctactaaacacaaaaattaggcgggcgtgctggcgcgtgcctgtagtcccagctactcgggaggctgaggcaagagaatcgcttgaactaggaaggcggaggttgcagtgagctgaaattgcgccactgcactccagcctgggccacagagcgagactctgtctcaaaaaagaaggaaagaaagaaagaaaaaaaaaaacactcgcagtgtttactcctaacgcgtggaacttgtgtcgacatccacccccggttactgcatactcagtcacacaagccatagcaggaaacagcgagcttgcagcctcaccgacgagtctcaactaaaagggactcccggagctaggggtggggactcggcctcacacagtgagtgccggctattggacttttgtccagtgacagctgagacaacaaggaccacgggaggaggtgtaggagagaagcgccgcgaacagcgatcgcccagcaccaagtccgcttccaggctttcggtttctttgcctccatcttgggtgcgccttcccggcgtctaggggagcgaaggctgaggtggcagcggcaggagagtccggccgcgacaggacggtacgtgccccgcgctcgacccccgcgctggcggcgccggagctgtcccagaccccaagccccgacgcccggccctgagtcagcattgcagcaggccctgcgccgccgcgccccgcgtcccaccccgcgccgctcctcacagccctgcgctccgggaaactgcaggtggccggcagtggccaggggatggcgggggcgcttctggaacctgactcagttttgtaggttccttatctcggttgtttaccgcgggctttgcggaatgcccccgcttccgtttccgcccggctccgaacccccgaaccccttctacccgcaactccgccccggattcccagaaaggggcgacctgggccacagcggtacaagctgcaccccgatggacctgagagaccggaagtaacccttggccaactctggccgccccctgcagccgcagccccagaggcccacccgcgagcttcagtggcgggccctcagcgtcgtgtaaactttgcttaaaatgatcttgagagttcaattcttggggtgaactgttgagaagatctggcatttttcctttcgaaagttgttgggaacgtggactttcccaacaattgtgtatgcgctcgatctcactcagtgggagccgccgccctggagggaatttcacaatagcctggtcagggcggttattttccagagcagtttaatgtctattttgcccaagtgcaaggaaagcttgccttgggaaagctgggaatgcttggctaatgaaaagtttttagagccttttaaaatgaacctgtttctgccacttttccaccgcctcaaaacgactgggaaatgtaaactggcttcaagatgttcttgcttgagggtgtctggatttggacagaaggccatgttcttttaatattaacagtggcacgcagtagaacaaaggccactgaaattcagaatcagtttttggctccacgggcaggaagtaaattcaaggacgccagaggtcttgcgaatattttaattggttgacatttgaaatttgttcttaagcaatgaggggtgaaaccagtagggggatagcgtatagcataagtaaagctttttggacatcaacaaactgcgataatctacaacagacagcgggctctggaaggtttgacctgctttagagagagatttccgataagaggaacggagtttttggcacttttcggtttggtgattcccctaaataaccttacaaaagtttcgttgaacaaaaaacctggctggagctccaagatcttttttttttttttttttttttgagacagcatttcactcttgttgcccaggctggaatgcaatggcactatctctgctcaccgcaacctccgcctgtcgggttcaagcgattctcgtgcctcagcctctcaagtagctgagattacaggcatgcaccaccatgcccggctagttttgtatttttaatagagacggggtttctccatgttggtcagtctggtctcgaactcctgaccttaggtgatccgcccgcctcggcatcccaaagtgctgggattacaggcgtgagccaccatgcccggcccaactccaagatctaaacaaaaaagactgggttgaaagggagtttttaatgtttactgtttgctttacatccattttcttgttttgttaatacttgctttacttaagcttttgggtcaaatgtcctcgttaaaatggctttctctagcgactttatgttttacgtttctgtttgtaactgacatttgaccttcttttaacacggtattacttgcttccttataccggtttccaaggtgaagccatttgcagggtcgctgggtttccccctccccccgaaagtcttgcgcgacccggggtgggccggatagtgtgcagttttttgagccttgggctggggacctccaggaagctgaagcggaaattgcctaggcccctggggcattggaggtcctaccgcagctcctagtaggtggtgggggcgcagcggctgtccccactcagtcctggtggggtcgcacgtaacggtcctgagctatgcataagccgtttgaccacgcatggagaattttaccacccagagacacgcgagtggccctgtgcaagtttcaactgcgcggggggcggggaattccgcagacaggattctagaatttatgtcttgtgtggtaacatttcagccggtgggtggcggggattaggcgtgaagcrgttcagcaggcagaggttctcggacgccctccggcgaagccacctgttgatgcttttgactttctgtccttgttcctcgtcccatctggagcatttccaattctggttttgcggagcagcaggtctgagcttgtccggcgagggtgggagttggtcccggcggagatccagtgggaagagccggcggctgcccgggcgtgagtagaccgagaatcctgcccgatccccgcccctgggctggtgtcgccctgggctcctgggacgtcggggcactgtcccccgatactggcagaaaaggattgagtcctcgcttttggccctaggtctccttgagcctccagaggactcacaacactccggggcatgttgctctttcaaataccaggaatggactctggggaatggggcacccttgaagtctgattatttcttccctgtagagccccaggggctaattaaactcgtgtttatggactccaatgcctccttgcctttaattcagtataatcctaccaacatttattgagcttctctgggccaggcagagttctgggtgccgaggacatagaaatggatctaaacttggttcttgtccccataacctcacaatgtggttgaggaagactcagcagttacctacacaggtaacttcgagtcaaggcagtttagacaagatccactgacagcctgactggaggaagcctgtgggccatggtggggcagttatgacaccatgggttctttttgtttatttgtttgtttgttttgtcttttcttttagtatgcccaggtaacttgcagaacccggtcgttctttcttactatagatcagtgaggtgaaaagcactatcattattggaatgccctgtctctcccttatactctcttcctgtcatctcccctcagaagacttgacaccccaccctggtgccctttctctgtactttcatatgctcagcggctgtctttgcacttgcttcaggattgtacctaacattctgtactgtaatgcattttcttcagacactcttcagtcaagttgtattataattatgagttaaaatacatgcaaagtaaatagagaaaacctccaggggttcattccgtagagataaccaaaggtttcagtttaatgttttttttttttttttcacacatgtgcgctctcaaatacagtcttttacatatttttaaaaataaacactcaatttttttggtttattttctagtttgcaagatatttcattttttaaaattgtgtttatttacaacctgcttttttctaaaaaagattcaaggtggggccttcttttcttttctttttttttttttttttttgagatgaggtcttgcttgttgcccaggctggagtgcagtggtgatcatatctcacttcagcctctaactctaggctcaagcagtcatctcacatcagcctctggagtagctggawctacaggtgtgtgccaccacacccagctacatttttttttttttttgagacagagtctcactctgtcacccaggctggagtgcagtggtgctatctctgctcactgcagcctctgcctcctgggttcaagtgattctcctgtgaaaattgcttccttttctacacttgttctgtatttatgttcctctgatggtctccacttctagccactttctttttttggcgatttaagtttttggcccaaatagataaacatcttctacattatttttctcttattctcgatactgggttgccatctttggtgatttagtacttattatgaaagagagaagctacaccacttgataccactttcatctgcatactcatgataatttgtatcttctgcagtgaactcttaagttgaagaaatgaataatttatatgtatatttgtatacttttaaaaatgtaattgaaaaatcctctcatagttacttaactccaaggtttaaaaatgcttcccagggtaatgagtttctttagtcatgtgactttagaaatgggaaccaaagcttccttatctacttgtgaaattcttgagttttttccttgaacttcctttttatcttccctttggcttatatatctgtgttttttgtttgtttttacttgcagctttcaaaagtagttttcaaagtcaatgagattgtttaaaagagtaggtacctgacagtctcttgcttgaatactatctagtgagtgaaccaaattccctgcaacaataaccacaactttgaatcaagagttaaatgaaaaaagtaactccttcagcatttactgagcacctgctggggctgaggaatgggggcatgtagatctccctctgctgtctggagctccctttctggttggaaaacatagaagcagcgcaaaagtttcacccaaaaccttggccatggtatgctattgaaaccccatagttcagattttatacttgagttcttttctaagccatggctggattatgttaatctggcaaataattataaagctggattattttaatctggtaagtaattataaggttgtgctccgtgatgtagctattaataaaatatgtggtagcacagacaagttgtatatagcacaaagctatacccccagaggagacactatatcagttgctgtctgcctaggctttctgtaaacgtgctggctatcattcagcctaaatgtagaatgagtctatccctttaacctgggccatcaccaggaatgtaaaggaacctagaacgaggacccaggcaagagatgagaaactaggggacagatgagtaggtaccagggatggtgatgagactgaagcaagtggggaatttttattttcttctctacttttctctattttccagattttcttagagcaaaaagcaggtagtgctttttacagaaaatgaatgctatataaaagtaattttaagaactttatatatccctagtgttatgtacaatttctgactttgaatagagatatctcccaaagggccaagtttggccctttagttacaatggagaatctgttgtgtaaactgagcaaatacacctgccaagttgaaatttaatttaagccaatcttgtctagatgaacttaagagaacgtctcctaaatattttattgcagtagtgtagcatgattgatagtatgctattctcttgaatagatggggttgtttcttgagccactttttattcctttgatcaaaaccttgaggagaargaatgcctgttttcctgactgctgttgcatgaagttagacatccagttcctctaaaggtgacatcagatggtttagatacctaaaaagaagtgaggctaagccataggtcttcttcgtactacctgaagttgagacctggtctctgaactcagttattgctgaagcattaaaatcttacatcttgcttaaactcaggcagcttgacctgttctcatttttctctatcaaataaattgaagcctggtaataaattgatgatgagttccaaacatccccttggttggagacattgtattctccccactcacaatgaggtcctgccagtttccagaaaattttgcatgggggcttacccatccttttagaatcacattgcaagtcactctaaagcattagcattgttatctcatgtagctgcaaaagcttcctttcacaagctcttctggatccaacaaccagattccaagtatggtatcttaactacaccaccagctccatcttgcttcattgtatgttatgaagggatgagtaagcgttacacatgggctgcaatggtccaatgatgaccagtctgttcaagacccaagagggctgagattggcagccctggccattgtttaccacagcctaatgaagatgagtaaaagcctatctatccccaaggacctccacatatgacagtactcaactgagtctcacataggatagaataagataaaatgctggaagagaacacaaatagtgctacaaagcaggaagagagacttgatttggggatcaagacaagcttatagaagagacatcttgagagagaagatataatttcaggtacagactgagaggagggaaggggctttccaaatggaggcaaatgcttgagtgaagttgctgggacagaaaaatactgtccagggaacattgagatatttttggttcggagttagattatgggttgggctgaagtggggatgatactcttagtgcttgagctatgtatcagaagtttgtctatagtattatgcacaatttctgattttgaacagagctatctcctgcaggaccactcttggcccgttagttacagtgggcaatccgttgtgtaagctgagcaagtatacctgccaaagtgaaaatttaaatttagttaagggcactacatcaactgatttagctcccttgctcctggtgactttgcccatgtttctatatccaattagatgatgatttatgatcttttgatttagatgctttctcatttctgattcattctcattttctgcagcctacacataagtgttaggaaccaaggaagttattggcgataatgtctggttggaatttgtgggagcttccttgagagtcatgaaaagtctgttcttagtctgttttgtgctgctataacaaaatacccacaaccaggtaatttataaaaaacaaatttatttctcacagtctggaggctgggaagtccaagatcaaggtgctgacatctggtgagggctgctccccgcttccaatctggtgccttgaacactgcattctacggaggggaggaatgctgtgtcttaacatggcaaaaggtggaagggcaaaaagagaaataaactccctttatcagccccctttataagggcatctaatcccattcaggagggaggcgcctccagggaatgatcacctcttaaaggccccacttcttaatcctatcatattggcaatacctgaactttggaggggacacattcaaaccatagcagcctcatcaaataattttataaaatatgacttctaattttatgtcattttataactgggatcatctgttgttctgcacgccaatggagggggaaggtgaattttgttatgttcaagatgaatgcacaaaacttctgtgagatggccacattctactttacccagaattgtgcaacctcttctgcttttagaaacttctggatgacactttgtttcatgttcatatctccactggggcttcccagacacctgaaagttcaggtttgcatgctgctttctgcagctggcaagacaggtttctccattgccgcccagtttgtggggttgcaagaaattacatttgcattcacgctgtggctcactggacatgacattgctttcatgccatacgatgaccttgcttcactagagaagcagtagaaagaagggaatgttaagtacgtctttggatggcttagctggtcatgctgcatgctttgctactgattacagggaacaatatgtgcctttgttaccagatagtttgggggcagcgttggtgttctgtgagaaaggttgagaggcctgactaaacttaaccacatttgctgacacctggttagggctaatgtgggtaccagggaagtgtgttaagtgcttcaatagaggtgttttgttttgttttgttttgtttttcgagacggagtttcactcttgttgcccaggctggagtgcagtggcgcaatcttagctcactggcaacctccacctcccaggctcaagagacttttgtgcctcaacccctcgagtagctgggattacagacatgcagcaccacggccagctagtttttgtatttttagtagagacagggttttgccatgttggccaggctggtcttgaactccttgcctcaagtgatccgcccgccttggcctcccaaagtgctgggattacaggtgtgagccaccgcgcctggccagttcaggcatgaactttagaaatttcacttagatggaaggtagatttggagagggtgaggtctaaagcagggggaacagaatggctaggggaatgagtttggatgagagacggatggtaggcaccagcatttaagggacaggtgcagaaagagtatgctgaggagtagaagaaagttagagaagggtctgtgtagaatatagtggtgtgagctcagccaagggagaagagtttcaaggagggatgaattagcagtgtcagctggagttgagcagtcagatgaaagaggacttccaagtttttggatgtggcaaccaggaggtcaccagggcctcaacaagagctgtgtcatcagggctgggatactagcaggggcaaacgaggcactggcttcaggacaacatgtgagggggtgctcaaaaagtcagtcatcaagatagataatattttaatgcaatattttaaaaaacagacataaatgcaaaaaatctatgatgaacaaaataccaacattttaaataaagacagcgtcagtattgctgattgtcccttttgcctcagattccagtatggctcaggactgagtgtggctgtgtagaggagatggtggtgaggggatccaggtggaggcatgttgagaagtgaattgtggttgaagaaactgaagcactgagtacagactattccttcatgaggtcccagctttatgtgaaagggaataaagtgaaaggatggtaggtctaggggaccctcaggcttttttgagggtttggctttattttttaagatggaagagacttgcacatgtttacaagctgggaggagccgtctctggaggtagagaggatgaagagagtagacataggggattagtagagacaggagggcacacagggaggcttagccctaggcaagcagagggacaggagggaccagctggggcagtggaaaggtggaaggtggcaggagtttgtgcctgatacatggatgagaaatggcactgggggtggtgttgggatggaagagagttgtggagtgttggaggtttcccacactccttgaagggtgtgggaaaggagctgaacagagtcttcctgtaaatgaaactgttgagcagccgtaggggcccagctcaggaaaccaccagggtgtggtggtgagtagttttcagattgtgttatckcttctcccttccttcggaacttgctactggaggtgtaggagtggtagaggcttcctcattaaggcaggggtgctggagcgatcaaccatccctgtttgcctgggactgaggggtttcctgggactcggtcaccctagatgttgcagggctggcagtcaggagggaaaaaggccagataattgaaaatgctggccagagtttgtagcatgcgctgtctgattgttgtacctgagcgagttagagaaaacgccacactttgagatgaattaagagtccgtttatttagccggcggccaagagacagctaacgctcaaagttctctcagcctcgaagaaggggctagattttcttttatactttggtttagaaaggggaggggggggtctagttaaaacaattttacagaagtaaagtaggcaaaaaagttaaaaggataaatggttacaggaaagtaaacagttccaggtgcaggggctttaagactattacaaggtgatagacgcggggctttgggcgttatcaatctgacgaattcctgagaactgcggatattgctggccacagtatcttatcagttaattgcattcttggatgtgctgggagtcagcttgcacaagttaagtccttgcggaagggctgccagtgaaacagccaagatggagtctgtctggctctcttagctaagggagagtcaattcaggtgaaaacaaggctaagtgattaaaggaaagggagagtctaaaaacagcgttagtaaaaacaaggttgggcattacatgatcactgggtctccactgtcagagggtctttgagctcagttctagtggcagcctcctgatcctcacttccctggctgaggcaaggttgttgcagcagccccaggagtctttgttagaatcccaccccagagctccttcctccagtcctctcagcagttttgttagttccagtattaagtgtaatttctacaaaaaatgcctggaatatttctgtttccagaaccggatgctcctgttagctagtgtgtgaaagataactctgacttgcctaagctttgttgatgttttgaataataattggcgatagtctcttgacttctgcaagagaaatgaaacagaaattggtctcaagttttagttgctcttgtgaaggtcagggacagtttgtaccagggtgtgggtgtggaaaagaaggggagatatagtcattaaattagaatatgcctgtgaggggagttaaggggaattcctttaaaattctagaaaacacacacaggtgccaattttgtctggctagggaaaagtaaactgctgaaaacacttggggggagaaatgaagctaatggtatcttgatcagtcaggaggattgggtatttgaaagcagggaagaaaaataattggacttggatattcctttgccccttcatctgagtaaggtgaaagcaagtgactcttcagaagaggcgaatgggacactgagtccagcagctcaggcagggtggagttggtaactgatgggcacaagtcttttactgggctctaaagaactcattcatctgggtgtggtggcttacacctgtaatctcagcatttcggaaggctgaggtaggagaatcacttgagcccaggagtttgagaccagcctgagaaacacagtgggaccctttccctacaaaaaactgaagaccttatgagcttccctagtctaagagtaatttttatgttaatttcttggcttgggcttaaaccccaacaaagtggtgattattcggaccccagccctacctctccctagtatgctctcctttctcaagtactcaccacctctagccacagtgaactgcctccagcatacacacacgctgctattttgttgcatctgagtgggctggctccacacgggatctgtagtttccttttgatattttctttcaatgtgccagatgctaccactgagtaatctagattttgctgccaaactctacccccgttagcacagagggaagacagtatgccagtgctcttgctgagtgtgcgtgactggcagaaagcagtcatgggtgtgatggttggaagaaacaaactgagcagataatgttttttaaaatgattatctcattttgttaactcttggtggcattgttatattgttgatacttatgaattacaaaagttagatgactgtaaaaaaatagagaattaagcatttcatttctagtagttctgtttggttctttttcaaatatgtcagtgaatttgtataatatctcatttcttagtcttgtgtttaatgattttatttttgtgtttttataattccttctactgcatatattttatactttaatttataataacaactgttgacaaaattgtgactattcattaatacagtagaaaagaacttggcctccttttcatggaagctgatgatgagattaaagcactgttggcctgygagtggagtatagatttgggctgtccagaacacataaaatttgtatttatctttctgataaaaaaaagtaaaatagtctgagtgccaatttttccactttcattgagcacatttaattttagtaaatttaacttagcaaatttaatttctccagttatttacaaataatcatatttaagtgaagttgggatgaatgggcaagcccatttcaaatttctaacctaatttttcctcttgttttcatataaaatttttctatttatgtgtttttattttaagatagctcaaatcttttgtggactgatactgtatgtatataaataaatggattcagtgcttctttcactaaatacagctagataaatatataaatatacttgaacacaaatacaaagcaaccattggcaatttagagttgggttgtgtttccacttattttttgttaataaatttgattttaacctgaaatattgtcttgtaggaacagataaagaacacaagaggtgatttaacataagttttagctgtgaaacttagagtagataggttagcaacttaaattttgaaagaaaataggatgagtttcaatggaagaaattaagaacacacccattgcatgagctccttacccctcctacccagccccctcccaggagtgagatctttccccagatcctctgtaacttccagatgttccactgagaacatcagaagcactaatggcaattgctgccatgtagcagtgcattgagagtcagggcctctggcacctccatggggctcagggtctgaagacgtgatccaaacctgacaacttggtggcaggttctgtgagcattcatgatgttgtgaaaagggcttggggtctaggaggatggcagcagaggtttctgccctcaggtgtgagtgaggggcttttgaagtaggagagcaactagaaaaaaggagtggcacagggacagaaacttcttttctccattgtttgttcaaggccacgtgggtggagtcattgaggtggaggtttaactctgtgacataagtttccctgatttagtcaggctgtctgtcgttgggcttttcccacttccttctactacgtacttcttccctattcctcctactgaggccattaaacccttagttgtaattttccctgaacatgctttacattctgatgaattctgaaaaagaatgtggggtttccttgcagatgagttcatctgttgtttcatttcctttacaatgtaggttttcttctctgtctttttggattagtctgtttttggttctgtctaccaaggatccctttctttagacttctatagatccctttctatagaacttaatctacttaagtcagggagaccacccagaaggaaagagcccatactttcaatcttaggcataagttagcttgataagattttcagaaaaattcccttttaaccacagaactcccccactggaaaggattctgaaagaaatgaagtcagccctcagaaatgaagttgactgcctgctggctttctgttgactggccyggagctgtactgcaagacccttgtgagcttccctagtctaagagtaggatgtctgctgaagtcatccatcaggttgaagaagcacttgatacagatgagaaggagatgctgctctttttgtgccgggatgttgctatagatgtggttccacctaatgtcagggaccttctggatattttacgggaaagaggtaagctgtctgtcggggacttggctgaactgctctacagagtgaggcgatttgacctgctcaaacgtatcttgaagatggacagaaaagctgtggagacccacctgctcaggaaccctcaccttgtttcggactataggtaattcatcaactcttcctgaggctgggtgggtgggagggagtgaagtgtctcagactctactgaatggcagaaacgaggataataagaagtgcagccactttactgtctctgcccacttatccaactgccagatgatgtcacttcattcctgtgagccctttaaattcttgaaacttgttttcttgctttctttttctttctttcytttttttttttttttttttttttttgagacagagtctcaccctgttgcccaggctggagtgcagtggcgtgatcttggctcactgcaacctccgccttctgggttcaagcgattctcctgcctcagcctcccaagtacttgggactacaggcgtgcgccaccatgcctggctaatttttttttgtatttttagtggagacggggtttcaccatgttggccaggctggtcttgaactcctgacctcaagtgatccacctgccttggcttcccaaaatgctgggataacaggcatgagccattgcctccagctgaaacatgctttctcaaaggaattgggatcatatgcaggtagaagggcagctggtatgtgtttgcctgaaggatagaatgacaagacgtgaagaaagataggaatgactaagagctagtcattcttgccagcctctgacagtgtgagatctgcagcagtgtttactagttcattttctgtgaagtcagtccttgataatttgtggtacaaagaaaggaaataacaagtctgacagtaatcttcctacctttgtagagactccatcatcccttctgaatccctgttggccctaccctgctgaggaagtttatcagggtgggctcccttcctgcacttcctgcgcttggagacattggagagcccacattgaaaatctcttcagttaaccacatttaagtcccttcagtccaaagaggaaatggccactggagtctgctttagttcccacaagctttgggttgctccttcctcctgttcacatgttaatgtctttagaggttcagaggggcatggaagctactgagagactgacttcctggggaaaggaagataacttgtaaccttaagttggtgttttctttttttttttgagacaaagtctcgctctgcagcccaggctggagtgcagtggtgcgatcttggctcactgtaacctctgcttctgggttcaagtgattctcctgccttagcctcctgagtagctgggattacaggcacgcaccactatgtctggctaattattgtatttttactagaaacagggttttgccatgttggccaggctggtcttgaactcttagcctcaagtgatctgccctccttggcctcttaaagtgctgggattataggtgtgagccaccatgcccagccggtgttttttctctcgaccaccagccttttattatgttgataatgtgtatttggagatgataattattatcaagaactatactaaagagagctgaaagcagtgtgggctttggaaagtatatgagatttgaacttggaaagcctgtttttttggtttttgtttttttgtttgtttgtttgtttttgagacagggtcttgctctgtcatccaggctggagtgcagtggcatgatcatagctcattgtagctggaagacctgtttcaagcctcagatctaccaattatgggccaggcaggctgggccaatcactaaccttgttgggcctctgttttsctacttgtaaagcgaaaaataataatacctgactttacaaggttgttgtgagcatcagttgtaataatttactatgtgaagtactttttaaactgtgaagcactctacagatagaagggattattatcattgttattattattatttttttaatcttccacctattcagccatcagttttaatgtcagtaatcttcagactttccgggaggcaccaactgagtttcagtgaatagggcaatctctccatttcccatttccttgctatgatgagtggagattcttcaggccctctgggaagggttgcgggggcagttgaagaggagtgctagatttatttattcatctggtgagtgggcttcattgtgtattggtgctaagtgttttggtaagctctaggacaaaatgaaaagtctgccatcctcaagaatctgagagcctaactgggaaaatggccttgatgacaatgtcatggtaacaatactaaccacagggtgtccttaggagccccagaaaagtgtggttgttggttctcaaagtctatttcctagggggggawawatatatatatatatatatatatatwgtgttagctccagccaccagtgagtcaggagaggctttctaggcaaagacatctaagttcagaatccttgtgatccagatgcctgtaccctttgagttcagaggtgggccagggtatctcaggtatttctttcctttagcatcttgcaattcaaaatatggtccttgaatcaacatcacctgagagcttgttaaacagagaaggctacttcaaattctatttctgtcttttatgttagtcatttgggttcttaagtcatttcactgtaacctctgggggagctaggggattctttaaggaagtttccattctctgagttgttttcagaaactgttagttggcaaaggatgtaccatctcctattaaacgggcaaggacaagttcccttttctgaggtcccttaagatctcttcctggggtgatctaggcttgctgttttatgagggagggacatatttacacaggggcaagaactagtcttttaatccattgttgcataggggaggcgtgggcacttggagttgtcttaggactgatgtctgaattaactaaatgaacttgtctggtttgcagagtgctgatggcagagattggtgaggatttggataaatctgatgtgtcctcattaattttcctcatgaaggattacatgggccgaggcaagataagcaaggagaaggtgagttttcttcttttggttcatggccccaggagcctatcagaagtgggagctactcttgttgatacagagagagggaagcaggcagtctgccgccactatartgggagtcagacatctcaggtggcttttaaacaacatgaatgggaagagaattggtttatgaattgaagaaataggattataacatcttctggtgtggtcttggatgtttctttcatccttggattttatccttgtttctgtaaaattcataggtctggctcatatgtgtttccctccctggtttgatggggttgtggggaagacatcccatctgcttgtgctgggggaaaacaggaaggaggtgctagtccactatagtatcactctcctactgccatctatttctcctcagctgactcaaggtcattgtggggtctaggctgcatgtaggagtggggtggggggaggttcttgtgactggtgtatctgggaaatggtaaaagtagagatttagagttgaaaaccaggaggccgggcgcagtggctcatgcctgtaatcccagcactttggggggccaaggtgggtggatcacgaggtcaggagatcgagaccaacctggctaacacggtgaaaccctatctctactaaaaatacaaaaaaagtagccgggtgtggtggcgggcgcctgtagtcccagttactcgggaggctgaggcaagagaatggtgtgaagctgggaggcagagcttgcggtgagctgagatggcgccactgcactccagcctgggtgacagcaagactccatctcaaaaaaaaaaaaaaaaaaaaaaaatgaagaaaagaagaccaggtagtggtgaagatctcggggatgtcatgattgctagaaaaatatttaaaatccatggccaggcacggtggctcacgcctgtaatcctagcactttgggagactgaggtgggcagatcacctgaggtcaagagtttgagaccaacctggccaacctggtgaaactccgtctctactaaaaatacaaaaaattagccgggcgtggtggtaggcacctataatcccagctacaggaggtgraggcaggagaatcacttgaacccaggaggcggaggttgcagtgagtcgagattgcaccattgcactccagcctgggcgacggagcaagactctgtctcaaaaaaaaaaattttttttaactccagttggcctagcacaatggctcatgggcacagtggctcatgcttgtaatcccagcactttgggaggctgagccgggcagatcacttgaggtcaggagttcaagaccagcctggccaacatggcaaaaccccatctctactaaaagtacaaaaattagctgggcgtagtggtgggcgcctgtaatcccagctacttgggaggctgaggcaggagaattgctagaacccaggaggcagaggttgcagtaagccaagattgtgctattgcactccagcctgggctatagagccagactccatctcaaaaattaaaataaaataaaataaaataaaataaaataaaataaaataaaaaaatataaaataaaataacattctagttggccctacatggtactgttgacctaaggataggccaggaaatgtttgagaacctattgtttctaaaatatgacaataggtcctcaaaataggcaggccagtgcctgcctgtaacgattcagataagtcattgcttgagaatttcctcatgttcctaatgattatagttttgtttcttaagtcccatcaaatgcaaaatgggaaggaaaatgaaactagaactccctttttggtttctcctagtaattgtctctcccagccatttatatatatctaaattatgattattattttcaaaaataaagatagcacttcagtaactaaatgttaaatgcaaaggaaatagatcccaaagcaatgcctgtttctgaaatatcgttcgttcataatcactgtggcccaaggtaaacgaatagcagaatactcaaaccttgttgtaatttcacttttttataatcccctgagtcagaacgtcagaatgagttggaaggcccaatattgattcaaatattttggaaactttaaaactataacatgtgatttttctcataaagtctttccccagctacctttcttctcctttttcagagaagcccttagagtttttcactatgacaccagcctggccttttggaaaataataaacttaggaggattgtcttttcagccctgctctttcacggtccttctcaatgacacaacatggcacacgtgtctctctgcaaccaaggagcagattgatgaccaaaagacttaccaccacctctgttctgagtaaaaatcaggagtctaagttgctcatgacagagatgtctggtttaagatcactgaaggtcactgaaagggctcatcttgtcacattttcttactgctataaatcacatggactgaggtttgcatttggggcttattagtcagctctattttttttttttgagacagggtctcgctctgctgcccaggctggagtgccgtggtgcaatcactgctcactgccttgacctctgagttcaagtgatcctccacctctgcctcctgagtagctgggaccacaggtgtgtgccaacacactcagcttattttttttattttttgtagagatgggggtctcactattttgctcaggctggtctcaaactcttgggctcaagcagtcttcctgcctcagcctcccaaagtgctgggattacaggtatgaacttctgcacctggcctagctagctctattgacatttgttttttgttggtggttctcttagagtttcttggaccttgtggttgagttggagaaactaaatctggttgccccagatcaactggatttattagaaaaatgcctaaagaacatccacagaatagacctgaagacaaaaatccagaagtacaagcagtctggtaagaattttggcctctcagtggtctaggggaagtactctgtgcatgggggtgggcatcatgactgataaatattcatttgttggataggtggatggaatggaacctggatgaccaaagcctcctttagcttgtggctagaaatcgcgtccctttatattcttcatatcccagatctgccaactccattgccctgtatattcatgatctctgcaaaatgctgccaagcagttcttaacatttcagtcttcaagaaagaatctgggatctgcacaggctggcagagctatggacattcaggggttttgcatgtatgctgaaccctactgccttgctctggtatttggcctcacaaccactgtccaacttcgggtgatgtcacttgggtctcataccttccttgcatgtgtcccaagtttcacaaaacctccttatggaaaagagcacattcgatttcttccttgataaaagggaccagattcacattggccttctgctttacttgcattcctcattgtcttttagactcagcctcagcttgggctttgttagcaagttcactgccaccatagcatcacagcctaaagggcatggctgagactcattgatctatagagcactcttttaccccaacatactctaaatgactgatcaaagatcaaaaacagaagagcatttatactccattcttgttttttgagacctgcttgatttattccgattatttaacacacagggacgcaacagtgatcccaaagtgtgtaaagttaaagccttcaactgcagctgaggagagggcaggaatggggacggtggtgagtcaggaatgacaggcaggcagccatgaccagggcagcctcctccccagggccagggactggggagtggcctaaggagcaggacctaagggtagcccagagctggggaagggggcagagacctccccttggcctaggtctggagctcagaagtgccacatgcctgagggggcagcggcctgggaagggccagaggcagggtcaggagagcaccatttcctggggggctggggacagggaggtgccctataggagaagccaggaggggccgtctgcccctgaggtgggggctgggctggagcaggctgcagcaagaaagacctgaggcaggcacagggcctgagagcccagctgcctgggttcaggggggctcccagggcagcctggcccagggagcagtcctgactctgcaggggatgcccagcaaggggggctgcagacccctcagagcctcccctcctctctccctggaaaggagctggggaacccatagtgcaaatctgtggaccactcagttatggagggaggctgtgcctgaaggtggacactggggtgcactccctccaccatctcgccctgcaccgctgtcctcagtacagccacttctcgtaagagtgcaggccatggatgccaccgtcgatctgggctgacatggtctgcttctcaaacttgagctcccctgagtacatcatggaccgaaggacagacaggctgtgggccccgatatcctggcagccatgctggatgcccactatgaggtagggcacgaacttctgaatggaccctttgtcctggatggagcccaagacatcctgcgtgatcttcgccttatccccgtcgttgaagtattgtttctggctgctgctgctcttctccatggcatccagtgagcccatgccctggtacttcttgagctgcattccgtctgagaagaagcactcgccgggggcctccatggtggcggccagcagggagcccatcatcactgtggaggctcctagggccagggccttgaccacatgccccatggtctggatgccaccatcggctatgatgggcacaccaaagttctgggtatgcttggccaccttgtacacagcagtgccctggggctgactgcaggctatcacttcctggttgatgtagatggagccgcgcagtccatgcccctgcccagcccatccacaccagcgtcaatcaggttgttggcctgggctgctgtcaccacgttccccccaatcacctggaggtggggttacttttgtttgatgtaatgcaccatggcgatctgatacaccgagttcccttgggacgagtccaagcctatgacattgacgcctacctgggtgagcaggtccaggtggtatttgtcatcctcatgggtacccacagctgccccgcccagcagctgctcatgggaatccttggaggccacagggtagtctcggttcttcagcgcggtgcaggtgataatggccaccagctcatcgcgatcattgacgataggcagcttcctttcttactaagctgcaggatctcatttgcctctttcaacctcacactgctggagccaccactagcttgatccttggcatcatcacctcactgaggagggtggtgtggtccttctcagcaagaaagtcgatgtctcgggaggtgacgatgcccaccagcttgctgcccatggtacccgtctcagtgatggggatgccagagaagccatgacgcatcttggcctccaacacatcacccacagtgtgcaaggggctcagcaccacggggtgtgtgataaagcccggttcaaacttcttgaccttctgcacctcactggcctggaactctggggtgcagttgtggtgaatgaaaccagtacctcccatcagagccatcacgatggccaggtcggcctctgtcacagtgtccatgggggaggagatcagcggcgtcttcagagtgaccattgggtcagggctgaggtcaggtccacctcatcagctatgaagtctatgaatcctgggagaatcaagaagtcgttgtaggtgagtccctggtcactggcgaagagctgctgcacggtgtggggaaaagaaagagagatcagattgttactgtgtctgtgtagaaagaagtagacataggagactccattttgttctgtactaagaaaaattcttctgcctcgagatgctgttaatctgtaaccttacccccaaccctgtgctccctgaaacatgtgctatgtcaactcagggttaagtggattaagggctgtgcaagatgtgctttgttaaacagatgcttgaaggcagcgtgctcgttaagagtcatcaccactccctaatctcaagtacccagggacacaaacactgcggaaggccgcagggacctctgcctaggaaagccaggtattgtccaaggtttctccccatgtgatagtctgaaatatggcctcatgggaagggaaagacctgaccgtcccccagcccgacacccataaagggtctgtgctgaggaggattagtaaaagaggaaggaacgcctgtttgcagttgagagaagaggaaggcatctgtctcctgccagtccctgggcaatggaatgtctcggtgtaaaacctgattgtatgttccatctgctgagataggggaaaaccgccttagggctggaggtgggacatgcgggcagcactactgctctttaagtcattgagatgtttatgtgtatgcatatctgaagcacagcacttaattctttaccttgttcttgatgcagagacctttgttcacgtgtttatctgctgaccttctctccactattattctatgaccctgccacacccccctctccgagaaacacctaaaaatgatcaataaatactaagggaactaagaggccggcgggatcctccgtatgctgaacgccggtcccctgggcccccttttttctttctctatactttgcgtctgtgtctttcttttccaagtctctcgttccacctaacgagaaaaacccacaggtgtggaggggcaacccaccccttcagcgcagtgaacccgtcctcgaccacgtagccggtgctgctgctgataggtagtccctcatgctgccgcgagaccccgcgacccgacataaacgctgcagctgctgcgacgcggaggccgcgccgctgccacgctgcagccaggcgccgggtgggctgggtgggctgggggcgggggctgcggcagcggcrgggcgggccagggcgccctatactccattcttcatgatgtttggtcgaagagtcatctgaaattttgaattcagtaaggtggctagaaagtttagggtattttgaaagatggtgattgaccttggactgaaccactattgaagatttatttgataataatttgtaagttttaactcagtacctcccttctgcttttatagttcaaggagcagggacaagttacaggaatgttctccaagcagcaatccaaaagagtctcaaggatccttcaaataacttcagggtgagtctggagaaaacatatggaatcccagcatgaaaccgtttcagagttctaataaaaatatgcatattctcacagcatgtactttatttaatatctgaaaaaattgtgatagaaatgtgtatttgttttaaaaacgtgtaacttcttatatttcaaagctaatacatgttcattgagatatttggagactatagagaaagataaaagaaaataaatcacctatattccactatccaaagacaaccactgttagtattttggtatatttccttctagactcttttttatgtgggtttgcatctgtatctgtatgtatgtatatatatatatatatacatayatacatacatacagttggacaattggacatttttttcactgttcatttattcacttgaaattgtaacttaaaaaaagaaaatgtaactttaaaaataaaaatagatgcaccatgcctatggaaaaaaatttaaatgtactacaagaggttttaaaagtatttttttgcccgggtgcggtggctcatgcgtgtaatcccagcactttgggaggccgagccggaaggatcacctgaggtcaggagttcgagactggcctggccaacatggtgaaactccatctctactaaaaaatacaaaaattagccaggtatggtggcaggtgcctataatcccagctacttgggaggctgaggcaggagaatcatatgaacccaggaagtggaggttgcagtagccaaatcgcgccattgtactccagcctgggtgacaagagcaaaactctgtctcaaaaaaaatgttttcttcctacccctataatactgacctccaattatttttcctaaaggcagctgttgtgaactagttcattctgtaactatccagagatagtctacacatatatttcatttttgcttttttctcttctacagatgataacaccctatgcccattgtcctgatctgaaaattcttggaaattgttccatgtgattaacatggaactgcctctacttaatcattctgaatgattaaatcgtttcattttctaaatgtgttataatgtgtttagccctttcttgttgctgtatgtttagatgctttccaatcttttgttactactaataatgctataaaataaatatccttgtacttctttgtgcatttgtttttttactgagctaattttaatgatttcagcaaaagttattttgttattgagtgatgaaacaaaagatttttgagggtgttcatgagcataagtatcatatagtcacttatggttgttgtgttcctagtacttagtacaaggtatcggaattgttctttagttaatcttttatcttgagaagttaaatcttggtgtaatcttatcctcatgttcatataaagatatgtggagtttgtagtgaggacttagagccgggtacaatttcatggttaaattagaaatgcttttggcagtgttaacagctcttttagaatttgtctagcaggcttttcagtttttgccagaaagccctaaaaaaaaagaaggaaaaaaatgcttttggctgagtgtggtggctcacgcctgtaatcccagcactttgggaggccgaggcaagcggatcgcttgagcccaggagttcgagacaaacctggtcaatatgtcaaaaccccatttctacaaaaaatacaaaaattagctgggcatgatggtgtgcctttagtctcagctacttgggaggctgaggtgggagaaattgcttgagcctgggaggttgaggctgcagtgaggtgtgagtgtgccactgcactccagccctggtgacagagtgagaccttgtctctaaaagaaaaaaaaatattatatatatatatataaatgctttccttaaaatatgtaatgaaaacccactcttgtaatataaatggtttcttggagaatatgtctgtaagagacactactgagcaatgcaatttcagagctaaaatggatttacggattatattatccaactcccttaatgaacaaaataaggaaacttagccctaaagaacattaactgattgtctacttctaactactagcagagctgggcccagcccatactcctttcactgcactgtgatgtatataataaactatatacttgtcataccatatcttagagcatactttttgtttttttgagacagagtttcgttcttgttgcccaggctggagtgcaatggcgcgatcttggctcaccgcaacctccgcctcccgggttcaagcgattctcccacctcagcctcccaagtagctgggattacaggaatgtgccaccacgcccgggtaattttatatttttagtagagatggggtttctccatgttggtcaggctggtcttgaactcccgacctcaggtgatctgcccgcctcagcctcgcaaagtgctgagattacagacatgagccactgcacttggcctagcatatattttttaaaagaatgaaatgtgctttgttttgtccttctgagtctctgtaataccaaataatgagaaaaagcagatttaggattcagatccaggttttctgagctttctctgctattgtctgtctaatataaattatattgtcattcttagttaaaaaacctgccatatttttactattgtgtttctattttgtaaatgaagcatattcattgctatgtagcctgttgtgagcccatatgctttgcatattagtttctccttaaactttctatatttaatatgtgaccctaaggccgggtgcagtggctcacacctgtaatctcagcacgttgggaggccgaggcaggtggatcacctgaggtcgagagtttgagaccaacatggagaaaccctgtctctactaaaaatacaaaattttccaggtgtggtggtgcatgcctgtaatcccagctacttgcgaggctgaggcaggagaatcacttgaacctgagaggcggaggttgtcgtgagccgagattgtgccattgcactccagtttgggcaacaagagtggaactccgtctcaaaaaaagaaaaaaaaaagtgaccctgattattcattcattcatttagtaagcaggcactatggcatatgaatgcagtgactttcttaaaaggtttaggagcygaatacctagaagttaattcatatgaggctgcagaagtgcttcaaaaattactgtatgattaaatgccacaggataccacaagatattatagaattaaaaaattatggctgggcatggtggctcacacctgtaatcccagcactttgggaggccgaggcaggtggatcatgaggtcaggagttcaagaccagcctggccaagatggtgaaaccctgtctctactaaaactacaaaaattaaccaggcgcagtggcaggcgcctataatcccagctactctggaggccgaggcaggagaatcacttgaacccaggcggcagaggttgcaggcgccactgcaccccaccctgggtgacagagtgagactctgtctcaaaaaaaaaaaagaatttaaaaattatwtggctacaatacaatgcttttaaaatccatctttgatttgatatgttacctctctctaataatatgtaaaagcgaatacacatgcatgcggccaatttctatctgatatgatcagcctctggctaagttactaattattagtgaaaaaggcaacttacatgtttttaatttagacacacagacttagctactgacacagcttaacagatagtgtatttcactcttttggctaggttagcttcagagaagaactgtcatttgaaagctgagtgtctcagatgggttgacagcatgtggtatgtgtatcttacataggacctgtcatctgagaagagaaagggtcggtttaatctttcattctctgattactcttactctagccctcagaagtggtttatcaagaatatttgattatcaagaatcaggaccatatgttgcttatgtgtagctaggcaatgatagaaaagcaataactggacatttattatgtacttccatgtgcttggcactgtgctgagtgctttgtgtgcatttaatcttcatacaaaatctgtaaggtatctattattatcctcatttagcatatgaagaaacacacatacagaagttaaataacttgctcgaggttacatagctaataagtggcagaattaggattcctagccaggtctgtctggcctagaaatccgactcttaaccatgctgtactttgcccctgtgttgaaggaacaggtggaatgtcaatctcatgttccaacagcttatcctaacctggagctatgctagcaactatactatactgtaacatcagattttattgggctgttttgaaacattctaatatgctagcttagcatatttttcttttctttttttttaatttttgtgacagagtttcacttttcactcttgtcgcccaggctggagtgcaatggcaccatctcagctcactgcaacctctgcctctcaggttcaagcaattctcctgcctcagcctcctgagaagctgggattacaggggcacgccaccatgcccagcaaatttttgtatttttagtagagatggggttttaccatgttggccaggccggtctggaactcctggcctcagatgatccacccaccttggcatcccaaggtgttgggattacaggtgtcagccatcgctcccggcctattttcatcttttaaaagcagaatttccctgttctttggtaatatgatacgggatttatggagttaacagctcttgctattctttagataatttaactgttgggacgatatttttatttttttcctgagttaagaatcctattgagacatttaaagaggtgtaatgtatagtgtacctctgaaataactaacaggaagtatgaccttattctttgtatttgaagmtccataatgggagaagtaaagaacaaagacttaaggaacagcttggcgctcaacgtaagaccacctttttttaatattcattatttataaatgcttgataattctagtacaaatattgcatttttagagttggtcatttcctttatctacataatctaagtaagctctcaaaataaaaactggttaaastcttacgatagactcattggcatttctagttgtctattgaattagcttatctaagtttgaacaccatcgtactccatcagcttcatcatcttggccgtatgttaagagatgtgatgtttataactgaaatggaatggagctctaatcaggccatgttaaacattgatccaaccatgataatgaaccatgttaaaccaaatatctagcagcaggaagaggaatggtaaataagttcttgtcttacagcctatttaataaatctggatactctacagatgatatcccccctttcctaagaaagaaaacgtgcaatttaaagatgggtcatttcaacccgcatgagctgttttctctcttaaaacattagcacttgatcccatagatcattttttaaaagattactcttttttttttttggagacggggtctcactctgtcacccaggccggagtgcagtggtacacttttggctcactacagcctccacctcctgaattcaagtaattctcatgcctcagcctcctgagtagctgggattaaaggcacgcaccaccacacccagctaatttttttcttatcttttcttttcttttttttgagacagagtcttgctctgtcacccaggctggcgtgcagtggtgcaatctcggctcactgcaacctccgcctcctgggttcaggtgattcttatgcctcagcctcctgagtagctgggattacaggcttgtgccaccacacccagtttatttttgtatttttagtagagatggggtttcattctgttgcccaggctggtctcaaacttctgacctcaggtgatccacccacctcggtctcccaaagtgctgggattacagggatgagccatggcgcccagcctaatttttgtatttttagtacagataacgtttcatcatgttggtcaggctggtctcaaactgctgacctcaagtaatccaccaccttggcctcccaaagtgccgggattacaggcgtgagccactgcacccagcaaaagtttacttcttttgcttgtcttgagtcctccttgaagtgagagctgagactcagtcttacactgatgaggcacatggctgtggttccgaactccaggaaacggattgatgggctgtgatggagggcttcagtcttatccaagaggcttggaatctgtcctgtgtgtggtgggacatcatgaatgttttgagtagggcagtggcctaatagaagccctctttgtgtggcagtccccttacagatatcttacgactcagtctttgtgctatctgcacctggaaacttattttgcccggattagtcagctggtgtagctcatgtctgtcattctctacctaatattgtgctctccagcaaaaactactgagaagcgaattaattcctgaaatgatagcatgtttcttaaaacactggtgaggtgatgagaattagtattccgaagcctgtttaaagggaaaataggagacctagtagatttgcataggaattaaaaacaattggtgttctttccatttgctccctgatggcaattttatccttggtcataattgtacagatgaggtaagtgagaatccaaatatccctatgatcctgttaggagagctgcttacttgctcttgcttggacttggtttatttgctaataaaagaaaaaggtttctgggctgggcatggtagctcatgcctgtagtcccagcactttgggaggtcgaggtgggtgcatcacctgaggtcaggagttcaagaccaacctgggcaacatggtgaaaccccgtctctactaaaaatacaaaaattacctggtcatggtggtgcatgcctgtagtcccagatactcgggaggctgaggcaggagaattgcttgaacctgggaggtggaggttgcagtgagccgagatcttgccactgcattctagcctgggcaacagagcaagaccctgccccccaccccagaaaagctttctaataacttgggcttaatttaatagaagtttaaaatactcggccaggcatggtggctaacgcctgtaatcccagcactttgggaggccgagacaggcggatcacgaggtcaggagttggagaccagcctgaccaacacggtgaaaccctgtctctactgaaaatataaaaattagccaggtgtggtggcacacacctgtaatcccagctactcaggaggctgaggcaggagaatcgcttcaacctgggaggcggaggttgcagtgagctgagatcgtgccattgcactccagcctgggtgacagagcgagactccatctaaataaataaataaataataataatcaaaccaaatatttatattaatttggacttccaaatagatttgaactgttcagccatcattgaatttgatgaggatggtgataacttcaatttagtaatttcttgctaaatgccttaaactgagatagatatatcacatagattattttgtggcttttctttgtttgtttgtttgttctgttaatatataattrctaaaatacaaaaaatataaaatgaaatttcctctttcaagtatcagagatagctgctattaatgtttgatttttatgcctccagattcttttatatttaagcatatattaatacatgtgtaagtatatgtacacaaatatacatttttaagttcacagaatcaatattatacatatttttaataatccatttttcacttaatatatcctgtgtatctttttttaatttttttctttttttttggagacagagtctcgctctgttgcccactttggagtgcagtggcacaatctctgctcaaaactggttgttcttccacctccctgacctaatcaagtcatttttttctagcaaattagctttaggctcatctccatttgccaggctcactgcccccattgtcactgtcttgccattgacattttattttatgatctcccagtatcactggactatgaaaacagtgccatctgttttataactagcaaacacatataaactttccctgctctgcactctctaaggctgttccctttaggtattgtcaacagtttcagcacatataggaaagctatcagtattgttgggtggtgaggttattagattctcctatcaagttaaaaactcaccagccacctgttcctcacctagaacggggtaggggagagccttctttcacttgctgtttaagcagcttttccagatagcccctgatagcactgggacttgtgttttcttatgtcactttcttcagtgtgaggttgaaaccttggggccaagtatagctggggaaagaagagataaytgaagaaaataggaagggagaacagttgttatacaaagaaactcagccagtgtaggggtggacttagctctccttcagctttgtaaatggtttctctctctcatcccccagaagaaccagtgaagaaatccattcaggaatcagaagcttttttgcctcaggtacagaataaatgatctgatttggtattatatgtacatagctgtggatawcyctgacttctttaaaaatacctgtccattaagaattctttgagacagtgggactctgagagtgttgttctcctgagaacttccatacaagggaaccctgaataacaaagagaaagatgttaaagtggaytgcattagtgaactttggaatgcagggaagttccaaagtagcactcctcatctcaactcagtgactgctgaacatattagtcagcagtgatacttccctgaactttggcttgttctggctttttcttaggttgacacctctttgtaagcagaagcaatagaagggctccctttgtacttgggaacatgccacttatataacttcaggttactgtggagacaaatcactcatgttttctctctttttcaaattatctttattccacaaagccaataaagagagtgggattttcattaaaattaaataaaaatgaaaataatttgtcttaagcacattaccctaatagaggaaaaatttgatattaatgggaaacatttgccgtaatgggaaacttcaggctgtgtctgttgagtgactcacctgccaaaggaaatccaaaagaagagatggtatatgggtgggaccttatagaaacagagcaatatccagagtctttagcatttcttgtcttcctttccagagcatacctgaagagagatacaagatgaagagcaagcccctaggaatctgcctgataatcgattgcattggcaatgagacaggtaggtgtggaagctgcagattaactggtgcccccagattgagatcatggcacaggcaagcwgtattcattggagtgatcagcaccaactgccgtgacaaaccagttcaagaatctgtgcttcatcctgggtgcggtggctcatgcctggaattccagcactttgtgaggctgagatgggaggatcacttgagcccagttaaaaattagctggtgtgggctcgggcacggtggcttacacctgtaatcccagcactttgggaggcggaggcgggcggatcatgaggtcaggagttcaagaccagcctggccaatatggtgaaaccccgtctctactaaaaatacaaaaattagctgggcatggtggtgggttcctgtagtcccagctacttgggaggctgaggcagaagaattgcttgaacctgggaggcagagcttgcagtgagccgagatcgcaccaccgcactgtagcctgggtgacagagcaagattctgtctcaaaaaaaaaaaaaattagctggtgtggtggtgcacacctgtagtcccagctacatggtaggctgaagcaggaggatcacttgagcccaaggaggtcaaggctgcagtgagccaagatggtggcattgcactccagtgtgggtgacagagcaagaccctgtctcaaaaaaagaaaaaaaaaatgaatatgtgttacaacacaatagagacttgtttctcattcatgtcacaggctagtgtggatcgggctgggggagctttgttcatgtggctattcagtggctccattatcttctgaggtcttggagttttctacagagtcccttgcatctggctagcagataagggaagagagaatgtgtgaaggatctcacaagagattttagggaccaggcctaaaagtgataatgtgcatcatttccaccccattagattggtcagaactcagtcatgtggctccatctaactgtagtggacatggagaaattagtctcgctgtgtgtcaggaggaaatgaaatggatttgggggacacataacagtgtctctggcacaaagacatcatttacggtagttggtgagccttagtcttgccttttcttttggatgctgawgcagggaggagtcctggaacccagaggggcattaatattaatggaaggcattctggcttcacatattatcacatgccccatcatttcacctagatagacgacaaaagctttcctgggaacattaaagacataataaatgtgtgttcacttacagagctttggatattttctgagctgtgtcagtcagttctgctgtcctttgctttggtcgttggcctcagtctcttctatctgcgcgtcaccattgcttggatctgagatgattcttttgctcagttgttgttggatgtctgactcaaactgaatcactggtgctgcatcaaaagagaatgagaagagcctagataagtggaatgacattctgtttaattatttagctcttccttaagaggatcgatcattgtatttccagttttagagcttctcaacattctcttaaaatgagtcagaactatctttcaggctcacttaaaatgttaccatggggagttttatgggaagaaaggctaagagaaggtcaaattagcaaatataatactaaattttccaggatttcagatacgatcctgcttggtcgtgtcctatttttggttagatgtgagaaagataagtgtcttcttttcagccattagtacccatataagaatgagaaaatattttcttaatgagtcacttcctgttttaagagattatgtaattgtcctgtacttctggttttggtcagttttgtttcattcatcagtagatgttgtacgtatatctgttgtatgagagaatcataaaaaaaaaaaagccatgacctgctgtgaattgaaaaactaagttttttggctaaaactcaatgtctgtgcttgcttctgttgctgggttatgggcctcttgggggcgggggctgaatgtatatttgaatttttctgcattataggagcatgatcagagttgagaaatggaatatgacagtgtgggtttgaatcatggctatgccatgttctagcttgtgaccttgggcaatgtccctggcctctttattttttttaatgtttttttttttctttcttgagagagaatctcactcttgttgcccatgctggagggccatggtgcgatcttggctcactgcaacctcttcctcctgggttcaagcaattctcctgcctcagcctcccgagtacatccctgccgggaatacaggcgcccgccaccatgcctggctaattttttgtatttttagtagagacggggtttcaccatgttggccaggctggtctcgaacttgctgacctcaagtgatccacccacctcggcctcccaaagtgctgggattacaggcatgagccaccacgctcggcttctaattttttttaatttaaattttatttttatttttcctgtagtgctgagttctcggccttcttaagtcccagtttctcttctgtaaagtgggttaataacaggacctacctcatagggaggttgggcagaatgagagttcatacttggaaagggcttagaataatgcctggcacagtgtgagcatgtactagatgccaactagcattatttcctcatttgcttgttcaattctagccataaaccacctaagcaagagctcaccatggctttgcacttggtacatagagtctgatctcagacaagtgagagaccagggcactgaggcctgccctaggcccaagggtgagtggaatgcatccccatagactgaggcgcactggaatggaggccataacttgagagggttatccaacttcttggataaacactcaagtggaaagctgagcacagcactcctaccagtcacagtctgaatgggcttggcagaggagaatctaagtacaaagtacaggagggcagagacctgataaaagagaaagatggaagaagatggtagaattggaggcagagcctggggcatcatgcttttggccacaggtatgagcaggtattggtcttgactgcactggtacatctgtttcctgccccatggttgcggatgtatctgtatacgagctccaagaatcagaatggcagctctagacagcaggtccttcctggtcagacatagtcctttaaagttcaacatcttggtggtacattgctggacaagagtaggcctgggccattagagggtaccctggatgctyggtgctgcctttcccctgagaatcagggtkatttgactcaagccttctctgcctctgggaacaaaatcagtaattgggcttgaggccacttataaacccccctgggctcaggtggctaattagcaagtaagaaacaaggcagcacacttttactcttcttgtgctatggttttcatcagctgagaggtcacaaatccacttacatgcagactcagagcagcaggagaacattaattattaagaagtggaaaggcacagtctcctctcctcacaccatctccctaggcctccagctcttcatttccctcctcctctcctggtaatttgtcactgaagattctaggcccagaatcctgccttggttgaaaatggttgttattattagtgcagcacccttcatctcttttccttctaatccgcagttagggggcttcatctagagtaattatgtggatttcctctgtctggttaactttgccatctggttaacattgaacacttgggaggagtgcaggagtcagataatgaacaagcgggtaaggtaattgccagccgaaataaggtctctgaaagaaagaaacaagaacatgataggactaacctaggcatagctgtgctcagagtatataatttattaaaaatytactacgtgccaggtactttgctaattgctttacacggattcttgcttaatcctcatgaataataccataatataggtactattctctccattaaattttttttgttctacttagaactaatttgctaggaatattctattttcttttctttcttttttttttttttttttttttgacagagtcttgctctgtcgccaggctggagtgcagtggtgcaatcttggctcactgcaacctctccctcccaagttcaagcgattcttctgcctcagcctcctgagtagctgggattacaggcatgcgccaccacgcccagctaatttttcttttttctttttatatttttaatttatttttaagacggagtttcccttttgttgcccaggttggagtgcaatggcgcaatctcagctcaccgcaatctccacctcccaggttcaagcgattctcctgcctcagcctcctgagtaactgggattacaggcatgtgccaccatgcccagctaattttgtatttttagtagagacaaggtttcaccatgtcggccaggctggtctcgatctcctgaccttgtgatctgcccacctcagcctcccaaagtgctacgattacaggcgtcagccatcatgcctggcttattctctccattttcaaggtgaggaagctgagcagtgaactacactcctaccttctctagtactgattgagctgggattcaaaagctggactccaaaacctatgcttttaactactttgcctcaatataatttccatgaaggtgagggagtttatctatctcctactatgggtctccagtacctggaagaatacctgctatgtaggtgttcaataaataattgttgggtgaatgaatgaaggaataagctctcccagtgtcagtgtgtttctaaaagccattcctttttatctttagagtttagcagactctcttctacctatcttcccttctctcctcaaaaaaccagacttttatccaaaaagcatgcaagtcccccaagtatttaaagctttatttctttgtttgtccagtaaatgttcgttgagggcctactatgtgcaaagcaccatgcttggccctgtgtgaagcaaatattaaggcaatgaggtggagtctgatctcagagctgtgttgtgcatgaaataaggttattctttggtagttctttcttgagaagaattcttatggagttcagtaacctcttcttgaggcagaagtaaatgctcagggatttgggaactaattatctcagtttggtagaattgaaaaataagtctttggtgttgtgtcatctgtgtcagtgacagcaaagctggacctgtgctaggccctggtgggtcatctttaagcactggacttttatcttgttaggaatatagaagcaagcgtctcacatctctgacagatgggctttacggcttggcctaaagctctggttgtttttaaggcccttgaataaaaataaaagacgatgtttgcagattttaagaggaagttttttttttttttgagacagagtctcgctctgtcacccaggctactggagtgcaatggcgttatcttggctcactgcaacctctgtctccygggttcaagcgattctccgcctcagcctcctgagtagctgggattacaggcacccgccatcatgcccggctaatttttgtatttttgtagagatggggtttcaccatgttggccaggctagtcttgaactcctgacctcaggtgatccgcccgcctcggcctcccaaagtgctgggatcacggggatgagccatcgcacctggccaagaggaagtattttttttttctatcctgctctttctgaaaagcttgaacatttttctgtactttccttttcttttttgagacagggtcttgctctatcacccagaatggagcacaggggtacaatcatggctcactgcagccttcacctcccgggctcaagcaatcctctcacctcaccctcccaagtagctggaactacacacaggcgccaccacatccatctaatttttaaaatattctgtagagacagggtctcactatgttgcccaggctggtctcaaacttctgggctgaagcaatcctcccacttcagcctcctgagtggctgggactacaggcacatgctatcatgtctggctaactttgttttttatagagacagggtcttttgctgtatttcccagggcggtcttgaactcctggcttcaagtgatcttcctgccttggcctcccaaagcactgggattatggccatgagccaccacgtaatctttgttttatgcgtatttataagctttgcttccccaacaagattataagctctttgattgaagtacatcatatatttgatatgtattctcttgtccaagtgtttctgtaggcaataaggggaactttgtaaaacaagagttttccggtcaagtaaatttgagaagcgctgcctaatctcttccccctcagagatttgcaatgcatattgacctattaaaggctctgagaattcttcctgcgaagaaacctattttagccttgtccaccttgcatttcccaaacacgtttgacctcagaactccctttttcactaagaatgttttgcccatcttatgttttacccatgtgctctatagcagttaacactgggcttattaaaggtactcaatatgtgattgtaaattaactggtgaagcattccctcattcttgtttattttatacatttatttaatgaagcccttttcatagaaattgtcaagataaatgtatcctcatttagatcaaaacaaattctaaattaatgaagtcatgacattttactgtattttggtttttttggtttatctgtgaagtcctcaaacctgtgagtagtgctgaccctagccttgaatgaacagccctgtactaactgcaaggccagaagaacccctgcccttcccctccccacccccccacatcatttccagaagttctaaagaacagttgaaatttayggagatcagactgggttgagtgtgggatttccagggtgggttctagaaggagaagtgggtcttctgtagtttgttgaaattttattttccaaacccagcccccaagtttttcttcctctatttatgtgcaaggacaaaacagttactgtcctacctacataggatatggactctgtctgctctgagcccattttagtttagaatatagagacctccctccaggtcctaagagagagattccatgagagatgygcaacaccataaggttggtgatttgtactttgaaatggctgcctttatttcctttaaagtcaatatcttatatttgaataaacacagtttgcaaagcatctttacagaaatctcattggatcctcacggtcaccttttttctgagacagagtctcactctttcacccaggctggagtgcagtggagcgatcttggctcctccacttcctgggctcgagtgatcctccttccttagcctcccaagtagctgggaccacagatgcgtgcyaccatgcccagccaatttttgtatttttggtagagatggggtttcgccatgttgcccaggctggtctcaaactctgcagctcaagcaatccacccgccttggcctcccaaagtgctgggattacaggtatgagccactgtaccctgccctcacagtcaccttttgaagaacctcctgctcaagagatcctcctgcctcagcctcctgagtagctgtgatgactacaggcttgtactaccatgcctggctagtttttttattttttgtagagacggggttccctgtgatgcccagggtggtctcaaactcctgagctcaagccatcctcccacctcagcctcccaaagtgctgggattgtaggtgtgagccactgcacctggccaagcattagttttaatcttgttttatagatgaataaactggggctgactcaaactgactcaaagtcacactgtcattacctttttgatcctgtacgttagactgggctgtatgcatgttcttgctggcscaataaagttgcaagtgccagctaacagcccttcccactccacctcaccacctcatagaggaaaattgtgacgttaatgggaaatgtcagcggtaatgtcttcaggctgggcctgtggagtgactcccttgccacaggatatttaagcaatgctgtgtcttgtctgaggctcagacctgctattcttattggcacttgggacctgcatggtttttggcttcacctccagctttagccatttttcttctgttcttttaggtaaggattttctgccccagacctcagattcccatttccttcctagcttctctgctgttatagctcagtctcttccaagaccatgcaagattcagaccctagtaggaggagatggaggaactaggacttaaacccacatcttgtgattccaaggctggttcctcttttgccctgcaccacacagctgtctgctcacagtcatgtgacaggggcttccccagccagaacctccagggagcacaaataaaggaaagagctggaaggcacagtacagcatttgttctgtccaagccttacatatcagcatgggcagggagaatgtggtgaagttttctttcaaggactttgtttgataaggaaggacatttatcagtraagagaggttttgagggaagtgaaccaatcttgagataagtacacaaaagagctttgagtctggtgtttccctgtttgcttctgccccctggaggagcaaatactccatgattagagacgtgtgagtcctttggaatagaatagcagtgatggaactggagtcctagtccaggttctctccttgttcagcctggattcagcactgggtatcgaaacaagcctgcaccctcagaggagatggctaggggacagtgcgtccaggcctcttctaccacacagagttttcttttttttataaagggtatacacatttaaaatttaatgatactcccaaattgctcttcaaaaaggctgtgcaaaattacagtcctgataacagctacccagagatcctgtaacggcatttgccctcattattattattattattattattattattatyatyattattwtttgaatttgagacggagttctgctctgttgcccaggctggagtgcagtggcgcaatcttggctcactgcaacctctgcctcccgggttcaagcaattctcctgtctcascctccctagtagctgggattacaggtgagcaccaccacgcctggctaatttttgtatttttagtagagacggggtttcaccatattggccagactggtctcgaactcctgacctcaggtgatcygcccgtctcggcctcccaaagtgctaggattacagatgtgagccactggggctggttgccctcactatttaatgggttatttgcaacctgtgaatcatgtctcctrtttccttgttaatgatgcttattgattatagacttaggaatatcagcacctcctttgtagctcttcattcttacatgatataataattaatttttttttttgagacagagtctcactctgttgcccaggctggagtgcagtgtcacaatgttggctcactgcaacctccacctcctgggttcaagcgattctcctgcctcagcctcctgagtagctgggactacaggtgcgtgccactacacctgactaatttttgtatttttagtagagacagggtttcgccatgttggctaggctggtcttgaactcctgacctcaggtaatctgcccgcctcagcctcccaaagtgctgggattacaggtgagccactgcgcccagccaataattcattgtttaatccttagttgtgggccaagcaaaggagaaaagtaagaagccttttccttttaccgataggaaaggtcaaaggacttacctggtgaattatttacctaaaaatgtatacaaatcactccaaaatttagtggctaaaaacaacagtactaatttaattatatcttcacagttactaatttaattatatcctcacctgtgggtgaggaatttaggagcagcttagctgggctgttctggcccagagtctagtgaagttgtggtcagttgtcagctgggtcatctgaatgcttgattgggattggaggctccacttctatggtggtcactcacatgactgagaagttggtgctagctgttggcaggaagcctgttcttcatgtgggcctctctgagggactgcttgagtactttcatgatgtggtggtgggcttctcccagagtgagccactcagaagagagaaagattgtgaggtctggacttcaataagaagattgttgaagaaaaaaaggttttgtccccccttggtttgattggactagagtgggctcagtctgtgcctgtggctggcatcaggcaggaacagtggtatagcagggtatagaccatatttagggacctaaaatcacatctttcatgattcatgtggttcttgttccaactgcccaggactcaggcacatcaaaatatgacacaaaagcagaagcttttcataatggagattagaccatgtctaggattcctacccagtcctcttgagctctcctcactccagtgttgttttccrtgtttgttttttgttttccccagagcttcttcgagacaccttcacttccctgggctatgaagtccagaaattcttgcatctcagtatgcatggtatatcccagattcttggccaatttgcctgtatgcccgagcaccgagactacgacagctttgtgtgtgtcctggtgagccgaggaggctcccagagtgtgtatggtgtggatcagactcactcagggctccccctgcatcacatcaggagratgttcatgggagattcatgcccttatctagcagggaagccaaagatgttttttattcagaactaygtggtgtcagagggccagctggaggacagcagcctcttggaggtggatgggccagcgatgaagaatgtggaattcaaggctcagaagcgagggctgtgcacagttcaccgagaagctgacttcttctggagcctgtgtactgcggacatgtccctgctggagcagtctcacagctcaccrtccctgtacctgcagtgcctctcccagaaactgagacaagaaaggtgagcccccaggaggtggtcagttccggaccacctgcttattttcgtgccaccaggatgggaattaccactgtgccacatttgctgcccatctcttccgggaggaaaagagattttccctcctgcattgggcttgccctaggactacagtatagacccggcatgatttataaatactttgtagttagttagtttgtagtttgaatacttttctttaaaattaagaaattttcagcctgggcaacaaagtgagaacttgctctataaacatttttaaaattagttgggtgtggtggtgtgcgcttatagtcccaactgcttgggaggctaaggtaggaggattgcttgagcccaggagtttgaggctgcagtgagtcgtgattgcactactgcactgcagcctgagcaacagagggagaccttgtctccaataaacaaataaataaatacaaataacaaatttatttatttttatttatttttttttttgagatggagtcttgctctgttgcccaggctggagtgcattggcgcaatcttggctcactgcaacctccacctcccaggttcaagcagttgtcctgcctcaccctcccaagtagctgggattacaggcatgtgccaccacgccctggctaatttttgtatttttagtagagactgggtttcaccatgttgaccaggccagtcttgaactcctgacctcaggtgatctgcctgcctcagcctcccaaagtgctaggattacaagcgtgagccactgcgcctggccacaaatttttatttttaatttttctttttttttttttttttttttttgagacagagtttcactcttgttgcccaggctggagtacagtggcatgatcttggctcgctgcaacctccgcctgctgggttccagtgattctcctgcctcagcttcccgagtagctgggattacaggcgtccgccatcacacctggctaatttttgtatttttagtggagacagggtttccaccatgttggccaggctggtctgcaactcctggcctcaagtgatccacgtacctcggcctgccaaagtgctgggattacaggcatgagccaccatgctcagccaccttccagatctttttttatttgatacccacacagtcatgtagaagtatatcttttttgtttgtttgttttttgagatgacatctcactctgttgtccaggctggagtgcagtggcacacctcggcttactgcaacatccacctcccgggttcaggcaattctcctgcctcagtctcctgagtagctgggactacaggcgcacaccactacggctttgctaatttttgtatttttagtagagatggggtttcaccatgttggccaggctggtcccgaactcctgacctcaagtgatcctcctgccttggcctcccaaaagtgagccactgcgcccagcctggaagtatgtttgtaagcccagatggaatcatcatctattgtttcttttttttaattaaaaaaattttaatacagttcaaatccccatgtctggctcatttcagctcctttactgccaaagcaggggacaaggactgcttcagtttctctgccttctctttctctgaaggtatctgctgcattgaacttgaaagttcacattatccttatttttcttgatcttgacagatttggcatcctttcacctggctgtgagcagaaagtccttgatttcctcaattttgcaaggcatggcgatgaggcacacagggagaggacaaggacaggcacccctctatcccatgtatcacccaaaagacactcacagcctgccatcactttataacctgcttttagtttgtttaacagtagatcacaaacatttttgcatgtcagtagtcacatttctacagcatcagtttaatgtatgcacaatagcccataatatggccatagcttaatttacttgatcaatcttcagttgttgcacagtgtttgctttcatacgaagtaagtattaaacatccttgtaacttagtatttgttcttatccttaattgttttctagggggacaattcccggaagtggaattacagagtcaaaggacatgcatttttcaagcctcggatgcatcttactagatgtcctataggatggtcatatcagctttataggagagtagctgtgtccctgaattctccctgacactgcatgctcttatatttcctcaagttttgacaatttgataggtgaaaagtggtatctgactgttcagatctggaaggctttgttatataaacatttttttaatgtttattggcaagaatacttttctaagagaaacatcagtgagctggtttccatttaagctgaatgaagccacaatgtacctcaagtataagattaactggcctttttcagttgcactctaattacaatttagaatgatgtttctgagccacctgtcaaatgcattctgggctgtacctctgcgtaccccaggaataaatctcatggcytyctttacctggcctccttagtggtggcccagcaggaagcgggggttagagcaggagccactcagccttccaagatagatactccatgggccggtggtattactggccttttgagcccatccccatttgcatagatgatccacgtgggttatcatctggctggtatgttcccagagtgaaactcagcagccccttgagggaggggatggtggccatcaggccagagtattgcaagttagtttggatcatttgctaagcagcttgtggtgccttcagaaaggaacagtttcaaagaactttcacatctgttggctcatttcgccctaatgacagtcttctctttgatatttgcatggcattaaattttgcctttcttgttttctccagaaaacgcccactcctggatcttcacattgaactcaatggctacatgtatgattggaacagcagagtttctgccaaggagaaatattatgtytggctgcagcacactctgagaaagaaacttatcctctcctacacataagaaaccaaaaggctgggcgtagtggctcacrcctgtrrtcccagcactttgggaggccrrggagggcagatcacttcaggtcrggagttcgagaccrgcctggccaacatggtrracgctgtccctagtaraaatrcmraarttrrctgggtgtgggtgtgggtrcctgtrttcccagttrcttgggaggctgaggtgggaggatcttttgaacccaggagttcagggtcatagcatgctgtgattgtgcctacgaatagccactgcataccaacctgggcaatatagcaagatcccatctctttaaaaaaaaaaaaaaaaggacaggaactatcttactcaatgtattagtcatgtttctctagagggacagaactaataggatacatgtatataaaaaggggagtttattaaggagtattgactcacatgatcacagggttaggtcccacaataggtcatctkcaagcaaggaagccaattcaagtcccaaagctgaagaacttggagtccaatgtttgagggcaggaagcattcagcatgagagaaagatggaggccagaagactacaccagtctagtctttccatgttttgcctgcttttattctggcagtgctggcagctgattagatggtgcccacccagattgaggatggtctgcctttcccagtccactgactcaaatgttaaatctcctttggcagcaccctcacagatgtacccgggaacactttgcatccttctattcaatcaagttgatactcagtattaaccatcacagtccatttgggcaactataccaaattaccatagaccaggtgacttaaacagcagttatttctcacagttccggaggctgggaaatccaacatctaagtggtagcatatctggtgtctggtaaggcatgcttccagatcttaccagatgtcagtcttttgatgttctcacatggcagaaaaagaggatgcaaactctcaagtatatctttaagggcacaaattccattcatgaggrctctaccctcatcacctaattacctcccaaaggccccaccttctgatactgtcactttggggatactgtctcccctttgaattctggggggratacaaacattcagtttgtaacaatagccttatgatttagaggttacttgttcattcacctagacctcaaattgcattttacagctagtcaagtatatctttctctgatttgatagtgtgacctaaaaggggaccattgtttgaaatatcattagagttgcttattattattattattattattattattattgagacagagtttcattctgctgcccaggctggagtgcagtggcatcatcttggctcattgcaacctctgccttctgggttcaagcgattctcctgcctcagcctcccgagtagctgggattacaggctcctgccaccacacccggctaatttttgtatttttagtggagacagggtttccaccatgttggccagcgtggtcttgaactcctgacctcaggtgattcaccagcctcggcctcccaaagtgctgggattacaggtgtgagccactgcacctggcctattattatttttaaatttttttttttaattgatcattcttgggtgtttctcacagagggtgatttggcagggtcacaggacaatagtggagggaaggtcagcagataaacaagtgaacaaaggtctctggttttcctaggcagaggaccctgcggccttccgcagtgtttgtgtccctgggtacttgagattagggagtggtgatgactcttaaggagcatgctgccttcaagcatctgtttaacaaagcacatcttgcactgcccttaatccatttaaccctgagtggacacagcacatgtttcagagagcacagggttgggggtaaggtcatagatcaacagcatcctaaggcagaagaatttttcttagtacagaacaaaatgaagtctcccatgtctacttctttctacacagacacagcaacaatctgatttctctatcttttccccacctttcccccttttctattccacaaaaccgccatcgtcatcatggcctgttctcaatgagctgttgggtacacctcccagacggggtggcggctgggcagaggggctcctcacttcccagatggggcggccaggcggacgcgccccccacctccctcccggacgggatagctggccgggcgggggctgaccccccacctccctccccgacggggcggctggccgggcgggggctgacccccacgcctccctcccgacggggcggctgccaggcggaggggctcctcacttctcagacggggtggctgctgggcggagacgctcctcacttcccagacagggtggctgtcgggcggaggggctcctcacttctcagacggggcagctgccgggcggaggggctcctcacttctcagacggggtggccgggcagagaagctcctcacatcccagacaggggggcggggcagaggcgctccccacatctcagacgatgggcggccgggcagagacgctcctcacttcatcccagacggggtggcggccgggcagaagctgtaatctcggcaccctggggggccaaggcaggcggctgggaggcggaggccgtagccagctgagatcacaccactgcactccagcctgggcaacattgagcactgagtggacgagactctgcccgcaatcccggcacctcgggaggccgaggctggcagatcactcgcagtcaggagctggagaccagcccggccaacacagtgaaacccygtctccaccaaaaaaatacgaaaaccagtcaggcgtggcggcgcccgcaatggcaggcacgcggcaggccgaggcgggagaatcaggcagggaggctgcagtgagccgagatggcagcagtacagtccagcttcggctcggcatcagagggagaccgtggggagagggagaagagagggagggggagagggctatttttaaaattttttaaaattgctgaacaggggtacctctgggcagtgtgtcagaataccactttttaaatattttatgatttatttatttttctattygaggttttaactgatgtgtatctgtatgtctatttgtgtatattttgtcatgatcatgtaacagagtctgaaaagtgtcgaagagacagttttcaggaacaacaagcaattattcctactttccaagttattttgatgccatggtggctcatacctataatctgagtactttgggaggctgaggwggactgatcacttgagcccaggagtttgagaccagcctgggcaacatagcaagactccatcyctacawaaaaakacaaaawttagctgrgygtggtgkcgtgtwcctgtaktcccagytacttgggaggctgargtgrgwggatcyyytgarcccagagaggtcaaggttgtggtgagctgtgatcrcaccactgcacttcagcatgggagacagagtgagaccctgtttcagaaaaaataaataaataaaaccaccagcaccacaaacaacaacaaaaagttattttgtacttgttttgagcacaggactcctgagggtatctttgcatttaatattacataggggtgccagtgggaagtaatgtgtatgcttggcctcatgagctaaaaccctgtgttaattatgacagaaggaaagtgtgtgagagggatcttaactacctagcagctctagctgccatcttgaaccatgaagatacgggccacacgtaggggtagctgggtagtgagcagcaagaagccttgttggatgagggcacgaaggagcagaatcactggaatcactgtgtcagccctaattacctacctctggacttttatgtgaggggaaaaaaaattgacagtttatatttatctcaacctagttaacccaagtgatgcattgttatgagattaaaatgtttggaggccgggtgcggtggctcacgcctataatcccagccctttgggaggccaaggcgggcggatcacgaggtcaggagatcaagaccatcctggctaacatgtaaaaccccgtctctactaaaaatacaaaaaattagccaggcgttgtggcggtcgcctgtagtccctgctatttgggaggccgaggcaagagaacggcatgaacctgggaggtggagcttgcagcgagctgagatcttgccactgcactccagcctgggcgacagtgcgagactctgtctcaaaaataaataaataaataaataataaataaaatgtttggaatgttggcttcatccctgggatgcaaggctggttcaacatacgcaaatcaagaaacataattcatcacataaacagaactaaagacaaaaaccacatgattatctcaatagatacagaaaaggccttcaataaaattcaacgttgcttcatgttaaaaactctcaataaactaggtattgatggaaaatatctcaaaataataaccatttatgacaaacccacagccattatcatactgaatgggcaaaagctggaagcattccccttgaaaactggcacaagacagggatgccgtctcaccactcctatttaacacagtattggaagttctggccaagaaaatcaggcaagagaaacaaataaggggtattcaaataggaaaagaggaagtaaaactgtctgtttgcagatgacatgatactatatctagaaaaccccattatctccacccaaaagttccttaagctgataagcaacttcagcaaagtctcaggatacaaaatcaatgtgcagaaatcacaagcattctatacaccaacaatacacaagcagagagccaaatcatgaatgaactcccattcacagttgctagaaagagaataaaatacctaggaatacagctaataagatgtgaaggatctcttcaaggagaactacaaaccactgctcaaggaaataagagaggacacaaatgaaaaaacattccattctcgtggataggaagaatcaatatcatgaaaatggccatactacccaaagtaatttataggttcattgctattcccattaaactactattgacattcttcacagaattagaaaaaaactactttaaaattcaaatggaaccaaaaaagagcccgtataaccaagacaacaataagcaaaaagaacaaagctggaagcatcacactacccaacttcaaagtatactgcaaggctacagtagccaaaatggcatggtactggtacaaaaacagacacatagaccaatggaacagaatagagaccagagaaagaagaccacacatctacagccatctgatcatcgacaaacctgacaaaaacaagcaatggggaaaagattccctatttaataaatggtgctgggaaaactggctagccatatgcagaaaattgaaactgaccccttccttacaccttatacaaaaattaactcaagattaaagacttaatgtaaaacctaaaactataaaaaccctagaagaaaatctatttaataccattcaagacataggcacaagcaaaggtttcatgacaaaaacatcaaaagcaattgcaacaaaagcaaaaattacaaatgggatctaattaaactaaagagctcctgcacagcaaaagaaactatcattagagtgaacaggcaacctacagaatgggagaacatttttgcaatctatccatctgacaaaggtctaatatccagaacctacaaggaacttaaaacaaatttacaaggaaaaaaacaaccccatcaaaaagtggacaaaggacatgaacagacacttctcaaaagaagacatttatgtggccaacaaacatataaaaaaaagctcaaccttactgatcattagagaaatgcaaaggagaaccacaatgagataccatctcatgccggtcagaatggtgattattaaaaagtcaaaaaacaacagatgctggcgaggctgtggagaagtaggaacacttttacattgttggtgggaatgtaaattagttcaaccgttgtggaagtgtgtgtggctattcctcaaagatctagaactagaaatactatttgtcccagcaatcccattactgggtatatacccaaaggaatataaaccattttattataaagatacatgcacatttttgttcattgcagcactcttcacaatagcaaagacacaatagcaaatgcccatcaaagatagactggataaagaaaatgtggtacatatacaccatggaatactgtgcagtgcagccattacagcttttggtgatacagtgaatcagatttttcattaattcttttaattggttattactgaacgtgaaaaagtaatgtttgtattgaaatcttgagtctggccatgtttctattttaaattcataaagaattctaacaagaggaattccaagaatgtcataaatggatgtttctccatggatgaaggaactgttttattcacttgctgataattcagcctaatccagtttgacatcatatagataagtagttgaattatggatttaaaatacatatcattttctaactccaaaggtaatacttatttaaatggttttgaaaatatagaaaggcacaatttctttttaaatctgttattctccaccaccactcaatctgtctatcatctatctctccattcattcttccatttgtttatatctgttaatctttgtatgtgttcatgtatagcttttacatgattggaatcataatgcatattccattttgaagtctgcttttttttacacaaaaatatgttgtgaatattttcctatattatgaaatatcattagctgagcttttagaattgactgcatgttttggtaccatttagatatagtttaagatacttagaagttatgtggctttgccactatggatgaatcttatttactcaatattaattacttacaaataacctcacctaaacactactcagccataaaaaggaatgaattaatgacattcacagcaacctggagactattactctaaaggaagtaactgaggaatggaaaaccaaacattgtatgttctcactcataagtgggagataagctatgaggatgcaaaggcataagaaggatacaatggactttggggacttaggggaaagggtgggaggggggtgaaggataaaagaatacaaattgggttcagtgtatactgctcaggtgatgggtgcaccagaatctcacaagtaaccacttaattacttacgcatgtaaccagataccacctgttccccaaacacctatggaaataattttgtttttttttttaaaaaaggaatgagatcatgtcctttgcagggacatggatgaagctggaagccattatcctcagcaaactaacagaggagcaggaaaccaaacaccacatgttctcacttgtaagcggaagctgaacaatgagaacacacggacacagggatgagatcaacacacactggggcctgatgcaggggccgtagcggggagagcatcaggataactagctaatgcatgtggggcttaatacctaggtgataggttgataggtgcagcaaaccaccatgggacacgtttacctatgtaacaaacccgcacatcctgcacttgtatccagaacttaaaatattttaaaaatctttagagaatacaaaaaaaaaaagattcttcaatgcatacacaataaaattgcagttcagtcaaacattggaagtctttctctaactgtctagttggtatcttcattttcagcttcttcaagatcccactccaaacactgttagctcagccaaattgaacagctcatatctcctacctctggatctttggttctggtgattgtatatttctggaccatctggaaccccagcatatcaccctaccccacatctccacatccccaaaatataaccatacttcaagggcagttcaaataccatctccttctatcctccatgaagtcagttatctcttccattggaattatcgccccctctcctgaacagtactatttcgtgtgaatctcctccaagccttcttttcattttatatctcatgctgtaattcttggaaagtatgctgtagctcaagtgcagaattctcatcagttttatctttatatctctcctaaacactttacctgatgaagagcctggcatacacataaatatatattgaatgaatcagtgatggattgaaaagagaaatgatggatctcctaaattttaacttttataaaatattttgatacattcatgaccttactttagcaagcaatgaacgtgatgtaaactattgttgatatagtttttatattggaagtgtaagtagtttgtggcatgggattgtgacatatcctaggtttcctcatcttctttttattgaaatgtaattcacaagccataaaatttgcccctttaaagtaaatgatgcagtggattttagtatatttacagagttgtgcaatcatcaccactatctaattccagaacatttccatctacctagaaactccataccagtgagctgccactctaatcctcctcttcccccagcctctagaaacaataatccattttctgtctctatgatttgcctgttctagatattttataaaaataaacatgtggcctttcgtgtctgacttccttcacttagcatgtttcaaggttcatctatgctatagagtgtaccagtgcttcattacattttatggctgaataataccctattgtgtggatataccgcatttagtttattcatcagttgatcgaaatttagactgtttccacttttttgctattatggatgatgctgctatgaatattcgtatatgaatttttatatggatatatgttttcagttcttctgggcatataccttagaagtgagagtgctcatcatatagtaactctatgtttagccttttgaggaactgccaaactgcttttcaaagtagtagcatcattttatattcccaccagcagtgtatgaggttttttttatttttttgtttttgagacggagtctcactctgtcgcccagggtggagtgcagtggcgttatcttgattcactgtaacctctgccttctgggttcaagccattctcctgcctcagcctccctagtagttgggagtagctgggtttacaggagctcgccaccatgcccaactaatttttgtattgttttttgagacggagtctcgctctgtggcccaggctggagtgcagtggtgcaatctcagctcactgcaagctccgcctcctgggttcatgccattctcctgcctcagcctcccaagtatctgggactacagccgccctccaccacgcccggctaattttttgtatttttagtagagacagggtttcaccgtgttagccaggatggtctctatctcctgacctcgtgatccgcctgccttggcctcccaaagtgctgggattacaggcgtgagccaccgcgcccagccaatttttgtatttttagtaaagacagggtttcaccatgttggccaggctggtctcgaactcctggcctcaggtgatctgactgccttggcttcccaaagtgctggcattacagacattagctactgtgcctggcctcaagtcctttctcattttaaaactgcgttattttattttatttttctgagatggaatctcactctgtcgcccaggttggagtgcagtggtgcaatctcggctcactgcaacctccacctcctgagttcaagcgactctcctgcctcggcctccctagtaactgggattacaggcacccaccatcacgcctggctaatttttgtatttttagtagagacagggtttcgccatgttggccaggctggtcttgaactcctgaactcaggtgatctgcctgcctcggcctcccaaaatgctaggattacaggcgtgagccaccacacccggtgggttgtctttttattgttgagttgtaagcattctttttaatattctggatactagtttcttatcaggtacaatctttgtgaatatattctcccattccatggattgtcttctcactttctggatactatacagtacaagttttaaattttgatgaagttcacttgatttctgttttttatgttattgcttatgcttttggtgtcatacctaaaaaaccattgtctaaatcaattgcctatgaggtgttacccctatgttttcttctaaa

SEQ ID NO: 96367 - DNA, 38979 bp, Homo sapiens
  misc_feature (1)...(38979): n = A,T,C or G
ggcctgcccacacctgcccagagcacgttcacttctgcatgttgcctgtggagactcctaaaaaacacgcatggtcttccatctcatctttatgtattagaacaaagcaaaccatattgctattggctcccttatttaattttcacaacttttgttcgtaagagtgaagcactttgcagcatcatctggaacctaatctgataagaagcagtaaagctcacacttgtacccatttccatgcttgttttcagtgagcctgggtgtttaagatgggatttgttgttgttgttgtcgttatggagttttgctcttgtcacccaggctggagtgcagtggcaccatcttggctcactgcagcctctgcctcccgggttcaagctattctcctgcctcagcctcccaagtagctgggattatgggtgcacgccaccacgctgggctaatttttgtatttttagatggggtttcaccatgttggccaggctggtctcgaactcctgaccccaggtgatctacccaccttggctcccaaagtgccgggatgacaggcgtgagccactgtgcccagccaagatgggattcttttttaagccctaccagctaaagccagtgcactgtgtgactttgtgttacccttggagcagcctctttttgctccactctcctttccaccgacccagtctgctccccggattgagagtccctgtgcagtgaaagaataaatgtggctctctgccagcaacctcacctccccaccctaccctcagagtttcacatcttcagaacaacacacaatgaaccagttgtgttctgggctctctgagtgggagtaaatggatggcccaggtgaaatggaggctgctgttggccgattcattctgtaaatcaacataaacagcaggttttctctctgggcttaatttctcagcaggaaatcagcatagggaaacttcaggctgcatctctgccagtctagcagatctctgccagttctgcagtaaaactgccttggagccagagtttaagtcatggagctccatcagaatgtcattacccacaggctgtggccctataccctcaattcagacgggaggctacttgtatgccctggtgccgtggaattagtgtggggcctgacatcagccggttacagagcagcaggaaaggcttctgcgggtaatgctgcccacagccatcactgtaaacatgccggccccatggttttgtttgtttttattttacttaagggtgggaagggagctgttatcttaaggtctgcaaggaaagtgagatgctggaaggacttggtaatcggctctggcggcttcttccttggctttagaaggcagcgagtgggagggagagctggcagatctctgggtgtaggcaggtgagccagggagctgctggacacggtcctaacagaaggccgcatctgcagccttcctggggcttcctggggctggccaggaagacgcccagctttgccactcctggccacccagctccaccccatgcatgctcaccccacagctgccttgctctggactgtgcaagtccagtcattccggggtgcctatcagcagggagctggggccttacagcaaggtgtttcacttcttttatttggtcagaatagatgaggacatgtggacctcagctcctcttgcaggctctggttgtaggctgccgaaggtgtgggtggagagaggggcggtgggttggtcacaagtcagaaaattaagaaacagtcctgcacatttcagaaagacaaatccagaacaaatttatatgaagggccgcggtcctttattccataagtagtaaaggaaacttaccttacctagggggctcgtaggcagaaaatgcacaaggacacattaggcccagggaagtggtattgtagctctgtgcaggttgagaggaaggtcattcatttttggtttcatttaacattttgatttttttctttgtcacatttcagggggtctgccacatgtagaaagatatcttccaaaacgaaatcctccagcatcattggatccagttcagcctcacatacttctcaagcgacatcaggagccaatagcaaattggggattatggctccaccgaagcctataaatagaccgtttcttaagccttcatatgcattctcataacaaccgaatctcaatgtacatagaccctctttcttgtttgtcagcatctgaccatctgtgactataaagctgttattcttgttataccatttgaagtttttactcgtctctattaatatttaaataaatgctggggggtgatagttcttctttttaaaataaacattttcttttgaataagcatgttttgctgccgctgcaagtgttgtggccgttgtttctcagaacgtctgaggcagcagctgaatcatctcagtgcaagagcttctgagcataacacgaaacccagaagccaaaggaagagccacgcgtgggcccttgtgaaactaaagcttttcgtgtaagacaacacaaacaaaatttaaagacaaatgacggggaaaagaggagaaaatatattacaaaggattagtatccatcataccaaatacccgtgaaccagtcagaaacatcccagggggcaggtggaccaaggatgtgaacaggctagtctcagaagaagaaatacacatgctcatggcccggcactgtggctcacgcctgggatcccagcactttgggaggccgaggcaggtggatcacgaggtcaggagtttgagaccagcctgcccaacatggtgaaaccccgtctctactaaaaatacaaaaattagccaggcgtggtgtacaggcacgcctgtagtcccagctactcaggaggctgaggcaagagaatcgcttgaacccaggaggcggaggttgcagtgagccgagatcgtgccactgcactccagcctgggtgacagagcaagactccgtctcaaaaaaaaaaaaaaaaaaagaaatatacatgctctgcaaatatgtgaaaaaggtcaatctccatgaataaaaatatgataaaaccatgtgagaccattcttttgcctacaaattatcaacactggataatatcccagtatttggggtcagcgagaaagattggcagattgtttgggtggacgtgtgtggcagttgctgtagtcctttggtattgtggtggcctcgtttttcaggatgctccataatgggccaattggccccagcatctttggtaggattttggcctctcttgcctgaactccagtggccccattttcggagacatgcgtttctcagctgtaggtcacctttgtctgggtgccacacagcgaggaagtggcataagacaaaacacacacctcggcctgccctttgtgtggtgttacctgtgacgttactcaggagagtgtagctggggagaccctgcctgtgccaaagccaaaggtgtgaagagggggttgatgggaagccgtgtggcctctgcctggggactcagtcctgagagggaccctgcacccaccctgaggacccacccttgtggtagcacactgacttcctgcctcctcggctgcctgtgagccccaactgccgcctgtgggcttttggctccgtgtttaatgggggggactggccaggcgagtttgctgagggctgagtgccattagcacggatgcgttccggatctgacattttcagaggtcatccttctggccagaagaaccttctctgtgcatgagaagtggaaaggagacaaagtagccagaagttgatacccctggggtaatgtccccagcatgaggccaccttggagagttgctgatccagccaaggcatctggcaggaggcatgtccgttccacctgctgcagcagctctggccttggtggtgggggtggactctggcacagacaggtcactgctgggctctgacctcatccactcgttccttctggagatggagcttatccctcagggtcgcaggctgtgcctccaggagctcccagggctgtgggggaacagatgaaaataacgtgcatggggcctgaaggtggagagcagagccatgtggggcccacactacctacagcccttccccatgtcctgggaagatgataggttgacccacccctgcctcccagcaaggaacctgaggcctagagacctctgatttgcctaagctcaaatgaccacaggtggcagagccaggccccacacccaactcttgaaaacattctaggttggaacaggctctgctcagtttctcaggacccgggagcaggcacagaaaatgcaagcggcctccttcctccagctcatcttccagtcctctcagacccccagggaagctctgcattcgcccagcgcaaccccaggagggcaggagcaggcaaactttccctgaactgatgccaaggctttgaagccaaagaccggtccatgatacagcaaagctgctctgggctgggccctgctggtggccctccatggcacaaatcgccaccacctgggataggagagggcacaagtccaccaaggagtgccagcctgggacccatcacgggcccatcctcccctaggtacacgaaggcctgactctcccacactcacttgccatccttctggagggcacaggcaggattggaatctggctctgtagctgcacatatgccctgctgaggccctcacactacagaacgctggcaggcaggcccttgctcacctccagggacagagaacccactactctcagaggaaaagaacaagcacggagagcccctcaccccaccggctccatgccaagggctgttttgggaactcaggtaattcacttcttccatccctcccgcagccctgggaggcaggcacatgatgttggccttttttatgcagaaaccagaattcagagaggttatgtaacttgcccaaatccacgcagctgggaggtggtagtaagtagggtaacacacatctcgatttgccctggagtcccagtttacatccattgtcctggtgtgataattaacacagtttattttcattctcaaaagtgctccagttcagacaacaagttcagtggcatcaagaatctgagctctttccctgaactatccaacctcttctcccaaccccgctttccacccagagcctcaggggccacctgctgtcacctgttcgaaactcccagcctctgctgcaggctccagggacagaggctgcagaattatcagccagcatcgctgagctgtggcttttctccagaagaggaagcggaggctgtggtccaagccttctcgctcttcttgagaaactgctgcttctcccactcctgcagccgtctggaactgctctgaggccccgaggcccaccctgtcctttggaggctcccagagtcccagcccggctctttctctggctgggagctgctgcctgggtggggagcagcaggcagcagctgtcaacctcccccagcctgggacccgccgctggcagaggcctctgggcagagacaatgggcgatgggtcttctgtggcagctggggaggaatccccaggggctccagcagccacttctccctccgtgcagctggcacagccccgtgtgtcctcaaagccagggctcagagaagccagctggtggggcgcacccaggggccccgagcctggcccagaccctgctaggtgctccagttcatgagtgcagcaaccactaggaggcaggggctcaactctgcagctgtgcagggcagacccaggacttcggggacaagcccctcggcatgcagtaggctcctgctttccaaaacgcactcactctgcttctcggaaaggcttctcggctggcccacgctccctgttggcaggagacgaaggaggaagggagaaaaccctccctggttggggtgggctgtgtaccctgccccacagggtcaccactgggaagaaggacaggacaagaaggtagacagaagcccgaagtagagtccagaaagccccagccatggtgaggcgtccccgcacaggcctgaggctgtccctgcagctagccaaggtcaaggtcgaggttttggcatcgccacacctcaactgtgtggttccacggccccacagagggttcggtgacgcctgggaaggtgccgggwtccacggccccacagagggttcggtgacgcctgggaaggtgccgggatccacggccccacagagggttcggtgacgcctgggaaggtgccgggttccacggccccacagagggttcggtgacgcctgggaaggtgccgggatccacggccccacagagggttcggtgacgcctgggaaggtgccaggatggcactctgatggtctctaggctcagatctattcaggatgtgggagttcaccccagagagcctgtctgtccccatgggtcccacacacagggcctgtcacacacacaggccacaggcatctgcctgtcctggccccatctactcagtccctgccaggagccacaaggccccatgaaggtcaggccctggcactatgcctgggccaggagtggagcagagagctcaggtccctgcttcctgtagggaagactttccttggtaggatagaacctggagcagggactcttggggtgggaggtggcaatggtgccccgggaactgctgatgcggagtaagggtctgaagagccaccactaccagatctgaaacccccgcctagaaggaaggacatcagagacactgagagactcctggacttctgcccagagccctgctcgggctcagagaggggtggccccctgcgctgtggcccccaccactgtgggagcgttgagacgctgtgacagggaggcagttaacactgctaacctcaaagatgaactcagcagtcagcaccagggagatcggaggtcagcccacgccagccccaccacagacacccgcctgcatggctggatgtgcatataaggacagagacccgtgcggccaccgtcgccaccaggtcccttgcacccagtgagagccagtctggaatgggcgggacctggccccttcctcagccatggagtgcccttggcaagttctgtggcctctcagagtcccagtgtctcatctgcaccatcaacatgccacttggtcctggcctccggggctgctgcagcatccttttggtcagatattccacaaacatttcttaaccagagcagagctccaggcatggttcagccttcaaccagggcacaggcagggagggaaacgccccgggggaaggagagagcagtgttggagtaagtggggtgagggtgaagaccccagggcacctgggccagcaggagttggggagggtgcccaggaggctgaaacggccaagtgacctccaggctgaccatcccagtgtccagccacccccgctgaagccaccctgtgctctcctttgtggtccctcctcacctaggaagagcagaaaggacacagcacccacccgcgggacccctttcctgagcagaaagtgccctgtgccagcctggccaccgcctcactgtgaggatatgcacactctaggctgggccacctggctgtatgagccccagcccagcgagcggcacaatggggatgaccccagcacacctgccaggacccctgccccacagggcctgccactccctccacaggcctcakcttagggtctgyacctttgccccagatctgggttccagccccagggayttggcacacagccggtgcctaataacagcttgttggatggatagatgagcggatgggcgggtgagtgggtgaaggggcgctgcgaagacatctgtctcattgccttctcatgggaggataagataggaggaggagacggggcctcaggctggcagggccttaaaatcctgcagccccacggccagcaccaggcagtggggacggagccccaggtcactgaaggctcccttgttacttctgctggcttcatctggacaaacagaagccgctttccagctggcttcagcagttttcacttagattttcttctttttttttttttttttttgagacagagtctcactctgtcacccaggccagaatgcagtggcgtggtggcatgatcttggctcactgcaacctccgcctcctgggttcaagygattctcctgccaggtagctgggattacaggcgtgcaccaccacatctggctaatttttgtatttttagtagagacagggtttcaccatgggggccaggctggtctcacactcccgacctcaggtgatctgcccgcctcagcctcccaaagtgctgggattacagacgggagtcaccatgcccagcctaggttttcttttcctttctgttttttattttcgttgctgttgttgttgtttgagatagtcttgctctgtggcccaagctggagtgcaatggtgggattctggctcactgcaacccccgcctcctgggttcaagcaattctcctgcctcagcctctcgagtagctgggactacaggcgcgggccaccacacccggctmattttttgtatttttagtagagatgggttttcaccatgttggccaggctggtcttgaactcctgacctctcaggtgatccacccgcctcggcctccccaagtgctgggattacaggtgtgagccaccgtgcctggcctaggttttcttttgcttgtgtaccaatgtttttggctggttggcgtcttgtttgtgctgaaatagcaagccagttttcctcactttggagctgcattgtctatcatgtgaagatgttcataaccaccagtgtctgcttctagctctttcctatcctttgyttcyggagtttacttgtgtgtgaggaaggcttttgtggggaccaaggtacatggagcagttgggaggtgaaagtttgtcactgggtcctacctgtgcagaacgtcagtcccagccgagaaagcaagggccagggcagtagttctcaaacttgtgttagcctcagtcacctggagagytggttgtgccatggcttccgatgcagcaagtctggagtgcgccccagaggtgtgcatttccaccgggtctcctggtggtcccgatgctgccagccccaggtgaatacaaaccacagctgccgagaattttagcaytgaggtcttgggcaaggcattctcctctccttcatccttggtttcccatctgcaaaagtgagggagtagggtgcagtggctcacacctgtaatctcagcactttgggaggccaaggtgggaggatcacctgagcctaggagtctgacaccagcctgggcaacatagcaagaccccggtctctacaaaaaaatttaaaaattagcccagctggtaatgtgcttctatagtcccagctactcaggaggctgaggcaggaggatctcttgagcctggggaagttgaggctgctgtgagccgtaagccatgaccataccactgcacgccagcttgggcaacagagtgagaccctgtctcaaaaaaaaaaagtgagggcattagactccgtgatggctgtcacctccatcctcaagttggacaagactgtcggggtgggctggggatctgtgggagggagggtgtttgagaatgtggaagtggaacagccttgcacgggagctgttttcaggaaagggactcatgacaaagccagggttctaagccccttccaacaccaaagggcctcttagagagagactcagaacttaaagggagactcggcaaccaggaagcaagtagcaaagcatcactccaagcaggcattttgcagtgtatgagaggcaaaggaaacctcctttaaaactctggaaacaagcataaactgatatttcccaggccctgccagcctgggagtcaaatgaggtcatrttaccacccaaatctgcctgagaacagagtcctgtctccctgccgggccaggcaaatgccacttcaagatacagtccgttgagaacccctagactgggaccttaagctgcaacgtgtgatgaaggctttctagaaaaatgcaattgcagggttggtctagagcccgcttttcttgcctgggccccagcaggatccagtggcctgagcggggaacagattcaagtcccagaacaggatgggggacagcctcacctaccaatttcctttcyattcttttttttttttttttttttttggagacaggctttcgctctgtcacccaggctggagtgcaatggcgcgaccttggctcactgcaacccctgcctcctgggttcaagcgattcatgtacctcagccttccaagtagctgggactacaggtgccagccaccacgcccagctaatttttgtatttttagtagcgacagagtttcaccatgttggccaggctggtcttgaactcctcacctcaggtgatctgcccgcctcagcrtcccaaagtgctgggattacaagcatgagccaccatgccaggcctgcaatttcttagactattgaatggccctggagtcagattgcttggggtcaaaggccacttttaccacctgctgtgtgaccttcagcccttgagcaagttatttaacttctctgtgcctcagggagctcataacagcactatactgtggggtggtgccagatctgtctcatagaccctggccaacggatgaaatgagttctcagacacaggcatrcagcataagagcagctgggtgactgcctggctcaagtggccagagagcagccccaagaagctggagctgcttgcttttattcagtgcaggcacaatgtggaaaacctggagccgacacgacctgcaggtaactgacaattactgtggccaggcacggtggctcacgcctctaatcccagcactttggaaggtcaaggcaggtggatcatgaggtcaggagttcaagaccagcctggccaagatggtgaaaccccgtctctaccaaaaatacaaaaattagctgggagtggtggcacgcacctgtaatcccagctactcgggaggctgaggcaggagaattgcttgaatcctgccggggtagaggttgcagtgagcagagacagtgatactgcacttaagcctgggtgacagagtgagactctatctcaaaaaaaaaaaaaaggtattgttcccctttcagggaacctcacacccgcatgatcaaaggtcagttcctggacaacataaacaaacaagccttttaagataaattcccccacactcccttgtacctactccttgccctctgcctcagggttatagaacagctgccttcagttattctcccccagggctctgcaaaaccttctgacctttcggaaggtttgcatcctttccctatagtttttcccaccactctgacagatcccccacagggtcgactgggggattatgaagactaataggataatgcctgctcagcccataacggagtgtctggatctcagtgaaggttattgtactgtaatacgtagacactatatgtactcattgtttgccgcatatatttgtgcagaagttgattggtgaataaacaggacatcgttttcactcagtgggtctcagccattctcaaactaatccttttatggaatcagtctcaaaaaaagaagccttcttcaggcatggctacacccagctatccaatcataatgtaagcatccaggttttggagctctagaaattggcagaacaggtagacaacaccccataatataggtctcaatccaggctctaggaacccctggaaaatcctgaaatagatgtcagagggtatctaaacccctcaagtgcatgtattattcttgtgtgtctctgcagatttctgggaaagggaccaccatctttctcaggttgtcaaaggagccagcaacccccgaaagttgtaagattctgcctcagggaagatgatgcaggcctcagcaggtgccctcaacagcacagacactcccagggacaccccgggcaccccaggcaccaaagcactggggcaaagatgagagtggctcactccacatctcctttgctgagagccaagccctctccaaagccaagagaaaacaacaaaatcggacggcagtgcacactcagaagcatgaaaccctggcgaggaagcatcattacaattagccgtgacgacaggctgcctatgatcttaggacgcacagtggttctgcgtcatcacagacagcaaggggttcaggaggcggccggtcggcagcggacaggacatggtgagaggtgacagcgtgctggcagcccttgcagccctcgctcgctctcggtgcctcctcggccttggcgcccactctggccgtgcttgaggagcccttcagcccaccgctgcactgtgggagcccctttctgggctggccaaggccggagccggctccctcagcttgctgggaggtgtggagggagaggtgcgggctgcgcgcggcccttgcgggccaacgcaagttcctggtgggcgtggactcggctggcccagcactcggagaggccggccggccagcccgcaagcccggggcagtgaggggcttagcacctgggccagcatttgctgtgctcgatttctcgccaggccttagctgcttccccgcagggcagggcttgggacctgcagccygccatgcctgagcctcctccccctccccaccgtgggctcctgcgaggcccgagcctcccagacgagcgctgctccctgctccatgrcgcccagtcccattgaccgcccaagggctgaggagtgtgggcgtacagcgcgggactggcaagcagctccacctgaggccccgtgggggatccactgggtgaagccagctgggctcctgagtctggtggggacttggagaatctttatgtctagctaaggggttgtaaatgcaccaatcagcactctgtatctagctgaaggtttgtaaacacaccaatcggcaccctctgcctagctcagggtttgtgaatgcaccagtcggcactctgtatctagttaatctggtggggacttggagaatctttatgtctagctaagggattgtgaatgcaccaattggcactctgtatctagctcaaggtttgtaaatgcaccaatcagcactctatatctagctcagggtttgtaaatacaccaatggacactctgtatctagctaatctagtggggacgtggagaacttttgtgtctagctcagggattgtaaacgcaccaatcagcaccctgtcaaaacggaccaatcagctctctgtaaaatggaccaatcagcaggatgcgggtggggccagataaaagaataamagcgggctgccgaagccagccgtggttgccttacacactatgcaagctttgctgtttgcagtaaaactggctgytgcttgctctttgggtccacactgactttatgagctgtagcactcaccatgaaggtttgtagctttactcttgaagccagtgagattaaaaacccaccgggaggaacaaacaactccagtacgcgccgccttaggagctgtaacactcacsgcgaaggtctgcagcttcactcctgagccagccgcaccacgaacctatcagaaggaagaaactccgaacacatccgaacgtcaggaacaaactccggccacgccgcctttaagaactgtagaactcgctacagcactcaccgtgaaggtctgcgatttcattcttgaagtcagtgagaccaagaacccaccaagtccggacacaatgggacctgtatgcagtctatggggcagttcagaccaaagggctgggcgtggcaccacagctgccccgagcccttggcctctctgagcttttctctctcacctgagaaatgggatttcaaggaaaatgagtagcggtaacttacccaccttactccacggttactgtgaagcgcccagaagagaagccatggatgtgggcgacgcattcgaggttagcttcagaagcagcgggcgctgggtagccacattgacacccggtactagcgcttcctcctgggggttcctgggtccaagggggttgtggcagtccttgccacagagatgcagagtctgcaatgtccaaatgtgcttcgtgtgcagtgggagcctggcaagctgtaacccttgtcgtgattcacgcgtcccagggacacttgggggccgctgtgggcaaccccccacaccccgcttttggtcagggctgtgccagcagaaggctggggctggacaatagaggggatgttggggccgggtgggaggcgggaaaggagaaggagggaagtttagcaaggaaagagcagaaacgtcccagagaaattaaatttcagttttgtggtgaacagctggatcctttttcccatatcctcaccaaaaaattcyaatactatctttgtcaccttgtgtcatggatctattttgagctctctcgcggttcctgagctcctgtgtttagagtgcaccaggctctgccttccgggttcaagtcatttttttttttgagatggagtctcgctctgtcgtcccaggctggagtgcagtggcatgatatcggctcactgcaacctccgcctcccgggttcaagtgattctcctgcctcagcctctcaagtagctgggattacaggtgcacgccaccacgcctggctgatttttgtatttttagtagaggtgggggtttcactgtgttgtccaggctggtctcaaactcctggcctcaaatgatccacccagctaggcctcctaaagtgctgggattacaggtgtgagccaccgcgcccggccttgcgatttttgtatctcagctcagctcttcacacgaattcatcctcacaaccgcaggggattcggaggggtccagtaatttttcccttttcacagccaaagcagctgaatcaccaaggccatgaaacgaatgaggatctgcctgatgttcaccaggctggcccctccagatcactgcaaagtggggcaagatgagaacagcgccaggggttgatgacacccagggcgccccagcaggacatcctggcccaactgccctccagggtcccggtcagagggccaagctttgctgctagtcatggcccaagtagcctgtagcttcttccccggatggatgtgggatcctcccagaaaggcctgacccgacctaatcccagtctccccaccttttctgatactgcttccttacctggacctctccacccgctgcccggcccacactcaccactgggctcagctctgctgggacactgctgcctggaccgtgcgtggatgggggcggggcggggacgaggggaggtggagaggtcactgctcctgggagggctgggagtggcagtgagccgttggtctggccattctccctccgtgaggttcaagatcaaaagttcccatgggaaggccacaaccatttcttctgtgaggcccggaaatgataatgggttcctcatactaaaagactttcctggccaggtgcggcggctcgcgcctataatcccagcacttggggaggccgaggccggcggatcactagagatcaggagttagagaccagcctggccaacatggtgaaaccttatctctactaaaaatacaaaattagccgagcgtggtggtacatgcctgtagtcccagctactcgagaggctgaggcacgcgaattgcttgaacccaggaagtggaggttgcagcaaaccgagatcatgccactgcactccagcctgggggacrgagtgaactctgtctcaaaaaaaaatattaaaatttagcctggtgcagtggcttatgcctataatctcagcactttgggaggccgaggtgggcagatcacgaggtcaggggatcgagaacattcttgctaacatggtgaaaccctttctctactaaaaatagaaaaaattagcagggtgttgtggcacatgcctgtagtcccagctacttgggaaactgaggcaggagaatcacttgaacccagaaggtggaggttgcagtgagctgagattgcgccactgcactccagcctgggcgacagagcaagactccgtcttaaaaaaaaawaaawtwaaattaaatttttaagaccttcctgctccctgaagtgggccaccctgatcccagcccccaggtctggagtcaccatttccagttcttcaaacctgcctgttgccgacatgctgggtgaccttgggcaagtcacttcgcctctctgtgcctcgaggcctcaccaatagaatgaccctcactggaagctgataatcaagtccgcccacccacttggacattccaggactgttcaatttcagtgccatatagacttacataagcagggctgcatttctttaatttgagtaaaatgcaaatgctcctggtggatgagtctgcacttctcaaccccaagcctgctcaggtgcatcacttgggcgggagggagaggtcccacccagacccacggacctctgctcttggggtggacaggccctggagattggcattttgcagagcctcctgaggaggggagttcagactttagaaggcagaatgaggggcgaactccccaaccccaatacctgaccacatgcacaacaatgacaaatttttgggaaaagagtgagccaacaggccaaggtgggtggatcacctgaggtcaggaatccaagaccatcctggcaaacatggtgaaaccccatctctactaaaaatacaaaaatgagctggctgtgatggtacgcttgtggtcccagctactcaggaggctgaggcaggagaattgcttgcacccaggaggcggaggttgcagtgagccgagatcttgccactgcactccagtctgggtgacagagtgagaagggacctccaaggctatcgtgttcagctgctggggtgaggagtagggcagaaggctgggcacaggatgtttaggggatgacaggacagagaagacctgtggcccccagcagggtggcctcagccggggggactttcccacccacctctgcgcactcaggctacccaactgaaaacaatgcagcctcaaaactgcccttcttcggggaagacaggaaggttcccgtagcagaacaagtaaaacgtcaggagttagctaaccgagcaagatgaaaaaaacttgcaacgcctccctacacgcaagtgccaggaaagggaaggaaatcacacrggggcacagctgaaagccagcagagccaaggacctgagtggctttcttggaactgatagcttcgcgctagacaaaagtgaatgagaatatgaaccaggtataaaaagcacgagcsgggtgcagtggtgcgcgcctgtcaggcccacctgctaggggggccaagtgggaggatcacttgagcccaggggtttgagaccagcctgggcaaccttgtgaagccccatttcttaaaaaaaaaaaaaaaagttgaatgaaaagagcacaaagaagagatgacaggccaggcacggtggctcacgcctgtaatcccaacactttgggaggccaaggcggacagatcacctgaggccaggagtttgagaccatcctggccaacatggtgaaaccctgtttctactaaaaatacaaaaattaggcgggtgtggtggcgggcgcctgtaatcccagctactcaggaggctgaggcaggagaatggtgtgaacccaggaggcagaggttgcagtgagccaagattgcaccactgcactccagccttggtgacagagcgagactctgtctcaaagaaaagaaaaaaaggagagatgacaaaaaaaawatatatatcaggaaatgcaaagaaactgcagaggggaggaaacgcattaaccaaaacaggaccatgacacatctaaaaacagagttacaacatagtacatgcatctgaaaagcaagggaatagtgtgggagagaaacttgaaataattgcagtgaatttagagaaaaagacaaattaaaacaattagagagaaaatgaccattatgggtcccagaccttccaacatcagggtgactgcactccctgaagtagattatccaacaactgaaacaaaaagctatttagagaaagtcttcctgaaacgaagaaccaactctacagactgcgagggcatgactactccagggaagcaaattcacaatgaccaacataggaacatactggctgagttagtgaactttttttttttttttttcaagacagagtttcgctcttgttgcccaggctggagtgcaatggcaagatctcagctcaccaccacttctgcctccccgattcaagcgattctcctgcctcagcctcccgagtagctgggattacaagcatgtgccaccatgcccagctatttttgtatttttagcagagacagggtttctccatgttggtcagtctggtctcaaactcctgacctcaggtgatccacctgccttggcctcccaaagtgctgggattacaggtgtgagccaccacgctcagattttgtcaaggtttgtaacacttttactttaaaaccataattctcccagtatttagtctttttttttttcttttttgagaaggagtttcactctttctgcctgcaacttctgcctcccgggttcaagtgattctcttgcttcagcctcctgagtagctgagattacaggcgcacgccaccacgcccagctaattttgtatttttagtagagatggggtttcaccatgtttgccaggatggtcttggattcctgacctcaagtgatccacccacgcaaatcctccccaaagtgctggaattataggggtgagccaccaagtctggccgccttttttagtctcgtttcttctgagatggggtcttgctctgtcgctcaggctggagtgcaatggtgtgatctcagcttactctaacctctgcctcccggattcaagtgattctccctactcaaccaccccagtagctgggattacaggcactggccatcatgcctggctaatttttgtatttttgtacacagagtttcgccatgttgtccaggctggtctcaaactcctgagctcaagtgatccacccatcctggcctctcaaaatgttgggattacaggcatgagccaccatgcctggctatcagcatttagccttataatgaaattgaaatagattccattccattctttttttttttttttttttttttgaagcagagtttnnnnnnnnnnnnnnnnnnnnaaaatacaaaaattatccaggcgtggtggtgcatgcctgtaattccagctacttgggaggctgaggcaggagaatcacttgaacccgggaggcagaggttgcagtgaaccaagatcacaccactgcactccaggctgggcaacaagagcaaaactctgcttcaaaaaaaaaaaaaaaaaaaaaaagaatggaatggaatctatttcaatttcattataaggctaaatgctgatagccaggcatggtggctcatgcctgtaatcccaacattttgagaggccaggatgggtggatcacttgagctcaggagtttgagaccagcctggacaacatggcgaaactctgtgtacaaaaatacaaaaattagccaggcatgatggccagtgcctgtaatcccagctactggggtggttgagtagggagaatcacttgaatccgggaggcagaggttagagtaagctgagatcacaccattgcactccagcctgagcgacagagcaagaccccatctcaaaaaaaaaaaaaaaaaaaaaggcggccagacatggtggctcacgcctataattccagcactttgggaggctgaggtgggtggatyactkgaggtcaggagttcaagaccagcctggccaacatggtgaaaccccatctctactaaaaatacaaaattagctgggcgtggtggcgtgcgcctgtaatctcagctactcaggaggctgaagcaagagaatcacttgaacccgggaggcagaagttgcaggcagaaagagtgaaactccttctcaaaaaagaaaaaaaaaaagactaaatactgggagaattatggttttaaagtaaaagtgttacaaaccttgacaaaatctgagcgtggtggctcacacctgtaatcccagcactttgggaggccaaggcaggtggatcacctgaggtcaggagtttgagaccagactgaacctgggaggcagaggttgcagtgagctgagatcacgccactgcactccagcctgggtgacagagctagactctgtctcaaaaataaataaataaaataaaataaaaataaaaataaataaaccttgacaaagtaaaaatatcagcatcaaaatcagagctggggtgggcaagaggaagagggaggatgtttgaggggagtggtcgccttttttatcgcaagaaatgactgatcttgctcaaagtgaaacatctgagtttttaccccaagactccaatgtcttaattaatttcataatcttttttcttaaccatgaggaattcattatgaagtaatagctcttgtggaaagtaaatatttatctaagattcagcaagttttctgggtttttttgccttttttttttttttttttcagatacagggtctcactctgttgcccagattggagtgcagtggcacaatcatggctcactgcagctctgaacttctgggcttaagtgatccttccgcctcagcctcctgagtagctaggattacaggcggcacatgttcccacacccagctagtttgtctgtttgtttgtttgtttgtttgtttgtttcgagatggagtctggctctgtcacccaggctggagtccagtggcacaatctcggctcaccgcaacctccgcctcccgggttcaagcgattcttctgcttcagcctcctgagtagctgggactacaggtgcgcaccaccatgcccagctaattttttgtatttttagtggagacggggtttcaccatattggccaggctggtctcgaactcccgacctcgtgatctgcctggctcggcctcccaaagtgccgggattacaggtgtgaaccaccacacgcagctgacacccagctagtttttaaaaatttttttgtagagacaggggtctcactatgttgcccaggctggtctcaagctcctgggatcctctcaccttgttctcccaaagtgctgggattacaggtgtgaaccatagcacctgatctgcctttttttttttttctgttaaactcaagtaaaatagaatatatttagtttaaaatagaactggtacggtgcaatctaatctaaaattgtttggasttacctttctctgaactgcaggggcagaaggagggtgatcccttttctccccatgtaaagggtcatgaccggcacctctattacaaaaatcaagttaacaagagaaaaaagaacaggcttattacatgcacatgagacatgcaaaatatgaactcaaagaggggccagaaggttgaggagaggaaaaatggagaaatgaataggctcagtgctcagacagtggttagcaaatgactgggagctgagtgggacaagttatgggaaggtgagggcggaactgcaaaggaacaaaagttggatttgtttgtttgtttgttcgttctgagacagagtttcactcttgttgcccaggctggagtgcaatggtgcgatctcggctcactgcaacctccgcctcccaggttcaagcaattctcttgcctcagcctcccgagtagctggaactacaggcacgtgccaccattctcggctaattttttgtattttcagtagagatggggtttcaccatgttggccaggcttgtctcaaacactctttacctcaggtgatccactcgcctcggcctcccaaagtgctgggattacaggcatgagccactgcgcccrgccragacaaccacaattcttttattgttgttgttttttgagatcggagtctccctatgttgcctggtctggtctcaaactcctgggctcaagtgatcctccagtctcaacctcctaaatagctgggattataggtgcatgctgctgtacctggttttgcaattcttttggaaagaarctttcttagtcagataaggaattccaggaagagtccctccctccactcgggggtagggagggtacaagacaaggttaggcagctttgcagtcctctcagcatgtcagagccccagtctggggtatcactttctgagccccaaccttcctatccctcttcatctctccaaacttctctgtgtaggtggcattccccaaggttaacacgaataacgggctatagtaagcatgtactgagcaccagaagttttaggtgcagcagagaacagagccgatgaaacccctgccttcatgaagatatcattctttttctttctttctttctttttttttttttgagacggagtctcactctgtcgcccaggctggagtgcagtggcacgatctcggctcattgcaacctccacctcctgggttcaagcaattctctgcctcagcctcccgagtagctgggattacaggcacccgccaccacgcccagctaatttttgtatttttagtagagacggggtttcaccatcttggccaggctgggcttgaactcctgaccttatgatccaccctcctcagcctcccaaagtgctgggattacaggtgcaagccaatgcacccggcctgaagatatcattctaatgggaggagtttgttacttccttctttgtacttttctgaattgcttgttttgtttgagagttagcatatatctttttttttttttttttttgagacagagtctctctctgtcgcccaggctggagtgtggtggcatgatctcggctcactgcaacctccacctcccaggttcaagcaattctcctgcctcaggtgcctgagtagctgggattacaggtgcacgccaccacgcctagacaatttttttgtgtgtgtatttttagtagagacagggtttcatcatgttggccaggctggtttcaaactcctgacctcaagtgatccacctgcctcggtctcccaaagtgctaggattacaggcgtgagccactgcacccagccagcatacatctttttttttcttttcctgagatggactcttactctgtcgcccaggctggagtgcagtggtgtgatcttggctcactgtaacctccgcctcctgggttcaagcaattctcctgcctcagcctcccaagtagctgagattataggcacgcgccaccatgcctggctgatttttgcatttttagtagagacagcatgcgccaccgtgccaggccatatatcatttttataaaaacaaaggccgggcgcggtggctcctgcctgtaatcccagcactttgggaggcctaggcaggtggatcacctgaagtcaggagtttgagaccagcctgaccaacgtgaggaaaccctgtctctactaaaaatacaaaaattaaccaggcgtggtggtgggcgcctgtaatcccaactacttgggaagctgaggcaggagaatcacttgaacccaggaggtgtaggaggttgcagtgagccgacatcatgccatggcactccagcctgggtgatggaacaagattccatctcaaaaaaaaaaaaaaaaaagaaaaaagaaaacaatttaccttcacacacacataaaacacatccacggaggatgattcttctgaacagctggagttgggaagcactacatttgaagctggatgagtcattgacactcttgtgtaaacagggttttcaggaagacagcgtggggacccagagtctctggaggtcccagctaaagataagattccctgcggagcagctgaccctgggaagagctgaaaagggaagctggttcccctgggtttttaggctctcttggaaggaacaaccatccaggctatctcatgaggcgctcttgccagagatgcttgtcccagtcctgatcctaagcccctgcctcgttggcattggtgagccccgtaagccccatccacttcctccccctcatcacccacctatytcttaagcagggccctgactcctgccccgtccactgtgccctcactctggccacacaggcctgcccactgcctattttttttttttttttgagacagagtctcaccctgtcacctaggctggagtgcagtggcacgatctctgctcactgcaacctctgcctcccaagttcaagtgattctcctgcctcagccttccgagtaactgggactataggtgtgtgccaccatgcctggctaatttttgtattttagtacagacggggcttcaccatgttggccatgctggtctcgaactcctgacctcaagtgatctgccgcctcggcctcacagaatgctgagttacaggcgtgagccaccacacccagccgaccactgcttggcttttgcaggtgcttttacctccaccagaatctcctcctcgcccctaggcttcgaggcctccttttctggaaggcttccgtgacagtccagaccacctggctctgccttgttccagtgactcagaggctcagagccggcgaagccttggggccttgcacccgggaggcaggaaggcacacgggccctgcctactgggtgaccttggccaagtcctttgccctggatgactctctttcctcatcggaaagataggggcatcatgagctgcttgataggaatcaagaagataacgtgtgaaatgttagctatttttagtttcaggtttgttggaaagaatgacaatgagacgagcttacaggaagggggaatgaaagggggaaatcaagtcagtaagggaagaatgtgataaaaagcttaaatggaaatttaaaaaacctaacttttctgggaggacggaggctccttgtggagccagttgagggtctgtgggggtcatgggrgcaccgtcagacactgtgggagatgctggacagggctgggtccaggcctccaggcccagtgggacctcccttctcagcccccttctctctttttttttcctttgagacggagtctcactctgtcacccaggctggagtgcaatggcacaatctcggctcactacaacctccacctcccaggttcaagcgcttctcctgcctcagcctcccaaatagccaggactacaggcatgtgccaccacgcccggctaatttttgtatttttagtagagatggggtttcaccatgttggtcaggctggtcttgaactcctgacctcaggtgatctgcccgcctcggcctcccaaagtgctgggattgcaggcatgagccaccgcgcccggttcagcccccttctctttcagctcaggcccccctgcccctgcagagccttgggaagtgtcaccccacaccaactccaccagctcctacgaaagcacccccaaatcataccctctaggcaccgcagcaaaagcagcttcagggcaatcccccagcacaacctcaccccttcctgagactggtgggtgagctgaggtcacccgccgctgccagcagggctgggtaaatctcggagcaggcgggggcgagggcgggggctgtcaccgcggtgttgcctgacgcaccctcctccccagctcaggaaattgtgaggtgaactcttyccctccagagcgctgtctgctgtgaaggcggctcrggcccccaacacacacatagcaggtgacaggtagggcccaagcactggagtccccgctcctccctgaagacctatcagggcatctctgggactgtgttcctgctctccctgctctgcacgctcccccaccctacagttcccacggggccaaacttcggtcagaatcacctttattgcacagccgctctgtacgccaggggctcatcacacatacaaggtcggtggattgtccccatcttacagatgagggagcggaggcagggcgtgcagaaggggccactcgtggccacggagcrgggactggcaggcccattgtcgtcagcggactcctcagccccagtgccaggcaaggactagagccatggaaagcagggacgctgagtccctggggcgtttggggcatccccagctgacgcatttgttgcagcctctaggggcatggaataggcaaagtgcccacatgggggtgcaagaactgatgcccccaccccccactttgtgagtacaccccatggaacctcgttctttttttgagacagagcctcactttgttacccaggctggagtgcagtggcatgatcttggctcactgcaacctccgcctcctgggtccaagcgattctcctgcctcagcctcccaggtagctgggattacaggcatgcaccaccacgcccagctaatttttgtatttttcgtagagatggggtttctccgtgttggccaggctggtctcaaactcttgacctcaggtgatctgcctgcctcagcttccccaagtgctgggattacagacatgagccactgcacccagccccaaacctcattctttttatggggtcattctttgtatggacgtccagaatcaccaatcccctactgttggacatgcaggttatttctagtcttttgctaagacaagcagtgttgtgatgactacactatcctacatcccttggcatgtgggtgtgtgtaggataaatgttctgggcaccaggctccagcaggccccacgaacaggactctgggccttatgccaggagggggaagattcaaagagggcccctcacctgggtctgacccaaacccacaccaaagccagcaggtcatccagagctgattccctgggaagcctgcccaggaaccaccgtccgtcgggctttcttattgtaagagcttttttttttttttcctcctttggcagagcacagcgctgggctccagccctgatgcagaggtacaaagctcgtctgggcagattgttatgcaaatcaaaagaggaagcagagctagggragccgaggagctcctgctgggctctgccagggaagaagccgcagtaggagcccctacgtaggccctgcaagaggcctggygttcaggaaagggcccgctgaccatccagtgcagggaaaggagtccagctctggcctctgcccctcagctccacctcctgcattcctaggagttctccagaggatctgatgggagctcagaaccggtcccaacaggtactgtgacgcgatggccattttccttccctttaccactgtgcccccctccccccactgcagggacgtcccctggggcgtctctgtgcccatgccccattgggcgcctcctctcagcccagccccctccacactgtattgtctccttagccgtgagctccatgagagcagggtgtgcccaggtcactgttgtctccccagtgcccggcacagtgcctggcacatcatagatgccccgtgctcctacaccaacgaactcccctgacagcaccacatccacggggagctaggcctcagggaacaaagtggtgcctggctgaggcacccacgcagggcctgttcttttgtttgagacggagtctcactcgttacccagcccagattgcagtggcgcaatctcggctcactgcaacctccacctcctgggttcaaatgattctcctgcctcagcctcctgagtagttgcgattataggcgtgcaccaccatgcccgactaatttttgtatttttagtagagacggcttcacatgttggccaggcaagtctcaaactcctgacctcaggtgatccacccaccttggcctcccaaagtgctggaattacaggtgtgagccaccgtgcctggctcggacttgttcttgaggatgacggaacgggggttttgctgttaggccagccaacaaaatggacaagaaagacgggggagagaagtgagatccttcccgccagagcctgaggctaatgcaggccgtgctgggcctcatgctccaggccagcctggaagagcccaaagccagtttccttccaatgctgcatatattacccagcattcttagatggaaagtccagtttcttttgctttttttgtgtatgcacttcaggaattttttaagctaattgactgaagggctcatgtgcctaggaatagcaatcctaataagcttttgcggaatctccctggtttcagaccaaggctgtgaatgtcccaactcacttctgttcttggtgagttttgcttgtgtttgtgaacgaggtgaattcattaaacacagcagtggcccctgcccagtgctggctccctacaatgaccacttcaattgcactgacccagatgcaatggattccaccgcagaagtgcatttaactcaaatgcaaacataactggaaggtgacacaagtcctgaaatccctggttgtgcagactcatcagtgcctagccactggtcactagcatgttttcatttttctccagctccctccacccttcatgaacgggggctggaaaatgtggtctgctctgataaggatttgcgtcaggctactggctactcagcagccgagaagagcaagcctccaggcctctgcacgcgtgccttctgcccggtgagcctctcactatcgtccttctaaaagacacttcaaaaagaggcaaaatcatgccttccatacatatattaaaaaaagaatatgtgtcaaatattttattctactcctaaaccaatttaaggaaaccaggcagatgttacaactggttcaaatgaaatcctaagaacagacacatttaataatcaggaatatggaaaagaacatgcaaatgggagctgggcacagcggctcatgcctgtaattccagcactttgggaggccgaggtgggtggatcacctgaggtcaggagttcgagaccagcctggccaacatggtaaaaccccgtctccaccaaaaaaaaaaaaaaaaaattagctgggcatggtggcacatgcctgtaatcccagctactcagtaggctgaggcaggagaatcgcttgagcctgggaggtggaggttgcagtgagccaagattgcactattgcattccagcctaggcaacaaaagcaaaactccatctcaaaaaacaacaacaacaacaacaaaaacacgcaaatgggggcaaagctagggaggggagagtcaactggtctcctactggagtttggaatctgcaggtctgtagagaagcaaaattttgcattgctatcactaacctacaagttaaagagttgtaagtagtcttcatagaatggagtcagataatccaagggaggtcctggagagtctagataatgcacagtttttcaaagatgtacaactgttttcaaagatgtacaaatatgtacaactctgaccactgatgtccttcacctggccaacttaacccacacctcctccaggaagccatccctgatgcccaagactgggttaagtgccagcccctgggctccctcagtgccttgaatttctgatcacactgttccgtctccctcatcagatctatgagattttttttttttttaagacagagtctcactgtgtcacccaggctggagtgcagtggcacagtcatagctcactacagcctcaaactcctgggctcaagggatctttagcctccccagtagctgggactacaagtgtatgccaccatgcccagctaatttttaagttgtcaagacaaggtcttgctttgttacccaggctggtctcgaactcctgggctcaagcaatttgcctgcctcggcctcccaaagtgctgggattacaggtgtgagccactgtgcctggcctgatctatgagatccttaaaacagaagctgtgtcttacccacctctcactgtgcctttgagaatcaagggacacgtggttgaatgaatgaatgaatgaatgagagaaaaaatgaacaatacagggtcctaagccaaagtggtccacagggcccccataaacccgtaaaagactgacgagacagctgttgaaggtctgcatgtgtacctgtgaacacagacaggcttcaatctcaatcttaataagggctcctcagaaatgaagctcaggragcaaacaaacatgggaaatgatggctaaacacaaacaggtgggttttgcttttatttccttttaaccataggactcctgagtccttgtaatatatagtaaagagtcttgctctgttgcccaggctggagtgcagtggcacaatcacagctcactgcagcctcgaactcctgggctcgagccatcctcctgcttcaggctcctgagtagctgcgactacaggtgtgcaccaccacacccagctaatttttaaaaaattcttttaagagacaagatctcactatgttgcccargctggtctcaaactcctgggcacaagcaatcctcccacctcagcctcccgagtagctgggaccacagacacacgccaccatgcctggctaatttttgtattttttgttgagacagggtctctctatgttgcacaggctagtctcgaactcctgggttcaagcgatcctcctgcctcatcctcccaaagtgccgggattacaggcgtgagccactgtgcccaggctaacagcctttaatatattaaagtaccccaggagggagaatgcaatgtttccatgttttccttatctgactataaaacaatttttttaatggaccagagacgatggattcatggagttactgtgaggaagacactcagcatcgtgcctggtatcgtgtgtgcttcataaacgccagccatagcatgattctttataaaggcaccagctgcatttatggagtaaatgcctttcttgtgtcatctcgcttgactggcaaagccataaggccaggtgaggaagatgaggcaggggatgaagaggatataacacgtaggaggtgaagtcactaacccaaatccttgcagccggcaagtggtcagaattcttggaccaggtgtgaggccttaagagaacaagctagcccagggcttggcatgaagtaggtgcttaataaagattggttttagccaggcgcagtggctcatgcctgtaatctcagcactttgggaggctgaagcaggaggatcacttgagcccaggagttccagaccagcctgggcaacacggctaatccctgtctctactaaaaatacaaaaarattagtcgggtgtggtggcgcgtgcctgtaatcccagctactcgggaggctgaggcaggagaatagcttgaacctgggaggtagactttgcaatgagccaagatcgcaccactgcmctccagccggggcaacagagcaagactgtctcaaaaaaaaaaaaaaaaaaaaaaaaaaaaaagactggtttctaccatgcctccctcctccctccttcccattcagcccagaggttctggcagggcagacagagctccaggccaaggacccccaggtggatgtacagagcagacccaggctgagcccaatctttccaccctgcagttcagctcctccctcccctttctcttcccagtcttcctgaacctgcacctggcctctctgcacacccccgcgttatttggggatgtaagaactcagggttccctcccttattacttctccttgtccatcctggtgatagtgcttgactctcaacacacaaaaggggctttaaaatgatcctttgaaaaaataatttttttgctgggcacagtggctcacgcctgtaatcccagctctttgggaggccaagacaggcggatcacctgaggttgggagttcaagaccagcctgatcaacatggagaaaccccgtctctactaaaaatacaaaattagctgagcgtggtggtgcagctcttcgggaggctgaggcaggagaatcgcttgaacccaggaggcggaggttgcagtgagccgagatcatgccattgtactccagcctgggcaacaagagtgaaactctgtctcaaaaaaaaaaaaaaaaaaagaaagaaaaaaaagaaaaaataattctttaaaactcttttttagagacagggtctcactccatcacccaggctggatgtcatcatagttcactgtaaccttgaacttctgggctcaagcaattctccagcctcagactcctgagtagctgggaccacaggcgcataccaccacgcctggctaaaactggttccttttttttttttttgagacagtgccttgtcctgtcccccgggctgcagtgcaatggcacaaacactgcccactgcagccttgacctcctgggctcaagcgatcttcccctacagcctcctgagtagctggcaccacaggcacgtgccaccatgcctggccaaattttttttttttttttgtagggatggagtctcactatgttgcccaagctggtctcaatctcctgggctcaagccatcctcctgccttggcctcccaaagtgctgggattaaaggcatgagccaccgtgcccagcctaaaaatggtcttgattcaatgagtgagtaaatgaagcctgtgcccagggcctgccaggccccctggggctgcccacagggtaaacacagacccacacggagccccactccaggcctggtcgaaaaaaatgctgctccagctgaaggcttgctcagagaaatgactcagcctgagcactcagatgcaacttccacgttttatggactgaaggtgctttcataacagctggtgatgatgagccagaggcgggctataaacagagcggtgatctggtcctgaacactcaggtctcagcccccacccacaagcagggcctctgaggctgtggcttctccacactggtgctgctttgtgctggcaaatagcacaggcccccaaaatgacctggaggctccttaactgaggaggcagatgagtgacagggccagacctgcagcctcaagggcctggctgtgccctccctagctcccttgggcctgggagccttccatgaacctgtggcctgggaccaagagcatggggggcctagtgatgtgcctggtggggagcggggagtgctgccagcaatgacagtcccgctggggggacgtggtacagactcactgagacacagaaccctgtgagcaaggggggttcacttaatcctccctgaggactcagacaggtgggctgcaggcagtggggtagccttgcctctcactcatgcccacccacccatttgctcattcattcagacaagcgtggattgagtattttctttttttttcttttaaagacagggttttgctctgtcgctcaggctgaagtgcagtggcatgatctcagctcactacagcctcatcctcccaggctcaaccgatcctcctgcctcggcctctcaaagtattgggattacaggcgtggcccacgcctggtgaattgagcactttctttctttttcttttttttttttttttttttgagatggagtctcactctgtcatccaggctggagtgcagtggcatgacctcggctcactgcaacttctgcctcccgggttcaagtgattctcctgcctcagtctcccaagtagctgggattacaggcacccaccaccacgcccggctagttttgtatttttagtagagatggggttttaccatgttggccaggctgttcttgaactcctgacctcaggtgatccatccgcctcggcctcccaaagtgttaggattacaggcgtgggccactgcgcctggcaaattgagcactttctttttttttttttgagaccgggtcttgctctgtcaccaggctggagtgcagtggcccaatctcagctcactgcaacctccacctcccaggttcaagcgattatcctgcctcagcctccaagtagctgggattacaggcacgcgccatcacgcccggctaattttttgtattttagtagagacagggtttcaccgtgttagccaagatggtctcgatctcctaacctcatgatccacccaccttggcctcccaaagtgctgggattacagatgtgagccaccgtgccctgccaaatcgagcactttctaagtgcccacctgtcagcgtcaccccaggctttcccatctcagcccgtggctccactctcctctagctactttggccaaaaaccacagagtcatcttggatcccaatttttgcttcacccccacatccaatctttcggcgagtcccgtctgctttacctcggcacatcatcagtgcgctcagtgcacttcccagccacctcccacgctgggctgctaaccttctgccaggtcaccatagctaccaccagctcctcctgaccctttggccttggtctctaaaacccattctcctctcatcagagtgacctcatcccagcatcattctgaccatttctcatcttaaagtcctcaaaagggtcctatcagatattaacaatttttaaagaaattaagacagaatggctttggcatctggctattaaaaaaaaagggtagggggggccgagtgcggtggctcatgcttgtaaacccagaactttgggaggccaaagtgggagggtcccttgagcccaggagttcgagaccagcctgggcaacacagagagaccctgtctttacaaaaacaaaattagctgggtgtggcggcacatgcctgtagtcctagctacttgggagactgaggtggcaggatcacttgagcctgggaggttgaggccgcggtgagctgagatcatgccactgcactccggcctgggtgacagagtgagagcccatttaaaaatgaaaaataaagggaaaaaaaaggacagaacaggagtcccggagacagaaccttgcataaatgagaatttgccgtatgacagagaagcatcaccaaccagtggggaaaagatagactcttttataaatggcgttgggacaagtggtgatccatatgggaaagtaaaattagatccccacctaacaccacacacacaactccaggtggattcaggacttacatgtgaataacaaaattttaacacatttagaagaaaatatagaagaatatttttatgacctcagggtaaggaacaatttcttttttaaataaactttttgtttgattacaacatgcatagtgtacaagtcataagggtgccgcttgatgaaatttcacagtgaccccagctgtgtagccagcatccagatcaacaagcgggatgtaaggccaggcacggtggctcactcctgtaatcccaacactttgggaggccgaggagggcggatcagaaggtcaggagtttgagaccagcctggccaatatggtgaaaccccgtctcaactaaaaatacaaaaattagcccggcatggtggcacacacctgtagtcccagctacttgggaggctgtggcagaagaatcgcttgaaccctggaggcggagtttgcagtaacccgagatcgtgccactgcactccagcctggcgaaagggcgagaatccgtctaaaaaaaataaaaataaaaaacacaacaacaaatgggacatagccagtgccttccaaagcccccacgtgcctctttttttctttcttttttttttttgtttgagacggagtcttgctctgttgcccaggctggagtgcagtggcatgatctcggctcactgaaacctccgcctcctggattcaagcaactctcctgcctcagcctcctgagtagctgggactacaggcacacaccaccattcctggctaattctttttttatttttagtagagacggggtttcaccagttggccaggatggtctcgatctcctgacctcatgatccacccgcctcagcctcccaaaatgctgggattgcaggtttgagccaccacactcagccttctttttttttttttttttttttttttgagacggagttttgctcttgttgcccaggttggagtgcaatggcacggtctcggctcaccgcagcctccccttcctgggttcaagtgattctcctgcctcagcctccccagtagctgggattacaggcatccgccaccacactcggctaattttttttttttttctttagtagagacagggtttctccatgttggtcaggctggtctcaaactcccgatgccaggtgatcctcccgcctcagcctcccatagtgttgggattacaggcgtgagccaccgtgcccagccttttttttcttttcttttcttttttttgagatggagtctcactctgttgcccaggctggagtgcaatgcaatggcgtgatctcagctcactacaacctctacctcccggattcaagcgattctcctgtctcagtctcccaagtagctgggattacaggtgtgttctgccacgcccagataatttttgtatttttagtagagacagggtttcaccatgttggccaggctggtcttgaactcctgacatcaagtgatccacctgcctcagcctcccagagtgctgagattacaggtgtgagccacggcacccagctcctcatgccttttgacaggaaagagtatcttaggcacaaaaggtatcagctacaatggaaaaaaattgatgagtctgatgatattgacatttaaatcttaagttcaacaaaaaaaaatgccacaagattaaaggatacgtacagctgagcaccatgactcgtatctgtaatcccagcattttgggagactgaggcaggcagattacttgagctgaggagtttgagaccagcctgggcaacatggcaaaactctgtctctacaaaaaatacaaaaattagccaggtgtggtggcgtatgcctgtagtcccagttacttggaaggctgaggtgggagaatcactggaacctgggaggcagaggttgcagtgagctgagactgggccactgcactccagcctgagtgacagagcaagaccctgtctcaaaaataaataaatagataaataaataaataaataaataaataaataacagatatgcacaatatggaggaaatatctgcaatataatcagcaaattggtatccagaatatgtaaaggtcttctgcaaatcaagaagagagacaaccaacccaacagaaaatttggcacaggttatgaaccttataggaaaaaaaagcctagatggccaataatcatatgaaaaagaggctctgggctgggcatggtggttcatgtcaataatcccagcaatttgggaggccaaggtgggaggatcacttgagtccaggagctggagaacagactgggcagcaaagtgagacctcgtctctacagaaaacaaaataattagccgggcatgatggtgcatgcctgtagtcccagctactctggaggctaaagcagggggatggattgaatccagcagatggaggctacagtgacctatgatcatgccactgcattccagcttgggcagcagagtgagaccctgcctcaaaaacagaaaaagtctctgtctcaatagtatcagagacatgtaaatttttttttgagatagtctcaccctgttgcccaggctggagtgtactggtgcagtctcagctcactgcaacctccacctcctgggttcaagcaattctcctgcctcagcctcccaagtagctgggattacaggtgtgcaccaccacgcctggctaatttttgtatttttagtagagacgaggttttgccatgttggccaggctggtctcgaactcctgacctcaagtgatccacccacattagcctcccaaagtgctgggattacaggcgtgagccactgcgcctggctgagaaaggtaaattaaaacaacaaggagatattatgtctcacccatcagataatttaaaatggaagaaaacataaaagctgatattattaaatgtagacccaaatgagactccttaaaaacaccagctctgggctgggcgcggcggctcatgcctgtaatcccaacactttgggaggccgatatgggtggatcacgaggtcaggagatggagaccatcctggctaacaccgtgaaaccacatctctcctaaaactacaaaaaattagcccagcatggtggcacgcacctgtagtcccagctactcgggaggctgaggcaggagaatcacttaaaccgcagaggcagaggttgcagtgagccaaaatcacatcattgcactccaggctgggcaaaagagcaagacttcgtctcaaacaaacagacaaacaaataaaaacccaccagctctggagaagattggtaaagccacttggaagtgacacaaaatggcagcttgaaggtcaggtcaagatcagggtgaaggtgagaacatctgtgagcattcctcttccaggcagagactctacagaagctctatgagcatcccaggaggaagaaattggaaacgtcatcaaggagatacacaaggtatgatacactcatacaatggaaaatggccggacaaatgaaagaaacaacatcaaagtgaattatcataagatacaccaagcagggccagggtggggccaggtccacctctcctgttgcccaatcttgaaggtggcagaggacctttgaggcaccttgctggcccactgaggagctgtggccgaggcacacgcccatcagggctgactccttgctgggaactgggtcaggtggatggacgtggtgacgagcaacagtgaggtttcccccacatcctttcacctgccctgctgcgtctgctgctgagtcaggatccatctggggagccaccgtgggacactctcccctatgggagagtggtaaggttctggaggaacacatgggactggaaatgtttctgtggccatttttatttttatttatttttttaagacagagtcttgctctgttgctcaggctggagtgcagtactgtgatctcagctcactgcaacctctgcctgtgggagttcaagcaattcttctgtctcagcctcccaagtagctgggattacaagcacccaccaccacgcctggctaatttgtgtatttttagtagagatggggtttcaccatgttggctagtctggtgtcaaactcccgacctcaggtgatctgcccatctgagactccc

SEQ ID NO: 96368 - DNA, 26140 bp, Homo sapiens
agccgggcatggtggcacatgcatgtaatccaagctactcgggaggctgaggcatgaccattgcttgatccgggaggcagaggttacagagaactgagatctcaccatcgcactccagcctgggcaacaagagcaaaactccatctaaaaaaaagagaaaagagtcacaaagactcatgaacacaaggaatgctgtttctattagctcttcctgaagaatatacaaatgaaaaaaattcccattaactaaaaattgattggcagagcttgtgtgtaagaactaatggtgggcattgactatatgtgcctctaaaatttgggctaaatgaaaggtatctgtgtgataaaatataacataattgatacatattttaaaaatgcataaatgtttctgtatcatgaatataacaataaatagaaccaaccagagtggggatatgtgccatgtgagtgtcttatgcatgtatgtagatatgtgtatttccattgacatgtaattacagaacagtgtgggagaacttctatagaacatattggtcctctcagtaaacatagaaaggcttaattctctgactagatgaaaaaaatatttttcagattggctaacaagcaaaatccaactctgcggtatgtaagaaacacaactaaagcaaactgtatcacagaggttaaaaataaaagaatgatctttatgttctcatgctagaccaatacttggcctttagcaatgcattaaaaaatgtttaaatcttcttaccaattgatatatcattttcagtgtctgccttgtataagtagatgcttgtcctgttgctccctgcaggcacctgtctctcccatgatgctgagttaggtgtttgtccagtatttgcccaatcagagaactgataggttaaataaaagctattaatttgcagtttgtccagcctttccttatgtgaagagtgaaagggatattcaccagttctgtgtacctccaagggaaagctaaagttggcttaaccaattttacaaaaagcaatgacccaaaaattctacctttaggtatatacccgagatacttgcatccacttctcccaagagatacgtaaaataatattcaaataagttatattcacaaaagtcaaacactaaaaacaacccgcatgtctctattagtaaacaaatgggaaatatacaacattcatataccagattactgtgcagaaaggaaaatgatgaattataattacatgcaacatgagtgaagtttccaaacataatattgagtgaagcagaaagaaaggaatgaatactggatgattccattcatataaagttcagaagtagaaaaattgaaatcacaattttaggggtgcatgtgtagataaaatgataaaaagggaactgttagggaattgctcaaataacaataaaagcaatggatactttttatagaggacagaagctgggaaatagcccatgggaatgtatgggttattattacttgacctggatagggtggttttgtgtgtatttgctttaaataattcattaagctcgatgtttgaaatatctcatatttatttgtgtgatcatgaaggcaatacatgctttaagactaacattaagaaaaatcccacactgttacaaacatgtgttttttcaaacatttttaatcccagttaatttcatttgctataatctacaaatatgcaataaaagtgtaaatacaaatgtttattctaaattaggaatagacaccaccctctttcctcctactccaccagtggatcattactcacctgtataagaaactagaacaagtggcctgactttggtgatttatatgtgatttcctgtttcacacgtgaggctattcttactatgattattcttattatgattaatccttattgttattaatcttgttcttattgtgattattcctgttgtcctccccaccaaacacactgtacctgcccacacactgccgggaggaaaacatcctggttcagattctcagcactgcgtttaggaataaagtctcgtagcaacattaggcttttagtttttttttttaattttttttttactttttgaaacagagtctcactctgtcacccaggttggagttgagtggcgtgatctcagctcactgcaacctctgcttcttgggttgaagcgattctcctgtctcagcctcccgagtagcttgcattacaggagtgcaccaccactgctcggctaatttttctatttttagtagagacagggtttcgccatgttggccaggctggtcccaaactcctgacctcaggtgatccgctcgccttggcctcccgaagtgctgggattacaggcgtgagccactgcacctgaccacattagacttttagaaggctcaggtgttttacattgggcaggtgaactggctaatatttgtaccctcaatcattgctatgaactccacataataagactagttcatgaggaataaatctgccgaaaccattaactatatcatggataccaaagagattgggttagcaggtcatattgccttttgtattaacctcctctatccaccccttcaagtatatagttaagtaaatgtagcaatattttggtgatttcaaattaagtgtgtaagattattcaccggtcctattatcctttcttgagtagtgtcttaaaacacaagaaccaagggatccttaactgctacattcccagcaaggactggggaaaggtgatggtagaaatcttgcccttgtaacattgcatgttaagtaagagagcactaatggtggggagtatttgggattcgggcatttggaatgggagcctggcattgttgggaggagcagcagcgttaggttactttccaaacacccctagagtttaattgccttgatttcttcccctaaatccgactattagtccatgtccatcaagagatggcctcctctcactttctcaattctctgttcttccgccttctcacctcacccttctgtgccttttgtcctccaacatacacttgataggagtgggggagtggaggagaggctcatctgagttgggggctgaaggggagattgcaatggtaactgtgtttttattgctgttgttaaaggtgtttggcattttggagcaagctaaagagcaatttgatttagaagactattctgtcagatcacactggaacaagtcttcctgacctttgctaacccagagaaatcatccagtgatgatgaaaacgaggtgccatgagattccctcttaaaaaaaaaaaaaaacagaaaaagaaaaaaaaaagaaatgccctacacgtgagtcccaataaactcatctactcatcaagctggactggtctgagtcattctttggtctgttggctcctttcccagtttggggcggaggatgttctatacagtcctggatttttccccaaccaggaagagaactccttgtcctgcagtgttcctcttgcgccctctcctgacaaagcttaacttcggagctggagcaagtcgtatccggcattgcagggaagagtgaatttggcctgtgatccaatcagaagctgcgattctaaacaggaagccacactggatgcgagaattggggtggggcgcgccaagaggagcaagcattatagaacgtggggagcatgagaaatacacggaggtggaaacgccggagtggctggcgggtaaaggcagcgggcgcagatgaagcgggctgggcgtcccacgcgcagaaccgtcccggacagaagccgcaggggctgcgctggctggaaaaaggaacgcgagtacagcgcgcgtggcgcggggtctgctccaggacggaatcttttgggtggcccgcatgaggggtttgcaggaccccgggcctttgggaagttgtctgctaaactccagtagaccctgaggagcagcggctcatgaatcttcttaaacttctgtcatcagcggctgggccagctgaaggtgaccatggcacacgagggagagagaagcccgcgagaggcggagaaatgtggggtcgtccaggagggtcgacaaggcaaagaacctgaagacgacccaaaagggtacctaggtggggccctttcagggacttggggcgtagggtagggcgcatgggacgaggtgggtgagcgcaagggacgagatgggtgtgcgcatgggacgaggtgggtgggagcatgagacgaggtgggtggggcggtgggtgaggtctccgcccccagacgggctggcgaggaagcagggaagaagtaacgttgggctggtgaggcaacaggtggggcgcactggagctgcgggataataggtggaacaaactggggactacactcgtgggcgcacgtgcggaagagggactgaggaggttcttgcgtgctcccctcgagcaccgccgacagcttcacccgcacctcctgccttccgcaccgctgactcctaccgctccgcgcactgcgcgcccccagccctagtgcagccagctcccggccgggtccgcgcgagggccaggctgccaacctgcccgcgggcggctggtggttggggagggcgttgggaggaggagtcccgccgggtggacgcgcgcccttcagcggcggaggcggaggcggcagcggcgaggcctgagggtgcgtgctagggagtcctggcgcgtccttcttctgccggcgtccccctgcgcttgcagctgctccccgacgcccgggaggcccacccgctagccgcgatgggcgcgcagagcccaaaagggcgacccccaaacaaaactcacgcatataaatcctccagagacttcctcatccccccgccaacacacacacacccacacacacatacacacaatcaaatcaaatagaagcactgttaggaattttatattggctatgcaaagtgcttgaacgcactgactttggaggcaaatgccttgtccctagtcctgactagtccagaatttatttgctgtgacctatggcaaattgcttggtttctctaagcctccatttcctaaggcttatatctgaaaataactataagaggaaaggatgctattgtatccaactcagagggcagtcctgatacttacattgcgagaacatgttaagtgttccataaatggcagaaggggctgtggaagttcagtgattataggtagtttaatttgtcttagttttcctttgtgaaagcataaattacaccagagaaagtcacatatgtaaggaatactttatgcaaagctgttgtcctagggaagagagaccagaactcagtctaaactaactctgctgaaacaaagtggggcagggtttttaagctctaggatgagagtagaaaggtgctggagggctgtcggaagcatactgagttgtttgctgagtttacaagtgtttcctccgtgattaggccagctgtgtttgctaattggctctcagggaagttaggctcctaccctcccacagaaactgggagatagggggaccgtcttccttgatgattgcatttcaaaggaatggctcccaggtccttgacaaagatgattctggtttgtaaaactagtaagaggctattaaaaagagttacagatatctcaagacagagaaagaatttacagtgaaaagctttctaaagaaaatgctctgtattaatctgttttcacactgctgataaagacatacccaagactgggcaatttacaaaagaaagaggtttattggacttacagttccacgtggctgaggaggcctcacaatcacggcagaaggtgaaaggtatatctcacatagtggcagacaagaaagcttgtgcagggaaactccccatttgaaaaccatcagttcttatgagacttactcactatcatgagaagagcacgggaacaacccatccccatgattcagtcatcactcacagggtccctcccataacacgtgggaattatgggagctacaagatgagatttgggtgtggacacagagtcaaaccatatcatgctctaagaaaagaaagttttgggcctagagtcaggaaaaagccytttcaagtcaagctgagaactttaaggtggtcttggctacctcattttatgcaaagtaggcagaaaatttaaaagaaaagaaacatatttaagtacaattaagaaaattacagtgtttcagttaaagcagttcagtgctttttagaaaaggagctgaaattaaatagtaagtataaatttaattctaataattcagggctatgaaccatgtaattgcttaatttccaataactatttgttcttttgcgactacagtttggcaggttgccctaataattttcaggcattttaggttcatgctccttccaaccctccttttcccttacaagggttgcatccaagttatgagggataagggtggggggtgtttcatatttaggaccaggatgttgatgtgtacttattcctggccaggctgttttggagtcaggactcttgcgctataagatcccccaaatctattttgggaatagtgaaagggatgggatgatgctgaggagccgggcttcggcatttccttattgtgcattatttccaatccgttgttttaccctggaaagggtcaactgaaagaactggccattgtctttgtaggtattaagtattgctctgtcttccccgagaccaaaaaataaaagattgaatgagggatggtactgaattgaaaacttatggttaatattccaaaacattacccactaaaagagcaagagaaaaaagttagtgggagagtgtttcagatgattccttcttcacaggtttacctgttcccccacctgaagagttaattagaaaaacaatacaggtacattacataaaattcaaactctatagacatacaatttgtaaaatgtgtaagtcccccattttccacctcctgaggacatactatcaacagatcttctaccatttttcttttctgtacatgtacttcttttctctacatatatatttttccaaacaatgtgtttatatcatgtataatattttgcagtttactttttctaccttagtagtatattatcctctcatgacagtgtatctatatctatcccttctttgtaacagaggaacaggattttattgaaggtattggcatgatttatgtaatcattctttctgttttcatttgatcttactgttttccagtgttatcatgaacatctttctgcctgaatctttgttttgctatggttttgctttatgaactttgtttctaggtttgtttgctttttttttaaatagcctttaagacttggatctgctgcataaattcctttaaagtttgcagacatgtattgagtgtattgatcagctgcactaaggagtaagcacctgatgtgaagcccccttccatgaaaaatcctttaagaatggcatagttgtgaagttggaaggctgtatgaatcacaaattgattttaccccatcaccacatcagccaaacacctgctctgccattttgattaagattcgtcatgtatttcatgccagtaatcccagcactttgggaagccaaggcagttggatcacctgaggtcaggagtttgagaccagcctcaacaacatggttaaaccccatctctactaaaaacacaaaaaattagccaggcgtgatggcacgcacctgtaatcccagctacttgggaggctgaggcaggacaatcgcttgaacccgggaggtgaaggttgcagtgagacgagatcgcgccattgcactccagcctgggcaacaagagcaaaactccatctcaaaaaaaaaaaaaaattaatcatgtattaattgagatttgcagggccgtgtgctttatataaaacaatgcacaatgcactaagctccatggtgtttgagagacaaaggagaacaagataccatccccaccactgggtagtttaagattattgtctgtatccagtatatagcaattgtaatgatttctaaaatgtttttctattgagatacagtttacatgaaatgaagtgctcagattttgagtgacagtttgatcagtttcaaagaatgtgcacacctaatcaagacacagaacatttctgtaacaccagaaaattccctcttgccctttcctaatcaatcacaaacccctcccctataaccattgatgtcatttttgcctrtacctttatatgaatggaatcatgcagaagatactattttgggtatcttactttgtcttccttgtacccctttgtgaaatcctcccatgcctagacctcgacaactgctggtctgttttctgcccctgtagttttgtatgaattctttacgtattctgtttgcccaggctggagtgcagtggtgtgatctcagctcactgcaacctctgcctcccaggttcaagcaatcctcccaccccagcctcctgagtagctaaggttacaggcatgtgccaccacacctggctaattttttttgtattttttatcagatatgtattgtgaataaatacctattgtgaataaaattctttattagatatgtattatgaatattttctttctccacttgcatttctgtttccttagcagtatctttacaagagtacatttttttttttgtattttaatggagtttaatttaccaatttttcctttatggctcataccttgggtatgcaaagtaagaaatccctacccccttgaaggtaacagagattttctcctawgtttcttcattttattcattcctcctgttttcttttaaatttgtacttttagcttccttcatttaggtctgtgacccatctcgagttaatttcttgttcctagtatgaggtaaagttggtgctattgtttttcccccataaggatattcagttattccagcactgttttttttaaagacttctctttgttcccttggtacttttgtgggaaaaaaaaattgaccatcttagtgtgggtctatttctggactccgttcagtttcattgatgtatgtatctgtgtcttcaccaataccacacagttttaattacagtaattttatatatcttgaaatcagatagtataagacctctagttttgttcttttctaaagttgtttttgactattccagcactagaatttctacacagttgcttattggaactttgatgggattgtatttattttcataaaggctcacctacaatgtgttgtaaagcttctgaaagtaagtaatgacttgtcagttttaattgacactatggttatgagtgaatatgaggatcttttgttatgtttgaggactatttttctttgaactgtttttttttttcatttttcaaattttttttattatactttgagttctggggtacatgtacagaacgtgcagttttgttacataggtatacacgtgccatggtggtttgctgcacccatcaacccatcacctacattaggtatttctcctaatgctgtccctcccctagccctccacccaccgacaggctccagtgtgtgatgctgccctccctgcgtccatgtgttctcactgttcaactcccatttatgagtgagaacatggggtgtttggttttctgttcttgtgttagtttgcttagaatgatggcttccagcttcatccatgtccctgcaaagaacatgaactcatcctttttatggctgcatagtattccatggtgcatatatgccacactttctttatccagtctgtcattggtgtacacttaggttggttccaagtctttgctattgtgaatagtgcaattcacgtacgtgtgcacgtatctttatagtagaatgatttataatcctttgggtatacacccagtaatgggattgctgggtcaaatggtatttctagttctagatccttcaggaatcaccacactgtcttctacaatggttgaactaatttatacttccaccaacagtgtaaaagcattcctatttctccacatcctctccagcatctgttgtttcctggctttttaatgatcaccattctaactggcataagatggtatctcattgtggctttgatttgcatttctctaatgaccagtgatgatgagcttttttccatatgtttgttggctgcataaatgtcttcttttgagaagtgtctgttcatatctatcacccactttttgatggggagaacatttttgcaatccatctgacaaagggctaatatccagaatctacaaataaattaaacaaatttttttttcatttttctaatggttatccctcccccttcaatttatagacctcttcatatatatatatgtatatatatgtgtgtatatatacatatatgtgtatatatgtgtgtatatatacatatatgtgtatatatatacgtatatatatatatatgtgtatatatatacgtatatatatgtgtatatatatgtatatatatatgtgwatatatatatatgagagattagccctttatctgtgatacaagttattttctcccagtttgttatttatcttttggctttgtgttgacatttacttcataaaacatatttgtaagtactatgttatcagacttatcttgatactagattttgattcatggagacttttcccactcccacattttatatttttccaaatgactatccatttgttacaacaccatttactataaagtagaattttttcccagttagttgggatgttacctatataataaactaaatttctatatgtattttggtttatttctagactttctattctgttccatttggctgtctttcaatttacgtaccagtacaacacatttttaactacagagactttatagtatgttttaatatttggtagagctagttgcacagcttttcctatacgttgtcttctagtagttttatagtttcaggtattacatttaagaatttaatccgaatggccaggcgtggtggctcacgcctgtaatcccagcactttgggaggccraggcaggcagattacgaggtcaggagatcgagaccatcctggctaacacagtgaaaccctgtctctactaaaaatacaaaaaattagccaggcccacgtggtggtgggtgcctgtagtcccagctactcgggaggctgaggcaggagaatggcatgaacctgggaggcagagcttgcagtgagcggagatcatgccaccgcactccagcctgggcgacagagtgagactctgtctcaaaaaaaagaaaaggaaaaaaaaaaagaatttaatccattttgagttgattttgtacatggtataagagtctaatttcattcttttgcatgtataatccacatttctaaactccatttattaaagacactatcttttctcccattgtgtgttcttggcatctttgtcaaaaatccattaattggtggtaaatgtgtgagtttattttggggctatctattgtcttcctttggtctatgtgtctgtttttatagcagtaccatgctgttttgattactgtagatttgtaatatattttgaagtcaggaagtatgatgcctccattttgttcattttcctcaaaaatgttttagatatttggggttttgtggtacaataaaaattttatgacttttaatctatttctttgaaaagtgtcattgggattttgatagggattgcattcaatctgtagatcacttttggtagtatggacattttaacaatattgtttcaatccatgaacatggaatatctttctttttatttgtgtcttcaagttctttcatcaatgttttatgattttcaatatacagctctttcacttccttggctatatttgttcataagtatttttcatagctatcgtaaatacagttgccttttttatttcacttcagatggtttaatgctaatgtatagaaacttttttttttttttttttgagacagtttcgcttttgtttcccaggctggagtgcaatggcgaaatctcggctcactgcaacctccgcctcccagattcaagtgattctcctgtctcagtcccccaagtagctgggattacagatgtgtgctaccatgcctggctaactttgtatttttagtagagatggggtttcaccatgttggtcaggctggtcttgaacttctgacttcaagtgagccaattgcttcagcctcccaaagtgctgagattacaggtgtgagccaccatgcccggctgaaactattatttttgtatgttgactttatatcctgtaactttattgtattttattagttctagcagtgttttcactgacattttagggttttcatgttatctgcaaacaggaaccatttggcttcttcttttccaatttggatggcttctctttctttttttgcctgattgctctggctaggtcttccattactatattgaataggagtcgtaagagtggacatctttgtacctttcctgagatacttttggaaaaagctttctattttttactcttgtgtatgatattaatggtgagcttgtcatatatagtctttattgtgttgagttacattccttcagtgcctaatatggttagagtttttatcatgaaaggatattgaattttgtcaaatgcttcttctgcatctgttgagataatatatggtctttgtcctttattctgttaatgtggtgtattaatatttacttgcatatgttgaaccatccttggatctcaaagataagtctcactttattgtggtgagtgaatgatccttttaatatgctgttgaattcagtttgctagtattttgttgaggatttttgcatctatgttcatcagggatattagcctgtaattttttttttttttttgagatggagtctcactctgttgcccaggctggagcgcagtggcatgatatcagcttactgcaacctctgccgcctcccacgttcaaacaattctcttgcctcagcctcccgagtagctgggatcacaggcatgtgctaccatgctcagctaatttttgtatttttagtagagatggggtttcaccacgttggccaggctggtctcagactcctgccctgctcatctcggcctcccaaagtgctgggattacagtcatgagccaccgtgcctggccagcctgtaattttcttgtatgtccttgtctggctttggtgtcacgatagtgctggcttcataagatgtgtttggaaatattttttcttcaactttttggagtttgataaggattggtcctatttcttatttaaatgttttgtagaattcagcccagaagccatctgattctaggcttttctttaatgggagactttttattactgattcaatctttttttttaatcagtctatttgttatcagtctgttgtcagtctattttatcagtctgttatcagtctgttcagattttctttttctttgtgattaatacttggtaggattaatacaggtaggaattttttcatttcttctaggttatctaatttgttgacataattgtcatcatagtctctaatgataatttgtatgtctgtagtatccattataatgtttccttttttatttctgattttacttgaatctcctctccttttttattagttattctagctaaaagtttgtctgttttatctttttcacaagttttgttgattttttttctattgtttctttagtctctatttcatttatttctgctctgatctttattttatccttccttctgtgaactttgtgcttagtttgtccttgttttcctagttcctggttttctagtttccaattgtagttcctatacctagtttctagttataatgttagggtgtttgagatctttcttcttttttgatgtagatgtttattgctataaacttcactcttagaaccatttttgctgtatactatatatcttatatatttttgtatgttgtgtttccgtcttcatttgcctcaagatatttttaaatgatccctttaatttctacattgacccattggttgtttgggagaatgttgtttaattaccatatgcgtctgcattttctgaaattctgtctatttttgattgttagtataataccattgtggccggaaaaggtatttgaaatggatttcaggcttcataaatttattaagatttatcttgtggcctaacatatgaactctcctggagaacgttctgtgtgtgcttgagaagaatgtgtacaattgacccccccatatctgtgtgttctacatccacagattcaactctgggccaaaaatagtaaaaaaataataatatgataataatgcaaataaaaagcaatacagtgtaacaaatatttatatagattttatattaggtactatgagtatctagagaaaatctgaggcataaggagtatgtgtgtagattatatgcaaatactacaccattttatataagacattgagcatccatggattttgctatcctcaggggtctagaactaggcattagcattgtgcctagttggggcttacctgtagcctgtgtccactggtgccagcctggaggctgggtgtatggttgctagtccagaagctaggtctgtgaagaactgagtcctggagccatggtagtgtccccagaattggtgggttcttggtctcactgacttcaagaatgaacccacggaccctcgcggtgagtgttacagctcttaaggtggcgcgtctggagtctgtcctttctgatgttcagatgtgttcggagtttcttccttctggtgggttcgtggtctcgctggctcaggagtgaagctgcagaccttcgcagtgagtgttacagctcttaaggcagcgcgtctggagttgttcgttcctcccggtgggttcgtggtctcgctgggctcaggagtgaacctgcagatcttcgcggtgagtgttacggctcataaaagcagcgtggacccaacgagtgagcagtagcaagatttattgcaaagagcgaaagaacaaagctttcacagtgtggaaggggacccgggcgggttgccaatgctggctagggcagcctgcttttattctcttatctggccccacctacatcctgctgattggtagagctgagtggcctgttttgtcagggcgctgattggtgcgtttacaatccctgagctagatacaaaggttctccacgtccccatcagattagttagatacagagtttcgattggtgcactcacaaaccttgagctaaacacagggtgctgattggtgtgtttacaaaccttgagctagatacagagtgctgattggtgtatttacaatccttgagctagacataaaggttctccaaggccccaccagagcagctagatacagagtgttgattggtgcactcacaaaccttgagctaaacacagggtgctgattggtgtatttacaatccctgagctagatataaagactctccacatccccaccagactcaggagcccagctggcttcacctagtggatcccgcaccagggctgcaggtggagctgcctgccagtcccgcgccgtgtgctcgcattcctcagcccttgggtggtcgatgggactgggtgccatggagcagggggtgatgctcgtgggggaggctcgggctgcacaggagcccatggagtgggtgggaggctcaggcatggcgggctgcaggtcccaagccctgccccgcggtaaggcagctaaggctcggtgagaaatggagtgcagcaccggtgggctggcactgccgggggacccagtacatcctctgcagccactggcctgggtgctaagtccctcactgcccggggccagcagggctggctggctgctccgagtgcggggcccgccaagtccacgcccacccggaactccagctggcccacaagcgccgcaggcagcctcggttcccgctcgcgcctctccctccacacctccctgcaagctgagggagtgggctccagccttggccagcccagaaatgggctaccacagtgcagcggcgggccaaagggctcctcaagtgccgccaaagtgggagcccaggcagaggaggcgccgagagcgagtgagggctgtgaggactgccagcacgctgtcacctctcattaggacctgggttcacaaggcttggcacagggaaggcctgggccctgtgtttgcaggtgcctgccaggtgtttgagcccaggtgtgccatccttgttctaggatggggctgaagcccagggccactggggcctgcctagtgcttgggtcagcctactgcaggggcaggaccagagaccaagtccaccaggctgggctggaacctgggactgcagaatctggcctgacattagtatgggcttggaggctcagtttgctgatactagcctggcaatgggtaagcctggagcctgtatccataggggccagcctggcagctgggtctaccaggtaggcccagaacctggagctgtgagatctagcctggtgctagggcagacgtgaaggctcagtccccgacttattttcttgatgttaggttagattttgatgggcagaaattttagattttgataaagccccttttttatggtttgtgtccttagtatccattttaagaaatcgctgcctaccccaaggtcagaaagatattctgtagtaatagtagagattttaaagtatcttatgttcatcttatgtcatattcagaaaaattgcttgtaggagtagttgactatagcattttgttatttttttccagagaggattcattttttatactaggcagctgtcagtacttgcaatcttgggagcgccctcatccagtatcaaggattgagataatttgaagccgggatttgtagaagctaaaaggattgagattatttgcagtcccagggaaggtcaatctcctttaggtttctccttacttataaagtcaagtcctaatctaatcccttccattcttggctctgaattccagctctctttctcgtagccccaagaatttaagtcagatattcatggtcacatagttgtgaaatcccacatggtagtggtacgatttcaacctaggcagtctaacttcagatcctgggttattaaaaggaaccttccacgtcacccctaccatgagggatgagtttcatttgttttgtttcccattgtacacccacacctcacatgacatgtagtaggtattcagaaaatattcaatataagaatgaaccttctcttggtccatttgggatactatagcaagataccacagactatgtggcttaaaaacagtagtttattgcttacagttctgatggctgtgaagtccaagatcaaggtggcagcacattccttgtctagtgaggacccctttcctggttggcctgtcttttctttgtgtcctcacatggtggaaggaatgagggatctctgtggggactcttttataagggaactcatcccattctaatacctctctaaatccccacttcatttttatttttatttatttaattttttgagatagagtttcactcttgttgcccagatagagtttcactcttgttgcccaggctggagtgcaatggcgcaatctcagcacactgcaacctctgcctccctggttcaagtgattctcctgcttcgattctcctgcctcagcctcccgaatagctgggattacaggtgtccactaccaggcccggctaatgttttgtatttttagtagagacagggtttcaccatgttggccaggctggtccaaactcctgacctcaggtgatccacccgcctcggcctcccaaagtgttgggattacaggcatgagccactgtgcctggcccctaaatccccacttcaaaataccttaaccttgggtgttaggatttaacatatgaagtcagaggaacataaacattcagttcattgcaaatctgttccccttagcaatactattaatggtagttacttccaatctgatagattattgaatagcattttgggcttatagttgtgctgtgattttctatactgttttgttgctttgccattggtggtgacttacttgttttttgttgtttttaaattagtatttccatggggattgggaaagctactggcaagatttacctggaaacttgcatcaacaacttactgatctttgttttgtggttggtattttattcatattagaagctccataaatgttgactaaattaaaaatgtaggttgggaggctgaggcgggcggatcacttgaggtcagcagttcgagaccagccaggcaaacgtggtgaaaccccatctctactaaaaatacaacaattagccgggcatggtggcagacgcctgtaatcccagctattcaggcggctgaggcagaagaatcacttgaacccgggaggaagaggttgcagcgagctgagactgcaccactgcagcrtgggtgacagagtgagactctgtctcaaaaaaaaaaatagggataaacaactgctcaaatattttaaatctgtatatttcttattttaaatattaaatatttcttgtctttaaagcttgattataaaattaagtaatttaaatttaagtgatgtgcttgtctaaaatttacacatcattagataatcttttctttttaaaaaatatttactccctccatagagttgaacttcctctctttttagaagaatggatttctcggagtctgaaaaatttatggttcttctctgraagaattttattttaaaggtaagttgaactacctatagggttattacaacagctcagtggccacagggggaaattctgacagcttgatccttgaatttcaatttttactgttttacttttctcagtatgaaggctaggttatctcttccaaatatagagttcacacagagagagattaatagcaggatgttatgtagaaaggagaaaaaagtctaggaaactgctgctattatagagtaaagctgtgtttttggcaatctatatattcttttatgaagtatcttttatcttaatataaaagaattacagttatacacaatacaggactattcagccatgaaaaagaatgagatcctctcatttgcaacaacataggtggaactggaggtcatcatgtaaagtgagataagccaggcacagaaagacaaactttgcatgttctcacttattggtagaaactaaaaattaaaacaattgaactcatggagatggagagtagaaggatggttaacagaggctgggaaggggtagcttggggtaggtaagggggaagtggagatgtttaatgggtacaaaaaaaamttgaaagcatggataaggcagtatttgctagcacaacagaatgactagagtcaaaaataatttgattgcacatttaaaaatatctaaaagagtgtaattggattgtttgtaacacaagggataaatgcttgagggaatggatacccaatttaccttgatgtgattattatgcattgtgtgcctgtatcaaaatatctcacgtaacccataaatatgtatacctgctatgtacccacgaaaattaaaaattaaaaaattcaaaaatgaacttgcaaagttaataacctcttagggcaattaacataatcttttttcttcttcttctagaggcggcgatgtattgctttagttgtggaaatggtcctcacatttctgtttagtgctgcgcttttggcaacacgctctgttattactataaataagaacggacctttcgattttgctgctcagcctgtcgatgaagtgcctytctacatcacagcttccttaatttctccttctcctttggaattggcttacgtgccttccagaagtactgtggttcagggtattattgaaagagtgaaaatggatttaaaccctcaaatgaaaggttagaaattaacattttctgaaaaaacatacagaattactaaatcgatttagtgaagacatacttacaaccttattaactggttcttaacctcccaagtaaaacatcgttggaatcctcatactaagtataaatattatggactttgttaaacttgaaagttaaatttatataaaatattttgttcatagagcccagaacaaatagtaatatttcaaaatgagatgaccaattattattattattctaagttgttatccagttttgtgatactgttttttctatctggttgtgcttcttgaacctgggtaagtatacctccaggggtgtgtgattttgtgccacaggtcagtggtcagttatttaaaataatgttttatattaaaatgtggtgtgagtaatataggaaggctttagaaaacacttaagctatgtagaattattttaaaagccctcagtctctcacttaccttcatattcccggatcagtttcttacctctttctcttagaggtaaatactgtgagaagtttaggtcggccgggcccagtggctcacgcctgtaatcccagcattttgggaggctgaggtgggcagatcacctgaggtcaggagttcaagaccagcctggccaacatggcaaaaccccatctctactaaaaatataagaattagccagacatggtggtatgcacctatagtcccagctacttgggaggctgaggcatgcgaattgcttgaacccaggaggaggaggaggttgcagtgaggtgaaattgcaccactgcactccagcctgggtgacagaccaagactctgtctcaaaaaaaaaaaaaaaaaagtttgtgggcatctccctagcacacctctctctacacatgtgcgtgcatgtgcacacacacacacacacacacacacacacacagtcaggcaacttttccatctttttttgtctttcaagagatatgagagtccttgagagtagatgccatctcaaagcattcttttttgttgtttgcttttttttatcaaagcattctttaaaataaagactgaaacaggagaatatgaagttcccagtaatttttaaattctacaacaaaaatatctcaacaaatttaaagtctattatgggttactccaatagtcgctttgggttactcaaaatattttctgatttccactctgatgtcttctttgatgcatggaatttcaaaatttttagaaatgtgttgctgaacttccaaacactgggggcttcttatctttctgttgttgatttctgttttaatttcctttcatcagagagtatactcaattccagttctttgacattttgagaactgtttatgactagtacatggtatattttgataaatgttttctgtgaatttgtaaaaactatgtgtgctataggttttgcttctggtgttctataaatgccacctgggcaaagttggctaagtgtcatgcttttcaagtcatctgtattctttttttttttttttggtctgcttattatatcagtcattgaaagaagtacctgaaataatacctgatttccagtcaggtattattaggattaaataggttatatattgtatatattaattttttttttcttgagacggagtctcgctctgtcaccaggctggagtgcagtggcgcgatctcggctcactgcaacctcccacctcccaggttcaagcgattcccctgcctcagcctcccaagtagctgggactacaggcgcctgccaccacgcctggctaattgtttgtatttttagtagagaccatgttggctaggatggtctggatctcttgaccttgtgatctaccccctcagcctcccaaagtgctgggattacaggtatgagccaccgtgcccagcctgtatatattaaaatttatacatttttaagatattaaaatttccaactgagatttagctatttttctttttgcttatttattttgaattacagttcatgtgatccttccattgaataattttaaaaacaatatttttcagttctggaatttccatttatctctattttgaataggttccaggtctcttggaaaatgtaccatttttgagtttattaaccatatcaaccatagttactttaaagtctctgccaggaagttctggtatctggattacttgtttatctttttttttttcttttatgccattgagttctattttgtaacatgccttgtatatttttatcaaatccaagatgttgcagatgaaaaattttgaaggctcttggggatatttctttatccaaagagggttaaattttcttttggatcattattagagtactggtaactccctctgcccccactgaaggctggttttagcttcactaaagactgccctatttctgttttctctttacttctgggcataatcctggtcctagtgcgtgattgatccttactcctaaggcatgaccattccatgatttcaactgaaagtcgggggttcaagaaggctccttacctgtggggcttgaactccatcctctgtctccccagcctggtgctgctgctgaaatcactgctcagcatttttgccctccagccactgtcatctacctgcctgtactcacttggaagactagaagttcatacccaggctttcgcccctcttcctgggtacacatagttaattaaggcagctgacagtcaaagatgaatacccggggcggatgcagtggttcacacctgtaatcccagcactttgggaggcagaggcgggagttcacaaggtcgggagatcgagaccatcctggctaacatgatgaaacccccatctctactaaaaatacaaaaaattagccaggtgtggtggcaggtgcctgtagtcccagctactcgggagactgaggcaggagaatcgcttgaacccaggaggcagaggttgcagtgagctgagatcgcaacactacactccagtctgggtgacagagcaagactcaatctcaaaaaaaaaaaaaaaaaaaagagagaaataaaaagatgaatacccagggaaaacattttagatatctgatgagaccaggaacaatgaaaggaagaaagaaaatggaacctcctataccaggagaagcagaactagtgtaactactggaggggtgaggagaagagctgcccaggcatctggagtttcagctggggttcagctctgccccatcaccccaggctgaggcattgctttcttatgcatgaccattatggaaagaacaactatccccagtctaggctttcaggacatggttacatgtttatgtgtgtttaatgctctccttattggggctaagcaagttgggtatatattggaatgaaaaaagttgaaagttagattcttttagggttgggttttttgtttgttttgttttggccaggtcactaggattgaaggtgggagagacaaatgaattgaagaattggaagagttattgaagacataggtcctggaatctaaattggaaaggaaacgaagttaggaaaagaatgattttagatgtcaagtgatgggaatgtaaaatggctcttgatcaaagacctctgaagcttcacatcatataaccagtgcatcaccagctccatacatcaatatcgctctacagcagtttctctaggacaatggtccccaacctttttggcaccaaggaccagttgcatagaagacaatttttccacagaccagtggcagagggatggtttcagggtgattcaagcacatcacatttattgtgtactttatttctattattacatagtaatatataatgaaataattatacaactcaccataatgtaaaatcagcaggaggcctgaacttgtgttcctgaaactaggcaatcctatctggggatgatgggagacagtgacagatcatcaggcattagattctcaaaaggagcttgcagcctagatcccttacatacgtagttcacaatagggtttgcgcttctatgagaatcgaatgcctccgctgatctgatgggaggcaaagctcagctggcaatgcaagtgatggggagcagctgtaaatacagatgaagctttgctcgctcaccggccgctcacctcctgctgtgtgatatggttcctaacaggccatggaccggtaccagtccatggcctggggtttgggggcccctgctctaggacaaaccaaaataaactatacttcctcacttggaaaatgaaaataataatagtgtcttatttatagggtagttgtgtatatgtgaagtatttagagcagttctcagcacatggtaagtactcagtaaagactagatttattggccagccgggtgcagtggctcatgcttgtaatcccagcactttgggaggctaaggcgggtggatcatgaggtcaggagattgagagcagcctgtccaacatggtgaaaccccgtctctactattaaaaacacaaaaattagctgggtgtggtggcgggcacctatagttccagctactctattactgagaccagcctgaccaacatgggtaaaccccatctctactaaaaatactaaattagccagacgtggtggtgcatgcctgtaatcccagctactcaagaggctgaggcaggagaatcacttgaacctgggaggtggaggttacagtgagccgagatcgtgccactgcgatccagactgcgcggcagaatgagactccatcaaaaaaaaaaaaaaaaaaaaaaagactggatttattattactataggaaacacaactttctgctctgccaccatctgtgctgagtatcaccataaggccagcctgccagtgactatttggaaaagctgtagcatctagcaatacttccaacgtgtcttctgtttcccaaatagtaatacaaaatatgaaacaaaatgaacagtagaggaaacattttgaacaggaaaccatgtctatctcctctgtaaacctgtccatttgaaatgtggattactgcatcttggattcattcaaggcaatggaaataaccaaactttctgccttcaactacctggtccaaggaaatcaatcctgtctttcctctctaatcttaatcttcccacctggatcttgtggttttaagcctgcctagtcataaaggccaactgcaaatatttcagctttattggaactcaagagcattctgggtttgttctttgtgattcttcccttttatttcacttccacctaacttttaaccttttttttttttttttttttgagatggaggagtgtcactctgtcacccaagctggactgcagtgacccaatctcggctcacttggcaacctccacttcccgagttcaagcaattctcctgcctcagcctcttgagtatctgggactacaggcacctgctaccacacctggctattttttttgtatttttgttagagatagggtttcactatgttggtcaggttggtcttgaactcctgacctcaaatgatccacctgcctctgcctcccaaagtgctgggaatacaggcgtaagcccctgcgcctggccgcttttaacgtttgatgttatattccatttccagcatctagctcttaaattttgatattatgttctatttccagctgtgtcccttttttttttttttttgagacagagtttcactcttgttgcccaggctggagtgcaatggtgtgatctcggctcactgcaacctctgcctcccaggttcaagtaattctcctgcctcagcctctcgagtagctgggattacaggcatgcaccaccacatccagctaattttgtatttttagtagagatggggtttatccatgttggtcaggctggtctcaaactcctgatctcaggtgatccacccacctcggcctcccaaggtgctgggattacaggcgtgagccaccgcgcccagcctaccttttttattcttaagagtggacttagttttaccaactttgatgatttgaattctctgaggcccatgtctcctcctgctcctgaccagctcttgtaggttcccccctgattccagcccccaagaagctactttcagctttgaaatttatgtgccagctttgcctaccccctgagaaagggagattagatcaggtgctttgcatctggtattttgcagttttaccaaaagtgatgattatgacccctcagcgtaatttcatagccaccaacaatgttcttaggtttggatagcaatccaaatatactttaagctaccatcagattaa

SEQ ID NO: 96369 - DNA, 27785 bp, Homo sapiens
acctgccctcaccttcttcctttcccattattctctatctcaacacttaatttttttcaaggcattatcatcttttagaattacttaattttaggccaggcacagcagctcacacctgtaatctcagcactttgggaggcaggaagatcacttgagtccaggagttcaagaccagcctgggcaacatagtaagacctcatctctatctttaaaaaaaaaataaataaatgaaaataatttcttaaaaatataattacttaattttcctgccctgcttatttttacaactaaaatattggctccatgagggtaaggaatgtctgttgctcatcactgtatctccagactctggggcaagatagcctttcacgaataatgggtttcttgtttcgttttgagacagggtcttgctctgtcacctaggctggagtgcagcagtgtgatcagagctcactacagtcttgacctcctaggctcaagcaattctcccaccttggcctcccttgtagctgggacaacagggtcacaccacaacatctggctaatttttgtattgttttgtagagatgggggtctcactatattgcctaggtaagcctagaacttctgagctcaccttagcctcccaaagtgctggaattatagatgtgagccaccatgcccagccataaataattgctgaataaatgaatatatacaggtgactcttcttccttccatccttgtcatttaaacaggtgacacaggccgggtgcagtggctttgggcagcactttgggcagccaagacgggtggatcacctgaggtcaggagtttgagaccagcctgatcaacatggtgaaaccccatctctactaaaaatacaaaattagctgggcatggtggctggcgcctatagtcccagctacttgggaggctgaggcaggagaatcccttggacctgggtggcggaggttgcagtgacccaagattgggccactgcactccagcctgggcaacaagagcaaaactctgtctcaaaataaataaataaataaataaaaataaacaggcgaaataatgtatagaacaggccaggcatggtggctcacgcctataattccaatacttcaggaagctgagatgggacgatggctggagaccaggagttcgagaccaagttgggcaacatagtgagatctcgtctccataaaaatttaaaaaaaattagcctggcatggtggcacacgcctgtagtcctatctacttgggaggccaaggtgggaggattgcttgagcccaggaggttgaggctgcaatgagccgtgattgcaccactgcactccagtctgagcgacagagcaagaccctgtctcaaaaaaaaaaaaagtatacaacaattctttaatataatatcctgccgggcatggaggctcatgcctataatcccaacactttgggaggctgaggcaggcgggttacctgaggtcagaagtttgagaccagcctggtcaacatggtgaaaccccgtctctactaaaaaaatataaaaattagctgggcatggtggtgggtgcctgtaatcccaggtacttgggaggctgaggcaggagaatcgtttgaaccccagaggcgaaggttgcagtgagccaagatcatgccactgcactccagcctgggtgacagagcaagactccgtcttgagaaaaaaaaaaaaaaaaaaaaggccaggtgcagtggctcatgcttgtaatcccagcactttgggaggctgaggtgcatggatcacctgaggttagaagtttgagaccagcctgaccaacatggtgaaaccctgtctctactaaaaatacaaaaattagccaggcatggtggcgcacgcctgtaatcccacttactcgggaggctgaggcagaagacttgcttgaacccaggaggcggaggttgcagtgagccgagatcgcgccattgtactccagcctgggggacacagcgagactccatctcaaaaaaaaataataataaataaataaaaaaaaagaaagaaaaaagtaatataatgtcctaatgattacgtttcctgaagaaaattagttcaaaagaaaaagatactggctactctatcgttaccgaaaaattatctacgttctctttgatccacctttgacattggacaaataagtggaaatcaggccagaagttaggatggctagttttccctaacaatggttttacagaaagttttgttgttgttatttaggttagattattcaattccaaagtgcttatcttgttgtattaactgatgttgaatatgtaaataatagtacttacctcacatgttttgggtgtcctctcacagaagacttcaattttaatatcacctacatctgtatgcagtgtcacagactaaaaaggagagaaaatgtgagaacaaatgaaatttatttaggtgactttatgcattgtttatttccctgtgtggatattcaagatgataatctgaataaaaacagacagaaatactgcttcagagatgacccatccacaaagcagctcttagaggttaagttgtacttttttctcaaaattgatcccaacagtagagaaaaaactccagaatataaatgttagggttaagtagtatccatgacaaaaatttggaagtaaatattttgatggaaagaattattttaactttgaattttttatcaagaaaaataaaaacaattgttatgtattattgatgtacatggcaattcaccaacatccttatttatagaaaaatgatgagaaaatgatttttcaaaacataatttccaccattttccttaggtaatttaattctgagaaatagggttaaaaaataattcctttctcgactaacaaaaatataacaagtgtcagtgtttctaaatcttaaatgtgcagagataaccacagtgctttcttgcttgctttttgtttttgttgtacctgtttttctgtaacctgtataccccttgatatgatactgtattccagagagggagaaaacaatttggagggttcctttttcatttctccttttttttttttttgaggtggagtcttgctctgtcgcccacactggagtgcagtggcgtgatctcggctcactacaatctccacctcctgcgttcaagcaattctcctgcctcagcctcccaagtagctgggattactgggatatgccacaacacccagataatttttgtatttttagtagagacagggtttcaccatgttggccaggctggtctcgaactcctgacctcaagtgattggcccacctctgcctcccaaagtgccgagattacaggcgtgagccaccgcgcctggcctagcagttagagagtatgagcaggttaaagatgtgtgtgggagaagcagggcactattctcattgcctttttctacttcaggttctagttgcccactttatttaattgtttttttaaaagtagagacgggggcctcactgtgttgcccaagctggtgttgaactcctgggatcaagcagtcctctcacctccgcctcccaaagtgctgggatcacaggtgtcagccactgtgcccagcctagttgcccactttagatctagagcaaaataatccaattaaaattgtcagacctgtctattctcttctgctccttcaactctccctttccatttctatctatcttgtaatcaatctttctccataaaaggtaaattctggctgggcgagttggctcacgcctgtaattccaacactttgggaggtcaaggcaggcagatcacctgaggtcaggagttcgagaccagtctgcccaaaatggcgaaaccccatctctactaaaaatacaaaaaattagctgggcgtggtggcaggcgcgtgtaatctcagctaccggggaggctaaggcaggagaatcgcttgaacccaggggcagaggctgcagtgagccgagattacaccactgcactccagcctgggagacaagagtgaaactcaaaaaaaaaaaaaaaaaaaaaggtaaattctgtgcattttaagtgacaacattaaagaattttaaagcaattttgtgtattttttaaaagaattattccatattaagtgcttctatattatacaatttctccatcttgccactgcaatttccatgaacttttattgcccttgactgaatttctaaaaattacttataatgaaagacattagataaaaattgctcaaaacttaccatttttcctcttagtggtttcaggaaggactacgtgatttctcagtcttacagcgagctcaaaaataagtctctagtcccaaaagaaaaaaagaattaggctcattttcctgtcttaactcacacacgctcatctttactgaacattttaaataaaaacctcgccgggcgtggtggctcacgcctataatcctaacactttgggaggccgaggcgggtggatcacttgaggtcaggagttcgagaccagcctggccaacatggcgaaaccccgtctctactaaaaacacaaaaattagccgggtgtggtggcaggcgcctgtagtcctagctactcagcaggctgcggcaggagaatcacttgaacccaggaggcggaggctgcagtgagctgagatcgcgccactgcactccagcctgggtgacagcgcgagactccgtcaaaaaaaaaaaaaaaaaaaatcctctaatggcatcccctaggtaataaaaacccggctatagaagatatcctacccgattcaagcctcccaatctcctacttgcccggcttgctcttcttcaagagcctccttgcaagtcccccaataacccagataccttcccttagggtccaggcattgggtgtcccttttgcctggaattcttatactcagacatctctacggctaatttcctcacctccaaatttctgcttaaatgtcaagtttaactgacctgacaatcctacacagaactgctttagcccttcagccctaggacattcctatttccttctcccacagcacttatcactaatatactatgaaattcgctttttttttttttcaccacagcacttatactaatatactatgaacttttttttttccaccacagcacttatcactaatatactatgaacttctctttttttttcattttgagacggagtctcgctatgtcgccaggctggagtgcagtgcggcaggatctcggctcactgcaacctccgcctccgcctcccgggttcaagtgattgtcgtgtctcagcctcccgagtaggtgggactacaggcgcgcgctaccatgcacgactaatttttgtatttttagtagagacggggtttcgccgtgttggccaggctggtctcgaactcctgacttcaggtgatccgcccgcctcggcctcccgaagtgctgggaggccgccgtgcagggtccttcttttactctgacgttgcaacaacagcctcgccgcccactgttcactcgcagtatcccaagaactaaaccagtagcaacacagaactcagcaagcattcgaataagtgaatgaaagaattaatgacgttactccatacttgggcttcaccacttcgtctagcacagccgttgttaaaacaggaaaaatgcaatcgcagatgccagcagaggtctgttggttcaaaattatagtttctttgggccagcggaagttgggcgcgggacccaagagagagaacgccccttaccgcctcacctccttcctcccctcatcttcctatctcaaaccaaaacgacaatgcaatttatccccaaccggaaatttgacagtgaaagggagctctactaataattgcactgggacaagaagtgtaaggcgaaactacctgggcaacctcaagcaatgctttacactcggctgccaaacggaaaggaccacttccgcccagctctcccgctacggggagccaagtgccacagcatccggagcgccgacgcgggaccggaagtgacgcagagaagtttccgggactggtgagtagtgggcgatttaaaaacccgcgagtgtagttgtgaccttcgcggtaggtgccggttggggccggctgtgattgttatcttggtgctgcagaggacagcagaagaggagattgggtcagaaaactgccctgccgcaccagagcacagcgcactagtgggacaggggtcctgactcagacttaactggctgtgtctcgtggtttttcactgtcctggaaaaggcctgaagtggcactgaaatgaggcatagatgaggtaacgtcgagggagcggtttgcaggttgcaaaggggccctactgatgctgcttaatagtaaacagtgcttactctaggacgggagttgtttccagctttacgtgtaaatctcgcgatattgtggcctgggcactatttccattaaggaggaaactgcacaggataagtcatttacctgctgttgcacagctctggctctaggattcaggctggcttcagagtcggtgctcttaaccgccatactatgttgccttctgttgtcgttgttgactgtggccatgtagcttcgcagtttcctcatctgtaacagtaaataactcaaaacctgcatgatggcccactagggtttcactttcgagcttgccagatgtagaaaatgctggagaatggagtactatgaggaccattagaagatctttcaaggccggacgcagtggctcacccctgtaatcccggtactcttggaggccgaggcaggtggatcacttgagcgcaggagtttgagaccagcctgggcaacatggcgaatccccatctctactaaaaatacaaaaattagccaggtgtggtgtttagcgcctgtagtcccagctgctcaggaggctgaggtgggaggatctgcttgagctcaggaagtcgaggctgcagtgagctgagatcacgccactgcactccagcctaggcgcctagtgaaaccctgtgtcaaaaagaaaaaaacaaaaacaaacttccaagacctcgagtggtttttggagaccctgtatcacttcaaataatgtgttaaacaagcatcttcatctcattaaatagaaatgttgaaaaattgcttttggaataattgacttatggatatttcatcaaatttacagttggctatgctttcttattgtgcatactatgaaatgtttttcttcaaaaagtgtttataagtggtaagtttaagaatggggttgacagcattatcttttgtggttatttgattaaacatttactaattgtgcatattttggagccagcagtttttttctacctttccattgccctcccaccttccctctgttgccaaccttttcagttccttgttggatgtagatacttagaaggcttacaggctgtctgggaaaagtaccctataccttatcccctcccacctcttgagcctggcctttgtgtagcaaatgttgcttaaggggcagtggcttctcccttcttctgccttgaccctgcccatttatagagtgacctgcctatgtattccttgatttttgattctgataaagcacttgacattttaaacattctttttttttttttttttctttttgagacggagtgttgctctctcgccaggctggagtgctgtggcatgatcttggctcactgcaacctccgcctcccaggttcaagtgattctcctgcgtcagcctcccgagtagctgggactacaggtgcacaccaccatgcccagctaatttttgtatttttagtagagacggtttcaccacgttggccaggatagtctttatctcttgactttgtgatcctcccgcctcggcctcccaaagtgctgggattacaggcgccccgccacattattctgttttttggtaaagcacattgtaatgccagtatataccaccccaactccaaattctgttgcaatcaggggaggcgggcagtgtcattctatgcagtaagcatttagtgctggcttatattagtgatactgagatttattgaagttagttcctattacatagtagctttagcataatgggcacacacagaattatgagaatactgaggggtggggagccttgggaaggatgctgaaaagggaggtcaagaaaagttttatttaagaagttggagggggcttgggaaaaggaaaggtaatatttagagaaatggattagggaggaggttggttgaagcaagggtagggagaataagaacaagggtgtgcaaggcargagatgggatggacgtttgtgtattatgtaccaggctttgctaggttacataattcattagctcctctggatggcctgtgaagtgggttatagtatctctgtttcrtaggtgagaaaacaagattggagaggttaaatggcttacctaagttacagtgtgctggtaagtggcagagccactatttgaacccagatctctatgacgacagctcttttgcccatatgttttgatgcctcaaagatccaggcctaaagtatacctgtgtaccattttctttgttttgacatcagaaacttgaactttacctgatttctgtatgttgtcatcttgcgtacgcccagtccccacgacagtccggtttgtagattccctgatctgcaattcttcccgttccttcatggatttgaaggctctcctttcttccttgaatgactttgcatccctctcgtttgctgagagttgggacaatgttggattactggtggaaccaagcccaccacatactgtaaatacactcttcctgaccaatgacctgactgaggaagtgatggaggaggtgctgcaaaagaaggcagacctcattctctcctaccatccgcctatcttccgacccatgaagygcataacctggaacacatggaaggagcgcctggtgatccgggctctggagaacagagtyggtatctactctcctcatacagcctatgatgctgcgccccagggcgtcaacaactggttggctaaagggcttggtgagaagcctctttcatatttgatattttccctgcaaatactttgaaactttaggatgtctttccagtaaagttttaactgctttagggttggggagggcatgattccatttttatataataatttwaaaataatgttgctgaaatttggcagttaaattgcatttgaaaaaggaaacattttttattcttatggagtaaggagagcagaagtcttccttactggactgagcttcatgattcctcacttttgtggcacaatgcctgtcacccaggcacttggaaaatgcttgttgaattgaaagctcaggcctctccagaatacacttgattgataagtcaagtaaatagacatcagggttttaatgaatgtttttagtgaatgtttacttatgcctagcacaatgagggaatgatggatggattttagctttattttagtaagtctttagtttactcattttgggctaaagcttttatgatgatatctggattaatgtggtcaaataaagtatgagcatttgcaacctgaatgatggtttacatggctagatttaccaagcagtagaccattctgtgtattatctgaaaatgtatgaatcagtctttcttgtccaagtttttcagagatttaagaatcttttggaaaataattctgaaaataatttgattttgtatgtccatgccaaagccctagattatggggactggtgatgtatatctaagggatgtgtgtatgttatgtaagcatgagaatgaatctttttaaaaagtcatttcttagaaattttgcctataatagtttacttttaaatcttaatctctcaccccccaaaactcccattttcccacaatattttctctaggagcttgtacctccaggcccatacatccttccaaagctcccaactaccctacagagggaaaccaccgagtagaattcaacgttaactacacccaagacctggacaaagtcatgtctgcagtgaaaggaattgacggtgtttctgtcacttctttttctgctaggtacaatttatttttctcttttttttgtgtgtatttattggtaagcatcttccttacaaagtctataaccctggtatttaggcttgaaacaaatagttttctctggagttgatttacaaagtagcatactcctcatttgtttgtgggtcctggagaactatggaattttttcaaaacaataaaaacggtaagtaacactaagtattttctatgtcaggggactatactatgcattttacctacagtatttctaatcctggtaatgttcaaagatagttgtttttactttagagaatacagatagatcctagtgatgtggtgataaggcttttattggttcccagcaaatcagtgattcccaagtgcttttttatatttatctttacattttaaatatatattttcataaatcagtctttttatttaacatcatgggaaatatttttctgaatagtctttttttgtttgttttaagagactcccaggctgggcacggtggctcacacctgtaatcccagcactttgggaggccaaggctggtggatcacctgaggtcaggagtttgagaccagcctgactaacatggagaaacctcgtctctactaaaaatacaaaattagctgggcgtagtggcgcatgcctgtaatcccagctactcaggaggctgaggcaggagaatcacttgaacccgagaggcggaggttgcagtgagccgagatcgcgccactgcactccagcctgggagacagagagagactctgtctcaaaaaaaaaaaaaaaaaatgcagatttttgtattcacctcagaccttataattagaatggagtttgcctgagaatctgtccaggacattctcaaattcaatgatgttttaaaattatcatctctaaggctttaaaaaaattcattttgccccagccccatttgtagatgttctgttcactggttctgtggaaggatccagcagctgttattttaagaagctagaaggaattttttttatttttttgagacagagtctcactctgttgcccaggttggagtgcagtggtgtgatcttggctcactgtaacctccgcctcccaggtccaagtgattctcctgcctcagcctccccagtagctgggactacaggcacccgccccccaccacgcccggctaattttttttgtatttttggtggagatggggtttcatcatgttggacaggctggtcttgaactcctgatctcaggtaatccacctaccttggcctcccaaaatgctgggattacaggtgtgagccactgtgcctggccttctttttttttttttttttaactttaattttttaataattaaaaaaataataagatagggtcctgctatgttgcccaggctggtgttgaactcctgggctcaagtgacccgcccaccttggcctcccagaatgctgagattacagatgtgagccactgcacctggccaagaaatttctgatgcacaatcgggattgagaacagttcttgaacagtggtttcaaagtgaggtccttggaccagcaacatcagcatcacctggaacttgttagaaaggtaacctctcagacccccacctagatataatgaatcagaaactccagggrtggggcccagcactctgtgttttaataatcctccaggtgattctgatgcccagtagagttagagaaatgctattctagaaaatggattagtttcagattaaatgggttctgttggttaaatccttggttccacataaatctaatctattatagtaggtttgtaaactgtggattatctaaaatacattttggctatatttgtcctaaatggagtgatttttcccccctaggactggtaatgaggaacaaacacggattaatctgaattgtactcagaaggctttgatgcaggtggtagattttctttcccggaacaaacaactttatcagaagacggaaattctgtcactggagaaggtaataagaatattttgtatttgatcttaaaatactgtgcacacattttctaacagtataattgaggtataattgatatacttaggtatattgaggtataccttattgaggtataattgatatactaagaattgtacatatttgatgtgtacaatttgatgaatatcattactttgcatttttcttcagcaaattcatttgtaaattattagatcaacaggccattcactgttatctaaagtacaaaatggcaatgagagcataatattctctaggaagtaattgagaaagggagacattccaggaacaggaaaatattggtacgtcttcagggttacagatttggttacaggtttgctgtctccttattttacacgctctgcctggaccatgtcattcacttctttaacttgatagccatttgtatgatgatttctatctttactttttggcttagaatgctttcttaagggaaaaaatgacaagaacccatattttcatctactttctggatgttttgcacttacagagcccacaagtatttcaaattcagtatatccaaatactttatccgtttgccacccccgcttttttttttttccatatttcatatttcagtatcattatctactttagtttccaagttttcacattcctccttgactccaggccctgctgagtctggcctcatatctatacagtgtttctcctctgtattggctctgccaccacagtagttgaaactctcattttctgcgatgagagtagtctcaccgagcacctaggaggcagtccaggctctttagcatggtgttggaagcccttaatgatctgctacagcctgggcctccagcctcctctccttccacagcatgtactctgcacagtagccatactgtcttcttttggatctgcccccatagtgtgttctctcaagtttttggcacctttgtccatgtcctctgtgtttagaatgcctttctccatctcatcgtacctctgtcctgccacactgcacttgacatcacccctttttaaactctttatttccccctttttaactcttttagggttttctctaagacctaagtccttcctccaagtactccccaagcctcctaagtcacagctcatttagtttgtcattctttgtgctgctgcaactgtagcacctaccttgtatttaaacagttttattattttgtttatttgagacagggtctggctctgtccccaggctagagtgcagtggtacaatctcagctcaccacaacctctgtctcctgggtagctcaagcccacctcccattcagcctcccaagtagctgggactgcaggcgcacgccactgcctggctaatttttggatttttttgtggagatgaggtctcactatgttgcccaggctggtctcaaactcccgagctcaaacaatccacccaccacagcctcccaaagtgctaggattataggcatgagccatcgcgcctggcctgattattgatttaaacatctgccttcctagaaaactgtgaactcctagaagaatgattttgtcaggtttgtatccccacatttagcctggagcttgctatagtaatctcacagtgtgcatgttgatgattttagcatttgttgttttaggactaacaatgcacaccgtttctaacttctgtttctcctcagcctttgcttctacatactggaatgggacggttatgcacactggatgaatctgtctccctggcaaccatgattgatcgaataaaaagacacctaaaactatctcatattcgcttagcccttggggtggggagaaccttaggtaaatatagctccttcatctatccagtatgcctactgttaacattggacaaagatcgaaactcttggttgtattaatatgtgatagagaatgtgttagcagctcataggagataattggtttacgttattgattagggtgggccaggttctgatgtggaatacatctcattgacttaatcaatgagatttatttctctgtcatgctatrtgttcatttcaagttggtcattgtaggaagtctgaccattgtagactggttgctgttgcagagggagggagttttgcagggtcttaaaccatcagtttaaaattccaggaaacatgttaatttctgctcaactcattttccagaattagtcatgttgcccaatacaagcaagggaggcataaagtgcagtcttaccatgtgtcaggaagagagctggaatcatgattgctacaattacaacataaactttgcacttataagactggtaatattttctagtgaggtgctactgagtgatctgatccattgtagtttctaagtcttgtagttttttcttctggcctttcctggtacttttgagaacaaaaagagtgaacagacatttgttcaacaccttcagtgagcctagcactgtactgattgtctgtcctaagtacgtgagctcctgctggcaaaagcagtggggtacagcggttataggtgtggattctgagcttagacaacctggcttcagatttgtctgtcctgtttgctgcatgtctttgacaagtttatgccctctgtgtcacagtagcctcatctgtaaaaactgcattaataaaacctaactcagaaggtggtagtataatccatgtgacatggcacagtgattggctcacattaagtataaagtgctagctgttgttagttttgtggttggtactatttctcccattttataggtgaacaattgtggttcagagagataagtaactttattagttcgttctcacgctgctatgaagaaatacctgagactaggtaatttataaagaaaagaggtttaattgactcacagttctgcatggctggggaggccacaggaaacttacaatcatgttggaaggcacctcttctcagggtggcaggagagagaatgagtgcaagcaagagaaatgccagatgcttatgaaaccatcagatctcgtgagactcacgcattatcacaagaacagcatgggggaactgcccccatgatccaattacctccacctggtcccgcccttgacccgtgggaattatggggattatattcaaggtgagatttggatggggacacagagccaaaccatatcagtaacttatctaaaagtccagttagatcaaacaacccaagggagttagtgtccaaagaaaatggatagcagaggtgggatttgacttccaaaataactccaaagccccctctttgagataccctgctgctgaactggagtgtccactaaagtgttcattttagaaacccaagtgctaaatacttggattttggctcgaaagttgctgttatttcactttccagaggatgctttttgagaataaatagtatatttaaaaatagtgccaaatccatttgtagcattcctctttttatagtccttttagttccttagcttcctcacctgagaatagagatagtacttgcttacctctcactgttgtctgaagacccaggtgagattattttacctagcactgttgcaatacagcctagagctgcaccattagtactattcagtggtttgtgagtttgtgcagccatgtccaaaggaataacggtgcccccttcagcagcacatatactaaaaattggatgatatagattagcatggcccctatgcaaagattacacgcaaatttgtgcattgttccgtattttgcgcaatttacaaaggttgttgaaaaaaaaaaacacaacaaaggaataataaccatgccttgggttagctatgcaatatcaaagaatgacctgtttgcttatattaaaacatgttttttttaaaatgcagtaagaayaattcatatmctggtgatgagaccaggagtgaaatctgtattatgtttaggattcttggtacaaattataatagtaaaatgaaagggarttgtaaagtattggtctcttgtttcctytgttttgaagagtctcaagtcaaagtcgtggccctgtgtgctggttctgggagcagcgttctgcagggtgttgaggctgacctttacctcacaggtaggacagactttggatctctcttggtttattttttgcaaaatcaaaaatggcaaattttaggacagtacctggcacatagatgatacctaattaatgttttctgaacctgaactaaacagaaactacaacagaactggggacttactgcattctttgtggagggatgaaatcattgaacagtttattacattatctcaaaagttaatggtcagcatttattttacctacattcttcctaaactgtcccaaacctctcagatttcacatcagtgggatactttctaccctgtcaccttagctaggaaatggttccttttactcagcctaaagccaatcatcaattcctatcaattcaagctcccaaatctttctagaatcttcccccttatctctatccaggcaccatctcctacttgaagtacagcatcaaccctctaatggtatcttccatatactctcctgaaattaacttttcaaagtgcaaatttgatggtcttgattaaaaagacttcagtgatttccttcatctgtctggtggagcctgaacattgcatcccctttcctgtaccctttgcttatgctgttttctctggctagaatgccttttccttgtactcctagtgataagtgaacaccccctctgagaagccttctctgacactgtcctgctcctgcctcttgtgggtccctatcactttgtccttgacctccaatgtgcacttctgttggatagtaattgtctggctgctgggccttatactttctcatttaggatactacctaataggtcctggctaatttttattgaaagaattactttatgtagttactactcaggaatatggccaaacatggccccttacacctccaaaggatttggaggcattttaaggggttgccactttgtttacctcctccttcttagggttaggagagaatgagttaaagaattacttttcccactttgaggaccaggctctaggctcttagccctctggccattcctttggctacttccatgcttcccttgcctcccacacccacactttgttatatagcacactctcttacaaaggctgctgcactcaaagcattgtcacatcctgaagtaccgaggagcagcatctgagcaagcctgatggaattgctctaaaccaataaattgatttaaaaaaacaaaacatgtatgtgactattacttattttatattttctgaagataaaagatttttgtaagcccttaaatttctaccagattaaagtgaaatttcaatatgaatatcttacagtattgtgtctggctattttaaaattcattttagcattttacttaggaatttcagacctatgcaaaagttgcaagaatagtatactgaactcctatatgctcttcaccttggttactatggttatattctgccatatttgtacattccctatgtgcatattatatatgtgtctatacacatttgtgtttgcatgtatagatacataatatatacaagttaaaatatgttctatatatatattgatgtatttcccctaggaccattttgtaatcaattgcagacatgacaatttctttacctctcaatacttcagtgtatagtctaagaacaaagacattctaagtccatggaacaattatcaaacatgggaatttaatattgttaaaacacttacttgatatacagtccatattcacattttcccaattgataaaagcttatagcatttctttttctgatccatatccagccaatgatctcacattgcatttagttgttgttagtctccttcagtctggaatagtttctcagctttgtctccatagcattgacatttttaaagagtataggctctttgttttgtgcttctctctcaatttggggtatctgtttccttatacttttttaaaaactagttttttaaaacaatgataaagtataatgatacgtgcataagataaattcaagcagttccaaaatgttaaaatgtccttcctatctggctgtggggagaaatagaaaatatattatccggctagcattagctgtctctggtctgtgaggcatcacttttgagtataacttcagagatgtgaagccccacctaaaggacctctgctgaacttcatcacgcttcctgtgagcctgaggccgtgttctcattgtattaggttgttaagggtaataccccgtaagaccagcagatggggagcctgctccttgtaaattaagttctcccatttgtcttttcattctccatttgcttattctttcccaagctgccatcctgggccaagcttttctttccattggcttcagctattattgcagggtcttcactgatttcccccctttcatgccttctccagccaatgaatttgtcacagtacaggcagccagacttacctttcctaaaacaaggcttccaactgggccatcttagtgtctttttcttgctttttacttctactattatagattaagatgttttaaaaggtgcttgaataaaaactgttccttataatgagatgacacttattaggaggagattgtggggaactaaaaaattctggaattaagaaaactcatttttttacttataggtgttttcttatgggaaaattaaaagagaactcatttttttccaagaacccttttttcttaaatttatatgcccttctgtctctaaatacagttcaaaattgtactttttaaagaacaaacctaattgtacacagtacagttttgctcttaaattagaagtcatcaaattcacaaactgcattttaagaaattcagaatattaggctggacatggtggctcacgcctgtaatcccagcactttgggaggctgaggcgggcagatcacttgagcccagcagttcgagaccagcctggccaacgtggtgaaaccccatctctactaaaaatacaaaaattagccaggcatggtggtgggtgcctgtcattccagctactcgagaggctgaggcaggagaatcacttgaacccaggaggcagaggttgcagtgagctgagatcgtgctactgtactccagcctgggtgacagagcaaaactccatctaaaaaaaaattaacaatataaattaaaaattcagaatatgaattttccccaaatcttttcacaacagatgagattccctccagagtttctagggattttgcttaagtcaaagaaaaatactttgtttttaacctggaagtaatcttaaattcatttcatccttatatattagactaagttgacgacagaaatactggtgcttacaaagcataagtctgctgggcagtatacatataatttcctccagaggtatttattacttacataagaggcaaattttctgaaggcctcattttacttggcagtgatcattcattttaccgtggaaacactttgaatgggtgtttacagatctggttctggccagatatgttggattggataattgccttggggtctgctaaggaaaaagaagttggaattctcagtgggatggattttatttttatattttcaagatagtcttactctgtcacccaggctgaagtgcagtggtgcagtctcggctcactgcaacctccaggccctggactgaagctattcacctgtctcagcctcctgagtagctgggattacaggcacgcaccaccacgcccagctaatttttgtgtttttagtagagatggaagtttcaccatgttggccaggctagtctagcactccttagctcaggtgatctgcctgcctaggcctcccaaagtgctgggattacaggcgtgagccaccgcgcccagacttttctctctttttaagttggaggacataaaagaaaactgtacactactttctagatttatatgtaaaacagttctgctctattacattcacttcatatagactacaaacttggtatttctgcttttgtgtttcctcattccacagattccatatttagcatttaagaatttgctcttccctttttggtaggtgagatgtcccatcatgataytttggatgctgcttcccaaggaataaatgtcatcctctgtgaacacagcaacactgaacgaggctttctttctgaccttcgagatatgctggattctcacttggagaataagataaatattatcctatcagagactgacagggaccctcttcaggtggtataattgcagaaacatcaggataacacattctacaaatcagctggatgccaacttaaatttgtaacatgagtcagtgggactggtgtgcttccagagagtgtcttcgagggtatcatcatttccggtttgttaatcttattcaccaaatgttctatcgctcgtaaggtaaaactgtaatataactaccatattaaataacaaatgttcattataaactctaggaaagattgaataaaatctgtttacttaacattctttggaaggagctcaagtgattctgtccttagtttaattgtagatgggatggatccatttgggtatctctgcccttggttagttaacattatgcttgaaaaacttgggcttgaacacttctaggtagtagcctttttgcagtgataagaagttctgtttgtccttgttcctagttctgcctacattccagtctctcacctaaatttcagaatcagaatgagatttatcaggatgttgttttgaaaatatgtatacacaatcattattcatattactgttactttattgctttttagatgacttacctgtaatttttttttcttccacagtcctttgttcccgatttctgctctgtcacttccctctcctggcaatgaacttggctgccgcaggcagggggcagggccagggaatgaaattccagagcagaaagaacaaagtcagatatctcaaaatatcatcctgccccatttaatctgggccttttatccatgtggatgcccctttctaaacagcacctgcgctgggctgcgaggcccctgcctgcctgctgctggttgggcagggcagatacacctttctccacctgaggactgcgttctcaggtaatctggctaaagcaatattccctccattttaggcattcttagattgcttttatgatttgtgctattttaccataccacatgtaatttttacttcatgcttttgtgtaaagcaactttttctctttttgtttattttttattgtggtaaaattcacataacataaaattcgccattttattttcctgccccccccttccaaaattcaccattttaaagtatacaattccgtagcttttagtacatttacagtgttgtggtactgttaccactacagttccaaagcatttttcatcaccacagagggaagcccccattaagtaataattccctcctcccatcccctggatcctatttctatggatttgtctattttggatattttctataagtggaatcataaacatgtggtcctttgtgtccggcatctttcacttatgttttctccattactgccgccttttgtgtttgattttttttctagtattttgactcccttatttccttttaagtatctattttatcttcttacctatctttaaaggaaattttatgtgacatccattataacttaaatatttacttaatctatattaaatacaggattattaaaatacaaaggaacactgctcaaaagaaatgtcatttttttttaatgtcattttttttttttttttggagacggagtctcactctgttgcccaggctagagagcagtggcatgattacagctccctgcaacctctgcctcccgggttcaagcgattctcctgcctcagcattccaagtagctgggattacaggcacacgtcaccattcccagctaatttttgtatttttagtagagacgaggtttcaccatgttggtcaggctggtctccaactcctaggctcaggggatccgcccacctcatcctcccaaagtgctgggttacaggttgagccaccgtgcctggcctgaaatgtcatttttaagcttagtgtctaatgacatgttttgtgttgttttgctgatttaataaataaggccagatactgacatgaaacagtggtttagtaatcccttatctactccagaaagctgaaggctgaggaaggacatgcacattccctcacaggtgtcacatgaaaaatcttccctatcctgtaggacttaaaaggtcgccttggatgcccacatggacaatacattccaggtggaaggttgcagattgtagggaatagtgtcaccacctttgttgtgcatccatgacaccttatataatctcttgtgcacatgtattagagggtgctccataccaatctagatcaggatccaaatcagacactagtgcaggaaagaagtgaagctggccaggaggtggcagcaacagttcagcccaaggcaagtgctgctgggcagaatgaaggtccagcgtggccaagtcttcctgatctttcaggggcaaaggaaatctggatttttaatatgtggggtgttaaaatatacatatattatcatatataaaacatacatatatacatgtttctgcacagttcctggcttataactcctctagcccttgttacagtcttttaggtgtgttaagcctcaggggcaggcctcaggaaacaatctctcagagttctcctgccctcctttcaccagtcccaaagcaaaatcctaatctccctcctttttcttttttatttagagacaaggtcttgctctgtcacccaggctggagtacagtggtgtgatcatagctcactgcagcttcaaactcctgggctcaagtgaccctctctcctcagtctcctgggtagctgggcctacaggcacctgccaccacccaccccctactgactaattttttcaaattaaaaaaatttttacttttgtaaagaccgggttttgctacactgcctaggctggtcttgagctcctgagctcagggaatcctcctgccttggcctctcaaagtgctgggattacaggtgtgagccactgagcctggccgttttttttttttgagacggagtttcactcttgttgcccaggctggagggcaatggcgtgatcttggctcaccacaacctccgtctcccgggttcaagcgattttcatgcctcagcctcccgagtagctgggattacaggaatgtgccaccagacccaggtaattaagcatttttagtagagatagggtttctccatgttggtcaggctggtttcaaactcctgacctcaggtgatccgtcctcctcggcctccctaagtgctgggattacaggcgtgagccaccacacccggccttatttttttttattttttattttttgtgagacagagtctcactctttcacccaggctggagtgcagtggcacgatctcagctcaatacaacctccgcctcccaggttgaagcaattctcctgcctcagcctcccaagtagctgggattacaggcattcgccacaatgcccagctaattttgtatttttagtagagatggggtttcaccatgttggccagggtagtctagaactcctgacctcaagttatccacctgtctcagcctcccaaagtgctgggattacaggcgtgagccactgtgccaggcaaatgctgccattttaagacctacactttgggtaccaaaggtaaagatgttgaccctaaatacttgggaagcctggggccagtgataaatataaaaattggtatgaaaatttagtaatgagctttgtattgtactcatgcttaaagttatattttccatagcatcagtcttttcaaatttgccttattcaacacattaaggatgctacaacttatgctattaaaacctcataggctgggtgaggtggctcacacctgttaatcccagcactttgggagacccaggtgggtggatcacttgagcccaggagttcaagaccagcctaggcaacatggtgaaaccccatctctacaggaaaaaaaaaaaaaaaaaaagccaggtgtggtggtgtgtgcctcctgtagtaccagctactcaggagggtaaggtgggtggatcacttgagcccaggaggtcaaggctgcagtgagctgagatggcaccactgcactctaacctgggtgacagagaccctgtctcaaaaacaaacacttatagacatttcatatttcaccttaatatcctcacaactactgccttttgtgtagtaagtgttcaaatttaggctattcaggattatgctggaagagtaatttgacctcatagaatataaaaagtacattctgaacaatgccactgcctccacatttgaattagctggaacaaagagtagacttctaaagttattttgtttaaaagttaggcaaaatctatttatcagcccccaaaccaactgatcttttattttgagacagggtctcactctgttacccaccaggctggagtgcagtggcatgatcacagctcactgcagcctcagctttcctgggctcagatgatcgatccacctaagccttctgagtagctgggactacatggtgcgtgccaccatgcccagctaattttttgtatttttagcagagacagggtttcgccatgttggccaggctggtcttgaactcctggcctcaagagattggcctgccttggcctcccaaagtgctgggattacaggtgtgagctactgcgcctgtttccactgaatttttttttttttttttgagacggagtctcgctctgtcgcccaggctggagtgcggtggcgtgatctcggctcactgcaagctccgtctcctgggttcacgccattctcctgcctcaccctctcaagtagctgggactacaggcgcccgcgaccacgcccggctaattttttgtatttttagtagagacggggtttcaccgttttagccaggatggtctcgatctcctgacctcgtgatccgcctgcctcggcctcccaaagtgctgggattacaggcgtgagccaccacgcccggcctccactgatcttttatatgagtgaagtgatcatgtattaaaataacaaacaatgctaagaaagtccagtttctggactactgtgagaactaatttagcagtccttgcacaataaattcagcactgtggcaaatttataaacaataaatgtttgacatctcctgtgcctttttttttttttttttttgcaattttattaagagtacccagaaaacctttcaaggtttcagtagatctgttcaatcttgccagaagcaagttaacacagtagaagaaattagagccttatcagtcaagacataattgctagagcctcagggacaccgatgcggacacaagtcaacaaacagcatacaataatgtgccaagatcttcaccagatctgtaagatgcactcataaaacttcttttgaagaacttaaaaatatttttagtaaaaaaccagcactaccaatttataaagtgattctatccaaattggctttttatttattaataataaagtctactgacacatactgcttgcaaatagtatagacacaaaaattataaaaataaaccagtagatatttagggcagatgcaaaaatttgcacattaggtcattataaactagatatattaagcaaaaaaagcaaggtgcaaaccagcaagtatgatatattaccaattgtgtttttaaaaggagaaagacagatacttttacatatgcatagacgatatctggaagaatacttaagaaaatgctatcagtggttgcctaaagaactgggtggatcagggagtgggcaggaaactcactttcactgaatatcctttggtactattaaaaaaatttttttaaatcacatttatgtacaaatttgtttaaacattttgactagaggttatatttaagactaagcccttggccaggcatagtggctcacccctgatcccagtactttgggaggccgaggcaggatcacttgaggtcaggaattcgagaccagcctggccaacatggtgaaaccccatctctgctaaaaattcaaaaactagccaggcgtggtggcgtgtgcctgtagtcccagctcaggaggctgaggcacaagaatcacttgaacccaggaggtggaggctgctgtaagcttagatcacgccactgcactctagactggatgacagtgcaattccatctaaaaaaaaaaaaaaaaaaaaaaagactaagcccatggacttaacataaaattactttttaaaaaaatgatttaaaaaaaaaaaaagacaaggtcttgctctgcacccagactgaagtgcagtggcacaatcatagctcactgtaatcttgaacccctgggctcaagcgatcctcctgcctcagcctccacagcagctaggactataggcatgggccaccatgcccggatgattttttaaattttttgtagagacaaggtctcactatgttgcccaggctgttcttaaactcctgggctccagagatcctcctgccttggcctcccaaagtgttgtgattacaggcataagccattatgcctggccaaaattacttaattatatgccacaagaaaaattatttaaaaattccaaggatttttggaaatattttcatgaaagaggtttacaagataagaaatgagtgagaaatgctgacgtagtacgtattttattgcagtgatattttcaggaagaacttcatttccaagtgtcaaatatttcagggggtatgtgatgactgtaagctgacaacagtagccaaggtgagccttttttctttcctaagaaaaaagtctcgcgcaaatattcaggaggtttgaaatcatcactttaaggaaaaaactgaaatatcttacagtgagttttaggtctacttgacagaggaatcaaaattaatttacagccagccattaatatgctactcacctgcatgttgttcaagaaaagaaaaatatgtcaatatacaagaataatgaaatgttttattttttgttgtcttgaaaacaattactaaaatgtaattcaggattttatttctctagcctggcttctcactggtatcatgaaggtcatggcacagacaataactgttccaaatatatgacgtattgttcctgtgctttctaggctgggtagataccctatatactctgtttttcccattatcccaactgaatagtattataatatattccctcccctgcccccaccaagtacatagcctcaatccaaaaggagaaagctggatcactcacctcttcccaatctacaccttttaagttgttttagaaacaataagagatgacctgccctctccattacactcgttggttctgacacacagaatagcaaacaaaaccaatttacgtgatgcccatgtctttatacttccacactctggaacaaacacacttgcaaacaatcagctcggggagtgttaaaaggccctcaaaaaattcagaatatctctaagtataaaataattcaaaaacatccagttccaaatagtccctgagcacactgttcattccagcaagaagtctccagagaggtaatgaatgaaaggcacattttctccaacttgaggaccgctgcatagtactagacggtaccagccaggctgatcaaaaagttctaattgaggacatcccc

SEQ ID NO: 96370 - DNA, 23067 bp, Homo sapiens
cttggggtcacccaggctggagtgcaatggtacgatctcagctcactacaacctccgcctcctgggttcaagcgattctcctgccttagtctcctgagtagctgggatacaggtgcctgccaccacacccagctaatttttgtatttttagtagagacagggtttcatcatgttggccgagctggtcttgaactcctgacctcaggtgatccatctgcctcggcctcccaaagtgctgggattacaggcatgagccaccacacccggcctaaacctgctatttttaaaaacaaaaatatacacggttgcatgcatctccatcacgtcctctttcaaacctgtggatcctgtggcttaagtagacgtcctaactgttactggcttgatgtgtagccccctggagccagatccttactggggtatgattagggctgaatggaattgggacaaccggatggccagcctgctttgtgttcactggaggtgggggagtgccgacccactggtgtggcacagcagagcaaggctgaggcttatcacaaaacgtgattattaaccagtagtgcacggagctgcactgggcattttctttgaagagtgactactttagtgatgtgtctgtaggggagagggtgaggtggcatagcctcagtgatttaaatctttttagtcacgtatatgatctctgcctatgatgacaattaggatttctcagattttcttcttactctgatgtttagcaccaggaccaagtcgtatctgttgagtccacttgtgatggtggaggtctgttatctccatatagagagtttaatggccctgtagacacaatataaagcatggcccttgagcaggagacttaaggttggctgggcacggtggctcacacctgtaatcccagtactttgggaggctgaggcaggtgatcacttgaggtcaggggtttgagaccagcctggccaacatggtaaaactctgtctctactaaaaatacaaaaattagccgggcatggtggcaggtacctgcaatcccagctacttgggaggctgaggcaggagaatcgcttgaaccctgggggtggaggttgaagtaagttgagagacgccactgcactccagcctgggcaacagagtgagactctgtcttaaaaaaaaaaaaaaagaatattcaggcagaggcagcaggaatgtgtatgtttctcttgttggattcatcgtcttctctcccagctaaggagctgcatgggagtaattgtgctggtttctgttagatggatacctgcatgttctcagatggagcagagatcagaccctcttctcactaatacgtcatccaaattgctagcagtttcagcagtggtccagaaaatggtcaaatctctgtttgatgagtaaggtcaaggagtttccccttggagttacaggggatcatctcaagaccaggagcctctgcacaggagacacaagcatcccgtgaacatggaggacaacacatggcttcaaatcatgcttcgccatgtatgcagaatctctctaagatttctgtttcaaattcgcagatcaccacgctagtccctaagggcatagctacttctggttagtgagagtgaaggaggtagaggtcaaaagcatagattgcttccagaactgcagtccctaaacagaatattcaaatagggctaaggagcctcattctaaagtcagaaagtgactgtaatttacctggtaattagatatgctcagaagtaacttctgacttttcccatcaatttctaggctcccttaacacctgtaatatagctggacaaaggaagaaagtcgtgctgcccttggtggaagtttggacccatccccagagaactgtatacgcttcctgctttcaaataatatgtgtaatcctatggggtctgactggcagacttacttttttttctgattcaaaatgccattcctgtatattattaaaatttggaaagtacataaagatataaagaaattttaaagcaccacacgatcccactactaagagttagggtctaaaatagtgtggtctgtcctcctgagcttttttctaggtgtaaatgagctagcatcagctgcactcagagcccataaacccaggttcactttcaaagtcgtgttcaggaacttctccttgcattctacctgatggggatcagatcttttcgacctaccagttatacacacacacacataaatacacacactcagaagttcttggtgttagattaaaaaaaaaaagaccctgatggctagaagaattgacataccacaaaaatgtacgatgcacttttatggggtacacagaggtgaagtttgtcttataaatagatggtggatccaaggattaatttacagaaaaaaagctttggaaacttttaataaatatacagcaatgtcaaaacattacactttatacaacttttatttttttttttaatagagacaaggtctcactatgttgcccaggctggtctcaaactcctgatctcaagtgatcctcctgcctcggacctccaaagtgctaggattgcaggcgtgagccaccacacccagccaacttttacaacttttaaagagagaaattacgaaatgtaattaaagttctgaataaatgccccaagaataatgagatcctgaagtctctttcacctgagccttcaaaggcatgaagcacaatgacaaaagtagggatgaacatatgaggaaaaaagaaaaaaaaaataagttgtgcctctataaaagccacccaccaaacacaggacaaacatgaaagtagatgatgacagactaacacttcagtacaaaaagagatgctttataggaccttaaactatctccactcaatatttttcatgaggatgctgtacttattaccgatacatctgactttgttacttctttgcatttctgctgcatttcaatctgagaaagtcataaattcttgaagctcttagtattttttctctcccttctgggaaggttagaaagatgacaatgataaatgcataaataaccagcagggagggaaggtgcatcattacatttagaaacacctgactgtcctagctttttattattttaagaaagaggaaggttattaaaggatattttagaactacagaaaaatcaataataataaaaactagtatctgtatgtgatgttagagttcacaagcactatcatcaatttccatttaattcttgtattagtccgttctcacactgctataaagagtattacccaagagtgggaaattatgaaggaaagaggtttcattgactcacagctctgcaggcgttaacgggaagcatggctaagaggtctcaggaaacttaaaaccacggcggaaggcaaaagggaagcaggcacctttcacccgatggttttaaagccatcagctctcatgagaactaactcactattatgagaacagcatggggaaaccacccccaagatccatgaaccacccccaggatccaatcacctcctacctggtccctccactgacatgtggagattacagtttgagatgagattgcgttggggactcggtcccaaaccatatcaattcttaagcaattttgtgacacagattttttttattatccccactttataatttactaaactcattgaagtacataaagacatcatacagccatcgggggataactcagtaggcttcttggtctaattctgtgatcctcaaccaggagtgatctctccacctctagcagacatcggcagtgtctggagacatttttggttgttaccactaggtagtgctattggcatctagtgggtgagaccagggatactgctaaacaatgcacacgacagcccgtcacaacaaaggctcatccagtcggagtgtcagtagtgttgagattcagaaacactggtatgttctacactttcattagggtcctgatgaaactcttaaaacttggtgtggcggtttgtctaaacagcatcctttctctcattgttcttgctgtcagaacctcattttattcagggaagggcaccctaatctcagtttaggagtaaatattggttagactagattaatcatggtaatcccatttcctgtcagcagttgattatcagggatgggcatgtgacctggttctgaccaataagacacgaagggggatctgctagagggatgggttctgggacgtatgtttatactttttttttttttttgagatgttgaaattatttttaggaaggctaagaactaaaatcatttatatatgtatgatgagacaacaagggatgccaaaacaatttagaaagaatatacttactaaaattgctagcaaaggcaaaaaataaattaaaaagtaaacccaaaacaaattttagagataccaagccttatagaacttctagaattgatacattttaaatttatggaccatttccttgaattgaaattaacagcagagactttccaatctaggcaaaaaaaatctgcttttcttcctccagaatcagagaaatcaatgaagtgaaacatgaaagattcatgtgaggtgccctctactgaaagcataaattttgatgcaatcagagaaaaacattatgagagaggatgatcattaagttaatatcttccaattacctacacttgtccctcagggtaagtcactgagttatgaatggtgtttgttcaactacaatagtccttcctaaccacataagattcttaaatccccttctatcagagaataactcttgtagtaaattaggattcctaaagggagtatcaagagctctcagtagtgttgaggttaaatcactctttccagcaataaacactatttctgaaaagtaaaactgaaatcgaacttgtgtcagttaagtgtcattgcaaagttttaaactgtgctcagtgtataaaggttttatttttccccagtagtactgaagtataattgacaaacaaaaattgtatatatttaaggtgtaacatgtgatgttttgacacatatatgcattgtgaaatgattaccataataaagctaagtagcatatccatcacctcacatggtgaccatttccttttgtagtgagaacaccacacagtgaaatggtcacttctgtgggctgcctttttggtgatggaagctcagcttgcagcagatgtgaaagtaaaacaacttgagtaggacttgcaattagagaaaaaaacttttctgagctctatgttcagaagtcagcttaattaaaaagctgatattcaggatatagtgttttctcttttttttggaaaaaaaagggccttctgcttttagtcaactgaaatctcctttaagaccttttttttggcctggtgatgtggctcacgactgtaattccagcactttgggaggccaaggcaggtggattacttgaggtcaggagttcgaaaccagcctgaccaacatagtaaaaccctgtctctactaaaaatacaaacattagccaggtgtggtggcgcacatctatagtctcagctacttgggaggctgagacaggagaatcgtttgaacccaggaggtggagtttgcagtgagccgagactgcaacactgcactccagcctgggcgacaaaacaagaaagactctgtctcaaaaaaaaaaaaaaaaaaaaatttttttgtttggcgcctttcttgttggcgtgatttttgcctctgtaacttgttcttccatttccttccatgcctgttcttccttccttttgccatctttgatatcacacgaaaaaaatctaggggagacgtctagagaccctgagaccccttaaggaacagagaaaaatgtgccatccgtcccctttaaggagtcttctgccttccttgcggagttccaagaatcattggaaggtttgccttcagtctaaagttctgctctctcttgaattgagttccctgaactctttggcttttgggagtagtaccaggaattgctttggactcagagaacatgacctttgagtgtgtgatggctgataagtcactggtgacggctgcagttttggaagyagctcatagcatttacaatgagtggttattacagctgggggctactcgtttctttgtgcatttaggtaagaaaagcatgatctgcaagcaaaaaacaaacagccacattaaaagatgggaaaaggatatgaacagacacttttcaaaagaagacatacacatggccaacaagtatatgaaaaaatgctcaacatcactaatcagagaagtacaaattaaaaccacaatgagataccatcccccaccagtcagaatggctaatattaaaatgtcaaaaagtaacagatgctggtgaggttgtggagaaaaggtaacacttatcaggttgtggagaaaaggtagcactgattcactgctggtgggaatgtaagttagttcagtcactgtagaaaacagcctggtgattgctcaaacaatttaaaacaaaatgaccatttgacccagcaatcctattattgggtgtatacccaaaggaatataaattattctaccataaagacacatgcatgcacgtgttcattgcagcactattcgcaatagcaaagatatggaatcaacctaggtgcccatcaatgatagactggattaaaaaaaatatacaaaatggaatactatgcagccataaaaaagaacaagatcatgtcctttgcagcaacatggctagagctggaggccattgtcctaagcaaactaacacaggaacagaaaacataataccacatgttctcacttataagttggcactaaacattgagtacacatggacacataaaagggaacaacagacaccgggatctacttaagggtaaagggtgggaggatggtaaggattgaaaaactacctctcaagtactatgcttattacctgggtgatgaactaacctgtacaccaaacccctgtgacgtgtagtttacctatctaacaaacctgaacatacacccaaaacataaaagttaaaaaataataaaaaaactaaaccactgtacgggattgattaattaagtaatatgtaggtatcaggcatacgtgatcaatcccttcatttgtttatattggaggaaggatgggatccagccccattcacctaggagaaccgcagaggtagcaacactcaggaccttgatattggatctcctggaagtccatttgtagtgagggtcttcccttcagggtaaatataatttttagctctgaagaaggtttaagttttatatatagtctaggccataggtgctggagaccataactagtaaggctaagcctatggtggctttgcaggctgcgaaggataatgggtaatatggatgctaaaatgaaatgtaaattcaaggttataaggatgctcatgatgaatactgacagcattatgccttctagacatagaaatgagacattagatgagatcggtaaattattattcctgctagagatgtaatgaaggccaaggtgacattaatatagatagaaggcatttagtaattatgagtaatcataatttaatgagtcaaaatcatttgttttggtttaaactcattaccaattcaactcattctagtccattttggattcattcatgggctaatcctagggctaagacagtaattaaaatgagtactataataagtactaattttaggctgttcattcggaagggaagagaagaccctcactgcaatcaggcatccaggacagtgatcatatggtcccacactacctcttcctcctccctgggtcctgcatttaacttcctaatctctgctggtagcaatattaactgagtattcaagactctcagggcccctctcaaaaaaaaaagaaaaaagaaaaggaagaaaagcatggtttggtcacctgcaggctatagaaatgcttgccaatgagggataagactcccagaggggatgggctgaccagcgtgggctgactggcattgggttggccagcagcctcagggggctattctgacagtggagtacactgtggaagcatcgcactggctagtcccatggtgcttccctctttttggggacctaggattcagtgtgaaaatgggattcttgatttcggggtatctaagtgctctaccttccagccgtggctgtttttcacacacatatgaagccctggaagctgcaaatgctttccttgcccttttcatcaaaggactccaccttgaagtcagtaatctcatgaataaacaagctaagtggaaaagaccacatatcaagctcaatcagtttccaaaatacaactttctgacatttagttggccattttgaaactctttgtaaataaaatttatgtctataaaagaaatcccaatttgtaagcgcatctctctctctgctcctaaaccattagaaattgtaggatgaagacattgacttaatatttacataacaaaccttatctttgtgtaagatatttttcctggcaagcttgtcttgactgggcctttacctgtgtccttctttgcctcagcaaataatggttttaaacctaagttctgtgcctttgagatacaaactttaatctgcgagtcatgtctatggaagtacaaatttagggttacctagctaacaattattttggggaactgaacgggcaatcaagagattgatcgtctaaagcgcgaagggaaactatttgaaaactgtcaaatgaagacccttataaagctattgtgtccggaatttattccttctggtaggttcttggtctcactgacttcaagaatgaagctgcggacctttgcggtgagtgttacagctattaaagatggtgtgtctggagtttgttcctccagatgttccgatgtggcctctggagtttcttccttccagtgggttcatggtctcgctgacttcaggagtgaagctgtagaccttcgcagtgagcgttacagctattaaaggtggtgcgtccggagttgtttgtccctcctggtgggttcgtggtctcgctgacttcaggaatgaagcggcagaccctggcggtgagtgttacagcttacaaaggtagtgaggacccaaagagtgaggagcagcaagatttattgtgaagagtgaaagaacaaagcttccacagcgtggaaggggaccccagcaggttgccactgctggcttgggtgaccggctgttattcccttatttggtcccacacacgtcctgctgattggtccattttagaggcgctgattggtccattttatagagtactgattggtcgattttacagagtactgattggtgcgtttacaatcctttagctagacacagagcgagattggtgtgcttttacagagtgctgattggtgcatttacaatcctttagctagacacaaaagttctccaagtcctcactccacccaggatgtccagctggctccagctctcactataagatctgcttctgtcatatgtctgtatgtttatacgcttgtatgtatgtacatttcactacccaaatatatgaaagagctctaattaattggcttaaagaaaaagtaaatgctgaaataaaatatgtcaggaaaatagaaatgacctcagatgccttttatgtcatgtgtctttagtaattttgggcaaataaaactagtttttacgttgttggtaaaataaaatagaaatgtgttcagaatcatcagagttaaatataactgaggcattttcacctagatctactggtaagataagtttaggctatctctcctagatttttaaggtcacaaatgttgcttctgtgacatttttgatacttctttgacttttctgtgagcttatgttatgtcttggagctattagatttcaggctctaaacaaatggccacagtgaggcctggggacatttgtggagttctcactggcccagttgtgcctcctggctatgctgggaagggacagacattatcctcacagctctgtcctccattgtgagctctataattggtgtgtacatttaagacccaaatgggccctaccctttatagccgtccttgtgatataggagttaagaagaaattacttaggcagatagtaagggtatgggagtcctaggtaaggatttcctttttagtgaaaagcagccccaaatcgttttctaacaaagaacagcctgcaggctgggagcttgcacaggtgaatgctggcaggaaatatgggctagacacgttaaagatggtggctccatcttcccttctctgccagtcacctgtactgtaaaggagcagacaagatggtgccaatcaactggaaagtccacttgcataagaaaattagggtggggcaaccagccttccgcacgcactatgtagacgtcatacctgatctaaccaatttgtgagccctttgtaaatcagacaccactttctcctgcctgcctataaaattggctgcagtccgctgcctccttgactttttggatgtctttctctctctctctctctctctcgcaaagagctgctctcccatatcctttttctgtctattaaactttccactccttaactcacccacatrtatctgtgtcctgaattctttctccacacacaacgaacgccagggtatataccccagagagtatacagccttcacttgggtgtacatgggtacttgggacccaggatgagtagggaagtcagtaaggagtgtgtcatagtttcaaaattcttttcagtaacttaaaatcttaaaatcatgttatgttaaactaagtaatagataatcatgaaatatctgaaccatttaagtaactttaaaaactgaaacattacttattaaacataagtttaagtttataaactttggcattttatttttaatatgatacagaaaacaaaatatatttcaatctgttaatatacaaaaaattgaggaaacatctttctaaaaattttgatttttatctacgaatacagatatagacagttcaaaattacttcccatgtttttcactggaaattagtatttctaagagttaaaatggtagtcaatatacataattaaaactaatagccataagagaatcaattctacatacaaagtgtataaaaaaagtaagatgtaattttggtgaagaatgttataagacagatatgaggatgttgttttaactcttagaaatccttttatcctatttgatgaccatgaagttttgattgcggtgtaaagtggaatgaagtgactgacctcatttctagaagattctagtgggccaatgctcagctcccaacttctggactgtatgctctaactatgggggacttgccttgatccctgactttgtcctctggctccttgagtttaggtatccactgtgttgaggggggtcgaggtactcccggaccattggtcactacactccgatgggtggtgtyggccaaagcatttcatagtgcggttacagcaagatccattcttgctcacacgtgccagcagcagtggtagtggcagcatggtaggttgcacgcttgtcagctgaggcagagtgctagcaggtgccagagtgcctgcctcccttcatcatagkggtggaggcaatgcagctgtgggggtgggagcttggtggagaagcctgattgcaattgtgtgcatggtcatactggtggtggtattggcttgggggtagggtgctggcagacaacacaggtctgtgtgccttctctgtgccctgtaacaggagtggttgttcggggcaggtgaggatccactgttctctgtgcctagtttcactccctcagcagtgttagcacaagagtggggcactggcgggggcagggctggctggctctgtgcctgccaagtctccatctgcagtgatggtttgcggagggaggagtggcagactgtactcccgccacagcagtggcagggcacggtgcacacatactcgcctgctggtggatcaaggaaagcaaaatctgcccattcagacacatgccagcaaagcaatgtgaggagttgcactgggccctagggaagctgcagtgtggagagggtgcatgcaggctggtgcgtaggcatgggggccgccatgctagagctcctcgcaggttaggtatagtgtgccagtgcagaagctatgatgtagctcccagggcgctgcaagcaggtgtggccaggctggggccctgggagaggccggcagactgaggggtgctcaggttggactggccctatttgatgggcaagaccaccctgcagagttcaggactgacagttctccaagggctaaaggctcctatgggagcaagtggagcctagggtgatggccatccctggccctgctctgctacagatgctccaggaccaaaccctctgggctccacatcggctggtttgctgcctcctatttcttctctaagcagctctccctgccaacttgtgtctatggtggctgaasggtctcctkctgctggagttccagagactcgtggtgaaagtgagttgctccataccagttcaactcacctgttcccctggagctgcyggggcacagggacaacaccaggtatgcagcagacccatgtagggttcccaggtttccccctctcagtccaccttctgtgtgttccctctgttcactttcagtgccttccctttgaagatcttctaggagtataccagtcatctcggtcccttggtggcagctgttttacgtggctgcatctagtcagccatcttgcccccgctcaaaaacttcttactgttaatgtgggaaaaactgaatgctattcctctaagatcttcacaaggcaaagatgcgcactcttgccatttctattgaatacaggactgtatgtatgagcaagagcaattagtcgagaaaaaaataaaaagtacacaagcccttttttcatgtgtgttggccgcataaatatcttcttttgagaagtgtctgttcatgtcctttgcccactttttaatggggttgcttgtttttttctggtaaacttgtttaagttccttatagacgctggatattagacctttgatggatagattgcaaaaattttctcccattctgtaggttatttgttcactctgatgacagtttcttttgctttaattagaaattatagaaattataaattactttgggcagtatggccattttcatgatattagatagctcttttgtttaattagaccccatttgtcagtttttgcttttgttgccattgcttttgatgttttcatcatgaaatctttgcccatgtctatttcctgaatagtgttgcctagattttcttctagggtttttatagttttgggttttatatttaagtctttaatccatcttgacttaatttttgtataaggcttaaggaaggggtctagtttcatttttctgtgtatggctagccagttctcccagcaccatttattaaatagggaattatttcaccattgcttgtttttgtcaggtttgttgaagattagatgattgtagatgtgtggtcttatttttgagtttctctattctgttacattggtctatgtgtccgttttwgtatcagtaccacgctgttttggttattgtaaccttgtagtatgatttgaaggtrggtagtgtgatgcctccagctttgttctttttgcttagcattgtcttagctatccaggctcttgttttggttccatatgaattttaaaatagtttttttttctaattctttgaagaatgtcagtatgtcagtggtagcttgatgagaatagcatagaaattataaattactttgggcagtatggccattttcacgatattgattcttcctatccatgagctcaccatcactgatcattagagaaatgcaagtcaaaaccacagtgagataccatctcttgccagtcagaatggcggttattaaaacatcaagaaaaacagatgccagtgaggctgcagagagataggaatgcttttccactgttggtgggaatgtaagttagttcaatcattgtggaagatggtgtggcaattcctcaaagtcctagaatcagaaataccatttgacccatcaatcccattcctgggtatatacccaaaggaatataaatcattctattataaagatacatgcacgtatatgttcattgcagcactattcacaatagcaaagacatggaatcaacccaaatgcctgtcattggcagactaaacaaagaaactgtggtacatatagaccatggaatactatgcagccataaaaaggaatcagatcatgtcctttgcagggacacggatgaagctgaaagccattatcctcagtaaactgacaaaggagcagaaaaccaaacactgcacgttctgactcataagtgtgagctgaacaatgagaagacatggacatagggaggggagcaagacacactggggcccgttggggtgaggagggtgggggtatggggagrgagcgcatcaggaaaaatagctaatgcatgatgggcttaatacttagatgataggttgataggtgcagcaaaccaccatggcacacattgacctacgtaataaacctgcacatcctacacatgtaccccagggcttaaaataaacagaaacagaaacaaaaaaaaaggaagtaaaaaataagcctaaaaggaaaaagtaaaattttttctatttgccgatgacgtgatcctacatagagaaaactcaaaacacgtcataaaaattgttaaatccagtaaagtagcaggatacagaatcaacatacaaaaatcagttgcatttctttacaccagtaatgatctatctgaaaaagaaatcaggaaaacacaatccatcataatagcatcaaaaagaataaaatagagggtggaacaaggtggccaaatagaaccttccagtastcattcccctgcagggacatcaagttcaacaaayatcctcacgagcccaggcggcacagtgtgaagacagagtctacctccttaggaagtaaaaggaatgttagtgtgggattwtgcattggaggctagtgctgaccccactgcagtggaacacagcactgggcagagcctccaaggcccttgattctaggctggaggccacagagggagcatttagacccccgccccgggtcagagggaaatctgctacctcagcaggaggaatccaagttccagtccacttcacaaccacctaactaaagtggccttccgccagaccctaaaacaaagatttgcattcaggtagattatttggaagatgatttaaggacgtaccagtgcaggagttgtcgcgggacagtgagaccagggcagtttgacaatcaataaagggtgcatcattggcaagctacctgtgaacaaagggagcataattccactggacaacaccaggaggcagtgttatacaagcctaagggtaattccacctgaccaggtacagcacaaagatatgtggcctccaactcccaacatcctgggctgaatagtggtcccagacccatagttttcaagtctatctagcctgcctgaggacatgmcaagagaaagccttcgcatagagtcccgagttcacgtggcaggacgccagaggcatgttctagaacagtaggtgccgaaggcacagcacaaggaaacactcactggtggaatgttctcaaaacaaagaaatgataaatgtttgaagtgatagatgtgctaattatcatgatttgatcattacacaatgtatgtatgtataagaacaccacattgtaccctgtaaacatgtatattgtgtcaataaagaaacaaaaattatgttgtatagagaaaaatgcataagaaacagcaagagttgtagatcaataccatgaatgtaaataaaaaacaccagcataaacaaagccatatgacatatatcaccctcataccacacacatggggctctttcagacacattgcccagtgccttcaggtagagaggccagtgggaatgaggatgatggatgaagggaagaaaaatktttaaaagaagtctaatggkaactgatgaagaaagtataccataaacttggagtgtgattaaagccttccatcttcctcttttgcctcctctaggttaccagttctgcttttcctggacctgttccaagctctcacgttccacatcacacatgggacatctagtgtcaggctcccagagagcaggaaccaggtgaaatayaagagcacagtcctcccagccggtggcatggggataatcggacaatacaactctccacccttttttayggtaagatatgaataaggggtccacaggagcaacctgagtccctgcaactacatttcccaggggcccctggggtaaccctaatgtgactctgggggcggggccagttggacatccaatgagagcacttcccctgcagactttggaagtgagagcacttcctcatagaccttggatgtgggaggattgcattcagtctagttcctggttgccggctgaaataacctggtaagtggaactctgtaaggggctttgaaattggggtttaatcctatctcaactgtgagtacaggagagtaggttctacacgatgtctacatttcaagtataaggttgctcagaaagtgtggctggcacatacttggaagctaatgctgtcactactccacagcttagtggtgacagttacaggtcyttgattcaaactgttgggtttacagtcacagccactttatagctgtgagaacttggcctagtcacttagtttccctaaaactcagtttctttttcagtaaaatggagctacgagtactgcttacttaaaggacttgttgtgaggattacatacgtgtattaaaagataactaatgtgtttaaggcaactttctcaacrggatttccctcttggttacttgtaacagtgaygctcaccctcctctgtccccagtggtgtgtgtcccaaaggacccagttaatcctacaggcagcaagctcgtaataattcctgctcctcttgcactagctgataaaaagyccctaatgatcctggatgtccaggaagattgaattctgttgtttgcaatgcctatgggaattccagagggaagtttttgtttttttgaggcagagccttgccccattgcccaggctggagtgcagtggcgtgatctcagcttactgcatcctcctcctcctgagttcaagtgattctcctgcctcagcctcctgagtagctgtgattacaggcacccgccaccatgcctggctaatttttctatttttagtagagatggggttaatttttgtatttttagtagcgatggggtttcaccgtcttggctaggctcatctcgaactcctgacctcaagtgatccacctgcctcggcctcccaaagtgctgggattacaggcgtgagccaccacactagggacgaagttttattatggccgaaggacacttactggagagggtctccaggaggtatgaatgacaaaaaaattaactccttcaccgtcagaccgagagcatcaccccctgaacatggacttgcagaattccacagaagagaggagactggcctagacagacagccccaggagctgagggcccaacaggctttctaccctggatgctgctcccatgccctgacacgaggcccactacaatggtatacttgtttgctctttcctaattaagaaacaaacaaacaaaaaatcagacatactgtttgctcttgaatgcttgaaacacaaaacaggtgacaccaccttcctcctcaaaaggaactttttaactgtcaactttctacctgcacgctgcccagagacttattttgtctggcccttgctgtcttcagcagtagcagctgtttttctttagatttgcttttctggcctggtgcaagtaacccccaccacctgcctggccccagtcggcattaaatgggagcagtgagtggccttctggacaagaacaactgctgaatgatggtctttgggtgcggctagtccagcaaccccttttcatccagaggcccagtgagctggcttaggagggggctaggttgtagtgtcaatttagtgggattccatgcccttctttcatggtggtagaggcaaaagaaaagagaaggaataggaaaagaaaagaaaagaaaagaaaaaacacagaaagaaaagccactcattggctctccttgtaattcttctaatcattaatgccagaaatctatgcagcaggcgtagatgattttatctcagtccacaattgtacttgtgctgattgtagccttaaggccttacagccctatctcataggcagactacctctgggttaaactgcttttaattcttctatgttgggctcttgtttataacttttttaagagaaagaatacaggtttctttagcaataaagaaaaagaaaaccactgctgtatatttaacacacatcgattctagagacctggaattgaacaatgagttctgcatatcaacctgctctccaggggtaccaatccaagaatgtgattattgaagtgccaagtcacatagggataaatcacaatagttggtcaactgttgaatcttgatccttcaactaaacaatattcatgaactctgcagaaaaacaccagcattttgctcaacattcaggaccctctagaagttgcctcattctactctcctttcttacctttcttttacacagctctccaaaatgtccacaaaagtgacttaagtcaggttcccccaaaccagacaccaagacaagaatccatgtgtgtgtgactgaaggaagtgctgggagagccccagctgcagcctggatgtgaactgcaactccaaagtgtgtccagactcaaggcaagggcactaggctttccagacctcctactaagtcattgatccagcactgccctgccaggacataaatccctggcacctcttgctctctgcaaaggagggcaaagcagcttcaggagcccttgggagtcctccaaagagagtctagggtacaggtccgaaagtagaagaacacagaaggcaggccaggggcactgtgagatggtaaaagagatctgaagggatccaggtaagttattgaaagtattctttctgtgctaaccccagtcctcaatccttgccagccagccccgtcttccctcttaggtaccctgagcaggctctattttatgcccttccatacctacggtggaaaccaatagggtttttttttttttcagacagagtctcactctattgctcaggctggagtgcagtggcacgatctcagctccctgcaacctccacctcccgggttcaagtgattctcctgcattagcctctcaaatagctgggactataggcatgtgccaccacacctcgcttttttttttttttttaattttttattagagatgggggtttcaccgtgttggccaggctggtctcgaactcctgacctcaagtgatccactcgcctcggcctcccaaagcgctgggatgacaggcgtgagccattgcaccaagacccgataggtctaaggggtctcatttgagtcattgtatataaatttttttttcaatgttttttgtctaaaaaactttagacagggaatgcactctccaattaccttcaactgctacctctccttattttattatacctagatacatcttgccttaacatttcaataatttaaccagaatatgttctgttaaaaatcttttcattggcgggccatcagactgggtgactcctgtggtttcattttcactcattttactgtttaccagtaaacagtagaaaactagagacttcaccaatcagaaactgtcaactaacctctaactagggacttttcactctaaccaaccaaatagcttttctttgtctcactcctgcgaacattttataaaagtttctctcctgccctctcctttcctcagcagagcattgagccacctgtagtctggtgctgcctggctcatgaattgctatctgttctaataaactttaaaaaatgttatacctaaaaaattatcttttaacaattccagtgttgacagtactggattggactctcctagactctggtctttcttgatcttcagatcaaatttttaacgtcatatttctttttttttttttttgagatggagtctcactctcgcccaggccggggtgcggtggcactatctcggctcactgcaagctccgcttcctgggttcacgccattctcctgcctcagcctcctgagtagctgggactacaggcacctgccattgtgcctggctaactttttgtatttttagtagagacagggtttcaccgtgttagccaggatggtctcgatctcctgacctcgtgatccgcccgcctcggcttcccaaagtgctgggattacaggcatgagcaaccgtgcccggccctaacgtcatatttctatctccatataagccaaaatggcttgttcaaaagccataactctcataacttttctactctttgttctgtattggaaggagtcagtgttcaccaacactcctttagtgtgacctctctactttttggttttcatattcatctacttgttcactggccatgaaaccgaaactatcaggatagctcagttattgcatttctcaagctcttttatgtttgatattacctttatattcatgttgcctttatgatcaagtgaaatactagccaggatatttggagcaaactctttcccttcaatactttgaagatacacttctattacttcaccagtggatatttttgtgtaacattctcttgctgtcctgatgttttctctttcatgaaatattttctttctctgccagaggcttgagtagttgtctttaattttgacttttaataatttaacaaaaatatattccagtggcaaacatgttgtatcgaactttcccagaattttctcttttgttttttagcttcaatttcttcatcatttcaggaaaatatttatctttacatacatttttcttaacttttaaatccaggggtacatgtacaggttcgttatataggtaaacttgtgtcatgggggtttgttgtacagattttatcacccaggtattaagcctactacccgttagtaatttttcctgatcctctccctcctcccaccctccaacctgtgaaaggccccagtgtgtgctgtttgcttctttgtattaattaattctcatgatttagctcccacttataagtaggaacatgcattatttcatttcctgctcctatgttagtttgctaaggataatagcttcccgctccatccatgtttccatgaaagacatgatcttgttctttttagtggctgcatagtattccatagtgtataagtaccacattttctttatccagtctgtcactgatgggcatttaggttgattctgtgtctttgctattgtgaagacatgatcttgttctttttcgtggctgcatagtattccatggtgtataagtgccacattttctttatccaatctgtcattgatgggtattcaggttgattctgtctttgctattgtgaataatgccatacatttttctattgcactttttgcattctccacttcggaagcaccaattgtctttgcattggcttgtccttgactgcgttctattttattctatcttaattgctttatcatttcattagcctttagtaggaatatcaagcttttctgccacataagcaatgtgatacgatattgtatctatatggttcctttctgttcatcattatgtattctgttgattaattagttccatttctgtccttaattagtattctaaggtatgaaatctttcttttcataaaactattattttatcactttatttttagctgttttttattgagtttatttcacatggtccatagccccagatacctgtacaattttttttttcagtttatttttcttcttgaattggttgtggtttttttgtatataacttttgcatgttatgtcttttcttctaatcccaatctcacagtattttgattttgttagttctcatcattttcatgtatgtatagctctgtttccaccttttatttgctgcttgaatctggtgtggctggtgagatgtccagctggggttggtgtagacttgtcaatagaggaaaatgacgagacgagtctcaatcattttaggagatttatttgccaaagttaaggatgtgggcctgggagacaggtctatgcctttctctgaagatgattttaaggactgcaaatttaaaggggaaaggatgggatatcgagaagcaccgttttcatgtaagagctgggtagggaaaatagtgattcatggcctttggctcagtgaatgtgctttttttgcataagatgacataaacaaaaggggcagaggaaaaatgcaaggactctgcattttacataacatacctggtggctcagatgctactcttttagctgtggtttcagccagttggttaccctgactttctgtggtgtctaattttgagtgacctgggatttttataattgccaaacgttttggttttagagtagcttctaacagcgctgatacttgctgcccattttctatgggttgccctgagtaggttaaatatcctctctctttccatagcatcccaaagttatgagcaaccccaaaagcttagcggctgtcagtgtaaatgtttgcagccttgtcttttgccacttgacaagctcgagtcggggcaatcaatttggctgcttgaaccaatctggcatggggaagaggactggcttcagttacctctagtaaggaaaccacagcatatcctgctctaaaatgtccattttctcatcttcaataagacccatctgtataccattctatctcagcattatccagtggcatcgcttataggtctgtcctgggggtgagaagttggtcagtcatcagaacacagtcatgaggggtcttgttggaagggcctggcaagagagtggctggattaagatgatagagcaggaaatagtaatattgggagaagataaaag

SEQ ID NO: 96371 - DNA, 19045 bp, Homo sapiens
atgagccaccatgcccagccagaggccagtcttatagatggctacaggatggaagaagggtatcttgccccaaatcagactgtacataaagcattattgtgccaagccacgaaattccaggagttctgttgttacagccagtgttaattactctgtgacagctagtgttaatacagggagggctcacggaaataatggatacaaggccctctgagtgcggtgggggctgttattcttggctgttattccccaccaagacaggattcctcggttcatttcttaagcgaaacttcaaaagcagaagcaggctgggagtggtggctcacgtctgtaatcccaccactttgggaggccgaggcaggagaatctcttgagcccatgagttcaagaccagcctggacaacataaggacaacctgtctctataacaaatattaacaatacaaaattaaaaaaaaatagaaattaaaaaaaagcagaagcaggcaggtggggtgaggtggaagcttcatccatagggaagtcctgaggaaggcctgcctcccccggttccaggattgctctgtgcagctctagctctcccttaaccctcctccctattctgagttttcttctcttcccacttctccattttgcccccacatcttgactttcacacaattcacagacaaatccttagacaattaatagaatgattaagactgcaagagatttaagacttagagaccatcttgtcccacctcctggttcttacagaagaggagaatggggcctgcagcgggtgtgagcagcccagagggtggggctggattatcccgaaggtaaggggagaatctggggctgcaagggcagacagagaatcaacatcaggaaggaagctctttttatttcagcatatatgttttgtgccgtttataaaaataaagttttgaggccaggtgcggtggctcacacctgtaatcccagcactttgggaggctgaagcaggaccatcacttgaggccaggagttagagaccagcctgggcgacatggggagacccccgtctctacagaaatttttaaaattatcccggcgtggtggcgcacacctgtagtcccagctactcgggaggctgaggcaggaggatcacttgaacctgggaggcggagatggcagtgagccgagatcacgccactgcactgggcgacagtgcgagactccgtctgtaaaataaataaatacaataaaatagagttttatcttacaataaaaatagagttttatcttacagtttcaagcttctacttggaagtaacacgtatggaggctcccagggcccctacagtctggaatcccgcccgtgcgagcctgagcgcctttcctccctccttcccttccgcaggcgtcctcgccctccacgtccctcctccgccggggtggcctggggcgccgggtcacgtggccggggaagaggttttatcccgcggcccctcggaaccccgccgctgctctgccgcccaggcccatggccgcagccctggcgctcgtggcgggggtcctgtcgggggcggtgctgcccctctggagcgcgcttccgcaatataaaaaggtgagccggggagcgcgcccagccggccgcgaccgcaggagagggtggccccgccgccggggcactggagcccgaaggcgccgggcagcctgaaagggagaggtgggtccggaaccacacccaggcgggtagcctggggcatcctcagacggacttcaaaagccgcttcactttcccctggtggcctcagaggggagagaaattggcctatgaccagcaccctcgctccctccacctcccccgcccgtgccccttccgatggcctcagtcctgggctcgcttccctccccaaactgctcacaggcaaacccaccctgcatgctctggtttctcctcctcttcttccacctcctctcactgtctagtgattcttccaggcacgagggctctccccttttctcctctttctctccctctttttcgagcccgcagccccttcattctcatcccccaaccctgccccgcaaaatgggacttaagagtacacaccccatgggactcatggaggtgaggggggtccaggaaaggagaggccgagggaaaagtgctaatccccctctcctcctctctgctgccctgggtcctgctgaggggccggggtggggctgggggggggaaccagccccccaaggggtgacaacctcatgacttctcctggatccctgggctctttggcaatggtgggaaccctcccctacccgcccacacgactcagggattgctcccagcctggcagacattctgcctgtccccacagaaaatcacagacaggtgcttccaccactctgagtgctacagtggctgctgcctcatggacttggactccggtggagccttctgtgcccccagggccagaataaccatgatctgcttgccccaggtgaggccctagtatggggcaacttctggcaagtagagaagcgggcagggaggttaaaaaaaaaacacctggccccacctgttttttcacctctgtctggagtgcccttcttcttctccacttggcaaactcctactcatggtgcaaaacaactccagccacctcctctgagaaggcttccctccttggagctcctgtaccctggggtcagaccctcagcagaccatgtatctccctaactggccatgtcttttctctgcctctcccagtggttggaactcttcaagggcagggattgcatcatattcatctatgaagcacctacccccagcttagtatctgcacatagtaggtgctcaataaatgcttattgttgtttgtttgtttgtttcgagatggagtctcgctctgtcacccaggctagagtgcaatggcatgatctcggctcactgcaacctctgcctcctgggttcaagcgattcttgggcctcagcctcccgagtagctgggattacaggggtgcaccgctatgcctggctaattttcgtatctttggtagagatggggttttgccatgttggccaagccggtcttgaactcctgacctcaggtgatccacctggctcggcctcccaaggtgctgggattataggcatgagccaccgtgcccggccaataaatgcttgttgaatgaatgaatatctcttctctcacaccactgaggcagggtaagtaggaaatgaccttccccttactagtccccatctccctgccacagtgacatgatttcttgagaggagcatggcactgcagtggcaggaccacagctttgcagttggacctgagtttaaatcctgacttttccacaccctatctttgtgacttcaagcaggtcatcatggctctctgagccttagtttcctcatctacaaggagaggctaaagtacctaccccaccaggctgttgggaagattatgtggtcctggcaaggagagtgtgcagtccagcatggttgtcactcgcttttaggaatgcagggagcagaatgctcagtacgccctgttcctgcccacctggccctgggcccaaacctttctaggatggatggacccagcctctatgtccctgtgtggggagttgccaatgccctaaggaagcagcagggcccctaccatggcctgaccctatagctgaagtggctagagggtttttattttttttattttttgagacagagttttgctcttgttgcccaggctggagtgcaatggcgtgatcttggcccactgcaacctccacctcctgggttcaagcaattcctctgcctcagcctctggagtagctgggattacaggcatgtgctaatttttatattattagtccatgaccatgttggccaggctagtctcaaactcctgacctcaggtgatccacccgcctcggccttccaaagcgctgggattacaggggtgagccaccgcgcatggcctaaagggtctttttattatcaccacttgatctgctctatctcatttagtcctcacaacaaccctatgaggggggttactattactgtccccatttgacagatgaggaaaccgagctggagaggttcattgacttgctgaaggtcacgcagttataagctgtagagacagcccaggtctgtcttactccaggcctggtactcttggttctggtccccaagaagtttaagtccccatccttcctgcatcctggtgactcccgattctcatacccactccctgcagaccaagggagctaccaacatcatctgcccttgccggatgggcttgacgtgcatatccaaggacttgatgtgttcccgccggtgccatatgatttagaggaagatgcaggctggtcactgctcccttggggccataggccctggttgccaccaacttgctccaaatccagctcctgagacattaaagtcacttcctgtccttggcctctgtctgtactttctgggcgaggggacctggtggagattgtaccagtccagggggcaggcaaaaggggagactggaggcatgaatgagcttctaatgggatttggccctgtccggaggtcagggtagaactgcaggaagggaatggcacagggagggtgtggtggagcaggggctgggtctgggaaagggctgattctctggttggagggctgtgtgggagagacgggattgaggaatgtacctggagagtgtatgttggggtgcctatggaggggtgtgtggtagggagagactaggtggaggtatctgaatgttttgcggggcgggttgtggggcacaaaagggtagagatcattagagagttggtgagaatgtgcaaagtataaatgcagaaatgcctgtggtgggaaagggacctggtgcatggatgcctccgctctctcaggtattgtcggttcactgcatggacaaagaaactgaggcccagagaagcgacatgacttgccctaggtcatatcattggggtagcagtgaggcctctttctgctgcaagtatcttaaaaaccaactcaaattggtctaggtgaggaggggatttactggtgatgggaaatgaaagtccagaggtcaggcaacccttaggtagggccagagccagcagctctcaggctgaattccttcccagtagtcacaaacattccaggtgtcacctaataacaggtaggatttattgagcacttcctatgtgccagacactgtgcaaagtgctttctttttcatttaattaaaaaatttaagacagcacccaggctggagtgcagtggctcgatcgcagcgtactgcagcctcaaccccctgggctcaaaagatcctcccacgtcagcctcccaagtaactgggactacaggtgtgtgacaccatgcccggccaattttttttctttttctttttctttttttttttttaatagagacagggcctcactgtattgccctggctggtctcaaactcctgggctcaagtgatcctcctgcctcagcctcccaaagtgctgggattacaagcatgagccactgcgcctggcccaaagtgctttcttaactgtattgactcatctttttgtcacaacagggctatagtaggtgttataattatccctattttacaaacagggtatcgaggctcctaaagtaagggttggaactgagacttgaacccagacaatcctgccccagaggccaggctcttaaccacaaatccaccatgtacatcaatactgtgcctttcagagaaagaaaacatctctgttccacaattttcagcaaacatcctaagatcggttctgattggattggcttagtctgcctgaactaattattgtggtggaatttgctgattggcctagcctgagtattgtgcaggatgggaaaattctgacggggttgggtgctggttttacatggtgttcccacagctgggaggacacccacatggtcggcgtgcaggatatttcgctggaccctagaaaagccaccacgacctgtgggccatgatgctaccccaatggctgctgctgctgttccttctcttctyctttctcttcctcctcaccaggggctcactttctccaacaaaatacaaccttttggtaagaaagctggagagtgcagtcacctccccctccactgtcctaaggcctgtactatttggggaggtgagcrggcatgggggctagtgtgggagaaggccagaagtgggggcagcagggagtgttgggtggaagatgtctcggaggaaagagagaacaacctggtcctggaagctgtgccagggcagtgccaggtgctgctrccacagaggtgaatgtgagagagcccccctgcccatgcgcacatgtggtaagggagacagatattcactcatgcaacacatttttattgagcacctactatatgtaaattatttttctacatttagtgatagggctgtgagcaagaaagataaaaatccttgcccttgtagagctgtcactctagtgtgtgaggcaaagaagtaaaacattacaatagatgctattaataatagcatctatctcaggtgataagcaaggaaagggaaaataagaatcgagctgtgggagtggtggtgtgagaagggtttgcaggtgttttttttttttttctttttctttttcttttttttgggacagagtcttgctttgtcacccaggctggagtgcagtggggcaatctcggctcactgcaaacttagcctcctgagttcaagcgattcccctgcctcagcctcccgagtagctgagattacaggcacccactgccacgcccagctaatttttttttctgtatttttagtagagacagggtttcaccgtattggtcaggctggtcttgaactcctgacctcaagcaatccacccgccttggcctcccamagtgctaggattacaggcgtaagccaccgcacctggccagggtttgcagttttaaatggggtgctcagggaagagtttactaagaatgtgaaattttagcaaagacctaaagggagggaagtccttcctaaccggcaaagcagggrggtctctgggagaagagcattcaaggtggagggaacagccagggcaaaggtctgggggyggaaatgtgctggcatattcaaggaatagcaaagaggagtaagagagagtggaaatcatgggagatgagctcagagagataaatggaacacagttacaatattctcatttattcaacagttatgcattcagcacctgcaatgtgtaaggactttagtccaagggggctaagaaatatagcagtgaacrtgagagcagaagatccatgtcccagagctgaggttgctagcgggggaaataaattatttttaaacatataaataagatgatttcagagagtcataagtgttgtgaacaaagtacarccasgtgatggggactgctctgctggtgtccaggaagtcttcagcctgaggcaggagggggaggcagccgggcaaagagtgcaggacagggtgctctgggcagagggccagcaagcgcaaatgccctggggccaggccaggtgtggattcagagccccagtgatggctttgaatccagagaatggcattgtgggaattatcttttaaaaaagactcctctagctattctgggaagaactgacttgaggaggttggggaggtggaagtgagagtggggatggtgagggggtacctgggggaggtcactggcaaggatggaagcagggaggccgggaggcggctatagccaatcctcctttcctgccttattttctttatagcacataatcgtacataataggattatacatatataatataaatattacttattgttatgtatataacatatgtggtaaaaatcacaccttactaggtgctcagatcttgagtttacatggaaatcaatggattcgaacctatgcagaccccctcatcactaccgtcagaacaagatataggacattttcattaccccaaaagcctcactcttactctcctagtcaatagcaccaaaggcaactgtctcctgacttccattattatagattagttttgaactttgtatgatgaaatcacacagtatgtacttttaaaaaaaaatttgggccaggcgcagtggctcacgcctgtaatcctaacactttggaaggccgaggcaagtggatcacctgacgtcaagagttcgagaacagcctgaccaacatggtgaaagcccatctctactaaaaatacaaaattagctgggtgtggtggcacatgcctataatcccagctacttgggaggctgaggcaggagaattgcttgaacccgggaggcagaggttgaactaagccaagaaagtgccattgcactccagcctgggcagtagagtgagactttgtctcaaaaaaaaaarggggggctgggcgcggtggctcatgcctgtaatcccagcattttgggaggccgaggcaggcagatcacgaggtcaggagatcaagaccatcctggctaacacagtgaaaccctgtctctactaaaaatacaaaaaaaattagctgygcgtggtggcgggtgcctgtaatcccagctactcaggaggctgaggcaggagaatggcgtgaacctgggaggcacagcttgcagtgagccgagatcrcrccactgcattccagcctgggcgacggcgaractctatctccaaaaaaaaaaaaaaaaaaaaatctgacytattttgctcaacgttttttctgtgataccgtatcatttcacttatgtatctcttccctgtcttccctctctagagctgtgtgtgtccaatagtgcagttactagtgtgaacccaaaatatctgagacaggtctcagtcaatttagaaagtttattttgccaaggttagggacacacctgtgatacagcctcaggtggctggggtgcaccttgctttttttttgttttttgttttttggggtatagcttgcttttatacacattggggagacataatatgtcartcagtacctgtaagatttacattcgtttgatctggaagggtgggacaacttgaagtggggggcatgacttccattccaggtcataggtagatttaaacaaattctgattggcagttggttgaacagctattatcagcagaagggaatgtctgggttaagataaggggttgwggagagcaaggttttatcatgcagatgaagcctccagtaataggcttcatagaaaatagattgtacatgtttctgatcagacttaaggtctttgttaatgttaatgctggaggggtattaatgaggcatgtccaacccccacttcccgtcatggcctgaaccagtctttcaggttaaattttagagtgccctggccaaggaaggagtcgactgagatggctgtggattggtggtggtgggaggcttcaaattttatttttrgtttacactagccacatatagttacttagatttacattgattaaaattcaacaaaatttaaaattcaagccaggtgtggtggttcatggctgtaatcccaacattttgggaggccaaggtgggaggattgtytgagcccagaggttcgagaccaacctgggcaacaaagcaagactcctgtctcttactggtggaaggtatctgagttattggcaatgaatctgtatgcatttacagcaacctcaattcttgcctcctcagaagaaagaattcaactgaggggcataaagcagaaaaagagactgargcaggtttcagagcaggagtggaagtttattaaaaagctttagagcaggaaagaatggaaagtacacttggaagagtcccaagtgggcaacttgaagggcaagtgcagtgtttaaccttggtcctascccttwacagtcttgcctacctccagtgtcstgtgcctctctcccctgattcttcccttagggtgagctgaccacatgcgcagtgtcctccttacccttgggaagtgagcacatgcagggtgtttaggaagttgtacgcatgcccatctgaggctttgttcccttttcctgtggagtgtgcccctggaaatttttttttttttttttttttttgagacagagtctcgctttgtcacccaggctggagtgcagtggtgcaatctcagctaactgcaagctccacctcccgggttcacgccattctcctgcctcagcctcccragtagctgggactacaggcacccgccaccacgcccagctaattttttgtatttttagtagagacggggtttcaccgtgttagccaggatggtctcgatctcctgacctcgtgatctgcccgcctsggcctcccaaagtgctgggattacaggcgtgagccaccatgcctggccctgtccccggaaattcatactcctccattttttctcttaatgtgcattccccgggctcactcacccaacacctgagattttattggaagccctttttgcttctctctggcccctgctttcaatggacactttaatgttaacagctgtggaccattagaagcctgtctctccctggagcctaactgccaaattatcatttttagagaggcaatgtgataactgttgaaccatcacctgacattcctggtgggtgggggagagccctctcctaccccactcatgcctgtctaactacctgtaacatckctacaaaaaataaaaaaattagctgggcatggtggtgtgtgcctgtggtcccagctacacgggaggctgagccaggaggattgcttgaacctagaggttgaggctacagtgagctataattgcaccactgcactccagcctgggtgacagagtgagactttgtcaaaaaaaaaaaaaaaaaaaaggaaaggaaagaaagagggytgggcgcggtggctcatgcctgtaatcctagcactttgggaggccgaggcgggtggatcacctgaggtcagaagttcgagaccagcctggccagcatggcgaaaccccgtctctactaaaaatacaaaaattagccaggcatggtggcgcacggctgtaatcgcagctactcgggagaattgcttgaacccaggaggtggatgttgcagtgagccgaaatcacgccactgcataccagcctgcgcgatggaagcaagactccatctcaaaaaaaagaagaaaagaaaatttaaattcagctcctcagttgcactaccacatttcaagtgctcagtagtggctagtggctattggactgggcagaaaaagcacattttcgtcactgcagaagctctgttggacagtgctgctctggaatgtcagctgcaggtggacagggatttctgtttttgttgttcccagctgtattcccagtgcctggaacagtgcctggcacacagtaggtgctcagtatttgcctgttgaatgactattgaaattgtcagagatgatgggtggctgtgatcaataatgttaattactgtcctaagccccagtgctgggtggaggtcattgatgtgtgtagggggaggggcggtgggaatgcatgtaggtgaccatcaggcacaggtgaaagggtgagtatgagttttggggcgagaaggctctgcagcagaatgaagtgcaagagagagacaggaaagtctagaccactctggtgtgtatgagaagcagcctatgttgaggrcaccaagagtaaaccttttaaaaactgttcagtcccctccaggcatccaccgtctgcacagacttaccccggcccccacgtagagaccaccctgcctggcaggagccagaggtgatggtgggagcagagtctggggaggagccccgtagggagaaagccccaggcggggcggcgagggcggaaggcgggcggtggagcctggcggtgccgtgtccctccctgcaggagctcaaggagtcttgcatccggaaccaggactgcgagactggctgctgccaacgtgctccagacaattgcgagtcgcactgcgcggagaaggggtccgagggcagtctgtgtcaaacgcaggtgggtatcgccgcccgsggggagccagaggggatccaggggaagtgggagccagggcgggcccagattcctggggaggaaagaagggtaggtgggcggaaatgccctggagcctggaattcccccgtgggactgcacctccaagccttctgggggagcctgtggacggaaccaatatggtagcccaccctagggttttggaatcctggattggggcgggaaggcgatgtttcactttctaatgtgggttcacattctccaggagtcttctcagcaaattccgaaagtagtacagtaaatgggcacagctaggtccagcctctgccccagagccccgtcttcatccagctcaggagttctgctgtggccccgggtgttcctggtggaggatgggcagaggcagcctctgagctgggtgtgtaggggagggagttgatttgcccatggaaggatttaaagacaagacatagaggtcctgcgatggtgtgtccatggacttaggacaggcagatgggtcagtgacaggcagggttacaaggtctggagctgggaggacactgaacaatccaggagccagcctggagaaggcagccagaggtgccactctgagcagctggcaagctatcatttatccctggatcctggctgtgggcaagcacatgggccctggagctgggctgggctgggcttaggggctcagggaagagctgccgccaaggtcgaggtcaaagtcctgtctttcccaggtgttctttggccaatatagagcgtgtccctgcctgcggaacctgacttgtatatattcaaagaatgagaaatggcttagcatcgcctatggccgttgtcagaaaattggaaggcagaagttggctaagaaaatgttcttctagtgctccctccttcttgctgcctcctcctcctccacctgctctcctccctacccagagctctgtgttcaccctgttccccagagcctccaccatgagtggagggaagtggggagtgattgaaataaagagctttttcaatgtttgctgcccacagagttggggcctgggtgggctgggctggggtgggcatggtacaggtttctggggggtggggaggtgatatgagggaggaagcaggaagggacactgttggacttggggtctttccccagttggggcatgaatgaaagtcccccagaagagaccaaagctcccttcccaccccaacccctttctgccttcagcccactctgtaatctaccccccggaagcccagtttacacctgatattccagttccacgaccttaaatttcagaaatgtgaaagaaggtacacaaaatatccatgtgtataaagaattgaggatgtttattgagcacttactagatgttaggggccgctctagctgccttatgcacatgatctcatttaatcctgcaacaaacctgtggggtctctcctgttatcacctctgttttacaggtagggaaacgggttgagcaacttgttcaaggtcacacagttggaaagtgctgaatctgaatcttctgggaggcaagagaaaagagggacaagaaaagaaggaaggaaggaaggaaggagagcctaggaaagagtgagaaagaaagactggagcagcgactgtggtgtggggttggagagagaatgagtcaagtggagttttaggaagtctcagtgtgtggtgaggcttttggagttagatgctagctcgcttgtctgtgagtagtgcctgttatattcaggttacattttggagttaattatttcagattttggacctaaatttccacattcagccaccagaactgagccaaacatgccctccaggatgttgggcttaggatgcaagggctggggagtttggaggtaaactatggttgtacttagaacgcccccttgtaagtcatagcaaaacgatgtgaaccataccttggtagaatatgctgtcctgtactaaatgtatcagacagataaccagacttccattgtgttatgtgagctctccccattcagagaaaacctatgaaatgaccgtggaaggagaggtggcaggctggaaacccaatgatacccaatgtctaagaagttcccaaggatacccaatgtcaagaagttagaaggggaaggggagaatacagagcccagaaataaacccaagcctgtacagccaattaagtttcaacaagggcaccaagaagacaccttggggaaaggatagtcttttcaataaatggtgttgggaaaactgaatattcacatgccaaagaatggaattggacccttatagcacacacaaaaataaactcaaaatggattaaagacctaaatataagacccaaaactgtaaaactcctagaagaaaatataggggaactattacacgacattggtcttgacaatgattttttggataagacaccaacagcacaggcaacaatagcaaaaataaacaaatgggactacatgctgaaaagctctggaccgagcacggtggctcatgcctgtaatcccagcactgtgggaggccgagttgggtggatcatctgaggtcaggagttcgagaccagcctggccatcatggtgaaaccccatctgtactaaaaatacaaaaattagctgggtgtggtggtgcatgcctgcagtcccagctactcagggggctgaggtgggagaatcacttgaacctgggaggtggaggttgcagtgagccgagatcataccactgcactccagcctgggcaagagagcaagaccctgtctcaaaaaaaaaaattaatttgaggaaattttatggtttggttttgttttgttggagacagggtctcactctgtcacccaggctagagtgcagtggctccatctcagctcactgcagcctcatccttctgggctcaagtgattttcccatctcagcctcctgagtaactgggaccacaggtgtgcgctaccacacctaactaatttttaagatttttgtagagatggggagggggagatctcaccatgttgcccaggctggtctcaaactcctggcctcaagcaatcctgcctcagcctctcaaaatgctgggattacaggcatgagccactgtgcccggctgaaatttcacttttttccaatattggatattttcatccaggaatataaaatgctttaaaacaaagttgttaatttttttaataaacgtttttagcctaataaggaaaaaaaagaaacaaaaaagaaagggagttggggaagatacgttgctgacatgactaaactggttccaagtgttgggggaggaaaacttttcctctatcctcttaggttcagtacttgaaggcctgagaattaaaccgataaaagagaaatgaccgatttttattcagaatgtagggaagttcatggaagagtgtgactctagaaggaagttagaatttgcgggttatgtaccatctcaatagaagaaggggaggaggagaaaggacacttatagaaaagtaatttttaggaaagatgaatgggcccttaggagaaaagatgggagctattatagtttcgtgacctgactgtttaggtgtggtgccaactattctcccctccagcaataagtcaattttccctggttttgagaaactcctgggagggggatttatgacaatggagctcttttgcagggctctgcatttaggcagacaaaggagttcagaaaagagcctattctcatccagcctgggcagcattgcgaaaccctgtgtctgaaaacaaacaacaacagcaacatagccggtggtggcacgcacgtgtagtcctagctacttaggaggctgaggcaggaggatcacttgagcaccaggaggttgaggctgcagtgagccatggtcgcaccactgcattccagcctgggtgacagagcaagactctgtctcaaaaaaaaaaaaaaagaaagaaagaaaagaaaaaggcccattttcaaatgccttctgctcagaataatttttatgcttcagtggcattctctagaccccttcacaagccatggggattccgctgccctatgggaaaagtggtcattggtagaggctgccgttgtcagaatccagagagatttgtagggaataaagtacagatgctccttgacttacgatggggctacatcctgataaacacattgtttaagttgaaaatatcgtaagttgaaaatacgtttaataggccgggcacgggggctcacgcctgtaatcctagcactttgggaggctgaggcaggcggatcacaaggtcaggagttcgagaccagcctgaccaacatggtgaaaccccgtctctactaaaaatacaaaaattagctgggcgtggagggcacgcctgtaatcccagctactcgggaggctgaggcaggagaatcacttgaacccgggaggcggaggttgcagcgagccgagatcgtgccattgcattccggcctgggtgacagagttagactctgtctccaaaaaaaaaaaaagaaaaagaaaaagaaaatacatttaatgggcaggtgtggtggcttgtgcctgtaatcccagcactttaggaggttgaggtgggcggattgcttgagcctaggagtttaagaccagtgtgggcatcatggtgaaaccccatctccactaaaaatataaaaattaactccgggcatggaggctcacacctataatcctagcactttcggaggcctaggtgggcagattgcctgagctcaggagttcgcaaccagcctgggcaacatggtgaaaccccatctctactaaaaatacaaataaataaataaataaataaattagctggacgtggtggcatgtgcctgtagtcccagctactcgggaggctgattcaggagaattgcttgaacctgggaggcagaggctgcagtgagccgagatcgcactattgcactccactctgggcaacagagacagactccatcttccccccgccgcaaaaataaataaataaataaataaataaataaataaattagccaggcatggtggcacacgcctatagttctagcacttggggaactgaggtgggaggatcacttgagcccaggatgtcaaggctgtagtgagccatgatcatgccactgcattccagcctgggtcacagagtgagaccctgtctcaaaaaaaaaaaaaagtatttaatacacctaacctactgaatatcatagcttagcttagcctaccttaaatgtgctcaatcagaatgcttacattagctgggaaaaataacacaaagcctattttagaataaagtgtcgaatatatctcatgtaatttattgatgttctactgaatgcatattgcttttgcaccatcataaagttgaaaaattgtcagtcaaaccattgtaagtggggaccatctggttccttgagctgtggttagactgtgcctctgctgtgtaggcgtgtgatgctgaaaagcagcagaaattgagagtctacaggagcactggccgttggaaataaaatggaagctacataatggttggggtcttggtcacttgcttctgcagagcccaaagcccaactccctactcacttttgaagaccagggacattttccttatgccccccacagtccaaaacacggtgccaggcacactgtggtcattcagtgaacacatgaaggggacatgaatgcagatctccaggaccgaatgtggcaccaagaagcgtgactcagccctgctcagggcctgagacccctcctgggttaaggtattgaaagctcctcttgttgagcacataattcatatgtggcagacaccattacctggtttcctaatagccattgcccccttccctgccaactgaaacccaatattgtttgggcatcaatgaacctggccccaggagaaggatcttattccctttgctttcccagcgtcccttgcagctagaagtagtcagataacctagttctagccactgagatatgaagagaagtcggccttgaggatttgaggaaagataagaagagggtatggtccaggtgccatggttcatgcctgtaatcccagcactttgggaggccgaggcaggtggatcacctgaggtaaggaattcaagatcagcctggccaacatggtgaaaccctgtctctactaaaaatgcaaaaaatcagccaggcgtggtggcaggcgcctgtagtcccagctacttgggaggctgaagcaggagaatcgcatgaacccaggaggcagaagttgcagggagccgagatcgtgccactgcactctggcttgggcaacaagagcaaaactctgtctcaaaaaaaaaaaaaaaaagggtatgcaagaagaaactctctgctccttctcccgccttcccagctgccagctactccatgcttcctgccttcgaatacggtgagaacgtgaagtcatgagctgctgctaaggcatgtggcaaccttgaagagaaggtcaagagctaccagccaccaaaagaatgccagcacttcctgtgtctttgctttggattcatgagaaatatacgttcctatttgcttcagccataattacttgggtttttctgctactcacagttgaatgcaatcctaactcataagcctgtggttacaggaggattcattgatcacagaactgcaagatcctggggctgggacgacatcgaagtttcattcagttcactgtccctcactctctgtgggaatctcctctctagcatctccaccgaggggtcagtgagcttccacctgcgtacctggatgatgggcacctcagtactgcctaaggtaactcatgtttgatggctccaggggatatacaatttttatattaaggcaaaattaaattccttgcagtttccacccatttttcttaatgcgaataattgggaaagaaaaaggaatcataaggccgggcacggtggctcatacctgtaatcccagcactttgggaggctgaggtggtggatcacctggggtcaggagtttgagaccagcctggccaacacgatgaaacccc

SEQ ID NO: 96372 - DNA, 21452 bp, Homo sapiens
cccaatctgtccacaagagggcaggcactctttgctgctttggggttgtacagggggctgtggttacagaaaacagcaagaaaaaggaagacacacaaaatatgagcaatacaaaacagcccagaagagtgggagaaggtatcctcccaccctgaagttgtgcttcctccaggatcagcataatagaggagactgttcctttgaaatcgggattagtggattctgtttgtgagaaataagacccatgtttagggaaggctgtaattgtaataaccccaaaggctggaagaggtgaaccaggcatcaggaagctgatgccctatccaggagcagccaaggaagttcattgatgctgacagccacaggggttactgagcacaagaccggagacttggccctctgagctgttccctctcccactgaataggggccaggtagggtgtcgagagcatctcagcccccaagagcagtgcccccacaagcagctctaagatccaggtcttgttggagggcatgaagggccaggaagtgaaaagcagaagtagtggtcactgtcacagccaggtaactcaggacttgagaaaatggcttcctgagtagaaattccccagaaagacaggctgagatgaggcagggctgctcaccttctcaatgccatggagatgatgagggaagaaccagggcatcttggagtttgagggaatttacttttgtccataagacattacgagcacctggcctgagcttggttctgggttggatactgtgaacacagagcttcccaaagcttggactctttccttgagaagcattgtataagatggtaagtactgagctagagataggtatatagaatataggatatgtatatcatatgatgttatattggatgaatataggatatgtatatcatatatgtatgtatatatgatatacatatcctattatacctatatataaaatatatataatataaatatataatatataaaatatatataaaatataaatatatatataggtgtgtgtgtatatatatatgtataaaagaaggacactctgccagctgatgtgctcagggagggcttcctgtacatggtggtgctgaatggggtcttgaaggataagtaagagttgaccaggggcaaacaagtcaggagaacattcccagtgagaaaataataaaagtaaggacatggaagatggaacacttgtgtgcatgtatgtgtgcacatgtgtttgtgtgtgctgctgagattttacctacaaaccttttggagtgtgggagcattgagtacaagtacgcaggggcaggaggtgtgtctggaagggcaggccctgtagcagttgtcttcctagccaggtgaaggactgaggagagtgggtcttattctgagagcagtgagagacattgaaggatgttgtggtctgctcaggctgctataacaaaataccatagaccaggtagcttgtaagcaacaggtttatttttcacagttctggagactgggaagtccaagatcaaggcaccgtgaccctggtgaggacccacttccagggtcatgtcctcacgtggcagaaggagtgaaagctccttttgtaagagcactgatcccattcgtgagggctccgttctcatgacttcatcacctcgcaaaggccctcccttcaaataccaccatgttgggatttggtttcaacatgtgaacttaaggggacacacacattcagtccaaagccacaggttttcagcaggagagcagcatgtccagatgtgtgttgtacacagactattttgactctgtggatctgagacagttggggatgaggcagaaatctcccacactcgagcaatgataaaggtcaaggtggcagtgaagcggggagtgtgaagaggtggtaaaacttgcagcactaattgcagcactaagatagaggcgagtcacgcaggcgcaggcgaggcacagcaagaggcgaagaagagtcccggggctgggttatgtgacaaagggatgactgggggaccatttgttaagataaggaaccctggagatagtaataaattggagaaggggctcttggcccctcttggatgatcctgaagttgttggggcaggaccaaaggcaagatccatgccaacgctgctgaccaacccccaaaaccaagctggctttgggtctgtgtctggtgccactgggcaatgtggcctagatggaagggtgaaggggtcccactctcagtgttcttcctgtgttcttcctccttccatctcatctctatctctgggctggtttgtgagctgaaagagttcacacatacctggggtgggcctctgtctcctcgacagagtgggactgaggagcgaggcctgaagcattactggttcacatcctggcccgaccagaagaccccagaccgggcccccccactcctgcacctggtgcgggaggtggaggaggcagcccagcaggaggggccccactgtgcccccatcatcgtccactgcaggtgggtcctcccagccagccactggagcggggcagccccccacccgctgggctgccctgcccctcaccccaccggtcccctcggccctcagtgcagggattgggaggaccggctgcttcattgccaccagcatctgctgccagcagctgcggcaggagggtgtagtggacatcctgaagaccacgtgccagctccgtcaggacaggtcagcccacgggcgggagtggggacacacaagggagctagagccccgagcgggtagagggagagacccacatgtgcatgggcggggggtgaggggcagatggaaaacactggtacggactgatgggcagacaaggagtagcgaggacagctgggtagaggggcaggatccagacagtggggggccagatgaagagggaagaaaagcagagctggtggataaaaggacagaggccgaaagtggtaggacatgtcatctgtgtccctgataggaaggggcagagggtaatggttggcaagggttggtctctccaagacgcacaggggcaaggcctggcaagtgattgctactccatggcttttggggcacctcccacagcccatccctccacgaccctgcccccactgtgcatctctgccgggcaggggcggcatgatccagacatgcgagcagtaccagtttgtgcaccacgtcatgagcctctacgaaaagcagctgtcccaccagtccccagaatgactgcgcttctcctacaaggttctctgggcactgcccagcctgagtctcggccctcacccagggccctgcctcgggtcctgggcctgctccccgcttcctccccttcagtcagctccctctgtcctctgtcagcctggcctgacccctaccctccagcattgctcttcctactgtacatattggggagtggggggcagggtcgggaagggacatgccaggccaggcctggggccccggggcctgacccacaccacgcagaccccgggctccagtttttaacgatggttccatcaatacctgatccagaatgtttccgtgctacactttgtgtcctgctgcaatgtgttctgtctgtccatccatctctgccctctgtaccggacactgtgtctcctcagccaggaaggggtaatgagctccagcccctaagcaaccggacttgcctgcctcggcctcacccgcacttctcccaaaaggcagatgacggggagttaggcatggggagctccagaaggtcaccagagagctttcagctgagggagagttctctaggttggagtgggcatcacagccagggtggcctctgggtgtcagatgctctcaggagggtgcccagcctgtgaggcactggcaaggtagggggcagatggggcatggagaacccagaggatctaggccctgttggggaggggaggggagctcaaggtttgggtggggactcagcccagatctacgtgagacatttttctgtgtcactgtgggaaagccttcccagaagtctcactgcgtgttgctctgcgtgtgttcccatgtccatgcgtgtgttgagagcccatcaggagggcatgcatgactctttggcaacatgtattatcttggagccacgtgtttttattgctgactttaaatatttatcccacggcagacagagacatttggtgtctttttataattcgctcgtggtcattgaatagagcaataaacggagcattttgagcaaaactaacctcctgggtctgtgtgatttgcctctcccctccactgccttccttcctgtacttgggtctttgtgcccctccccagcatgagcacagtgagcttggcccttctgctcactggagccccttgtggagactgggagtatggagcgagtccaaatttgtaaagccaaactgggaacattctgcaggattctcacacagcctcagccctggccctgacacatgctctgggccatggggagcctcaaggacaggtgtggaaggcttccagggaaggcacagtggctggcaggtcaccatttccaacagatgtgccagagaagccaaggctagggtaaggagacattcaggtcacacccaggcccctccctgttggccaaactcttatcccatgttagctccacagatcccaacagcagctgcagcccagtaatttcccttgtaaggcctgggctcagagtagctcctcccaaggggcccagggaatctgcatgtgggctgagatcctgagccatcctggacactcctgctctattcttgtcccctgcccccctgggatggagcaaaagtagccatgatgccactgctggcaggtgggggtcaccccagggcagaaggaggggtccagggcaagggtgctgaccaacaagtccttacaagatgccagaaccttgggtgggatccagggtccaggcatgcggggtgtgctacagatgatgagaaaacaacagggtgggctggacacggtggctcacgcctgtaatcccagcacattgggaggccgaggggtggcagatcatgaggtcaggagttcgagaccagcctgaccaacatggtgaaaccccatctctactaaaaatacaaaaattagccgggcgtagcggtgcacgcctgtaatcccagatactcaggaggctgaggcaggagaatcgcttgaacctgggaggcagaggttgcagtgagccaagatcgtgccactgcatccagtctgggtgacagagactccatctcaaaaaaaagaaaagaaaagaaaacaacaggtggctgaagcagcccagatggaagtccttgagaagaggtggccatactctccagtcaccctcaagcagagacctccccacaacccccggaggatgggccctcctactcttctacccagattagggagattgggctgttgaagtgggaagaggaaggagacctaacatttccctgttcttccccagggtggccttgtaaagatactcaggctgtgtatgaaccacacataggagtgcaacatgaatgggaacccctggatttgtgtagcaacgcagcagatcccagaggccctccccagttcaccgtgtcccagtccctggaaaatacagacctgttgctttgctccctgagccctgctggactatgcatgcacctgtacctgagtgtgtgcctgtgcacacacactaccctgagcccctcagctcagagaggtcctacccagcagcagtgagagccaaaacctgtaccacaagggaacaaaaaaagtacccctggactgccaccctcagcctccttcccgcctggccttcagtgtttcccccagcctggatccagctttgcttcccgcctcccttctccaccgccctccccctccccccacaaccaagcagtgtgccatctagctgagacagctgcagagcctgactaaggaatcgcccccagggggccagacatttaaggaacagatgacactggtagcctcactgttggggcaaaggaagaaggagacgggccaccctacagtccaggcactagctgagcctccaaagccgtggacacagcattcgagtgttgggagggactggtcagtgctgaaggtaaggctcccctcctccctcaggaaggggacaaagctgaccaccttctgagcccagaggggactatagggtagagggcaggaataggaacaggggagtagtctcagaacccaaaggtagaagcagcccaggcagagatatattagggggtggagagagggaatagagtttaacccctaactacctgggttaaagaaggctttggagccctctgggacgccactggactggagtcaaaagctaggagtctagtctgagtgaccttggacaggtcatttctttcagacatcagtttcctcatatacgaaataggactttaaaaactgcaatgctgggccaggcgcggtggctcacgcctgtaatcctagcactttgggaggctgaggtgggcggatcacgaggtcaggtattcgagactagcctggccaacatagtgaaacgccatctgyactaaaaatacaaaaaattagccgggtgtgatggcgggtgcctgtagtcccagctactcgggagcctgaggcaggagaattgcttgaacctgggaggcagaggttgtcgtgggccaagatcgtgccactgcactccagcctkggcaacagagcaagactctgtctcaaaaaaacaaaaacaaaaaaactgcaatgctggccacatgcagtggctcacacctataatcccagcactttgggaggccaaggcaggcggatcaatygaggctaggagtttgagaccagcctggccaacaagatgaaaccctgtctctactgaaaacacaaaaattagctgggcatggtggcacgtgcctgtaaacccagctgctggggaggctgaggcaggagaatggcttgaattcgagaggaggaggttgcaatgagccgagatcacccaaaaaaaaccgcaatgctggttaaataaaacattgagaaaacatggtgctctgaacaggaatgaggaaacgctatcatctggtatggaaaaaatctccaagacacattaaatgaaaaaagaaagggtcagaatagtgtgtataatgggctaccttatgtgcttttttaattaaaaaaaaaaaaggaagatgataagaacacatgagttttcctatttgcatgatggaggtctagaaggagcctagagactggctacctgttgcaatggggaaggttgtaagatagacgcaggagtgggagggagccygtccatatggatttttatattgttttattctttaactatgtgattgaattaccagttcaaagaaaaatgtaagaaaaactaaacctttgcctttaccatgtcgcaaacacaagcagaattgtagtgatgttttgtcatctgttttagcattccaccagtgccggggtccccagggcccaggaataagagacacagcttccttctaaagcccactccagtatggcttagtcaggaagttctttcttaggtctgactgcattccctcctgatgaaacatccagcactgcctccttagtgccatgtagctatcaataggtatcctcaactccctccaggccttacttggttggctgggtaagtctaagccctataacctctccctctgagaccctggaatagtttggagttactcagtgagaggacaggcctattgggtctggtaactaaccaggaaaaggaagctaggaaatgaagaaaagagagctcgactgctctcctggccctctcctgtgtgcttccatctcctcttatgtctgaacacacacataacatctctgaatctccctcctactccctgtcttgtccttcatggcctcatcctcttccccagtctcacaggtgagtgcccacgcctgctgtcaccatgacaaccattcacagccggcagatgctgcaggagcacgtgtccatggagttctccagctccaccacccacgtgcagaccttctcccagacaaccaagatcgtgggaggcaagtggaatgggggcagggaagggatcgggaagggcagctattcttcctccacacccatcccttgggtggccccagttttgccactaatgggcccctctggagcccacaataccaacagcaacccccacccaacgtgtgcttctaatcttggctttgttaaagcttcagccagctggatgttcaacacagatcagatctccaggaaaacagcttagaaaagatcaatcatgtggatgtgtgtgaatgattgataaactcttaattgctgaaggagatcagagccataggtgaacagattctatctccaaaggtagaattycaggcataggggaaattaggaaggtagccaccttatctacatatcagtaatgctgaccctgctccacttaagaaataggagacttggggctaccagtggagaaagaaggtgaacacataaacaagaaggtgaccttaccttccaggcttttagccctctggggccagacttggaaragggcagatccaagggaaagctgagaaatggtctcagagctgaacagagtgttttagtcacgtctctagtggaaagagattaaaagatggccgggggccaagacattggataccccttctcacagtcattgcccctccctcaaagcctcaaagggatagagtccctcaaagtcctccgtgcacagaggtcaaggccagataaacactctataccaaccaacacctcctggccagtgaggcagagcaagtggaacagctgggactcaaggcctatggtctagaccagaagttccaaactcaagtgatttacagcagtgattctctgctgtggccgcacatcagagtcaccttagtgcagggggtgtgaggagggcaaaaatatggcagtacctgagtctcaccccagaccattcaatcaggtatttcttataaagttctccatggattatatatgtgcagccaaagctgtagaccactgaccracagggcccaggcagggaacataaatgtggggaaaagactggggtaaactagagactgtatatcccatctaaaggggcagccactattcacctcccactgactgttgccatatgggaatacaggttcagtgttgagaatccagaaatctgaatttttatgtgaaatctttctctttcagatgtagggctacttttttgtttaaacattgtggaggtcacataaaagacatctgcaggccaggtgtccactgcactctgcctgtttgagacctcttgytagtatttaaaagcaggccatgagagcttcttaacacacttttccccctctgtcagattagtgggataataaaggcacctacttcagtgggatgctgtgaagatggaataaaatcatctctgatatgtgcctagcacagttcctgactcaaggaaagtgttccatgattcagagcaattgttgtgaattgataactcaccagccaagaagattgtctgtagttttatactgcaaaaacagttttttttgttttccaaatataaaattatatttccacattgaagatgtgctttcagataaggatattcccatatatagctccactggagtgggactgtgtcgtgtcctgtccctcactcaagaatcactactcccaaggcaatgaatgctgaacccacagaatggcagggagaaaatctagagcagagctcagccaagctgcagacctcccaggcagaagcaggcctagcccctcttaatgctactgggggaccaggacttccaggagagaagcctaagagaccaagaaaattccaaaagagaagcctcctttaaaaaaaaaaaattaggactcagggctgtggccccataaaggtaatggaccactgaggtgtgggaaaggagttcgcctcccctagtggttgaaacttgccataacacaatggcccatcgactcaccctgctttctccccatgtagctggtcctgctcccacttccctaaatgctctttgttcccatgctccaccgtcctctcaagaaagctctgtcctcccatcgcgagctgggcttctacctggagcccattctgacctctcgcctgcccccacagaggaggtcgtgaggaggaagtcctcgagcatagtggagttcttcagcttagtgacccggagctcaaacatccctgcgggcgacagcgtccctgagttcgtggagaagcctcaaccggtcaccgcgcccgagggtgtgttgctgcctgtggctcaccgggctccagtgcttcgctttctaatcgagtgcccccaccctccgtcctaccccaacgacctccaatgctaaaccctggcagagcctggccgagggttcctcccctgcccggggccaggcccaggtgtctgggaggaggcagagagcmggcagagggtggcagaggctctagcctggtggctaagaggcgaaaacgcgtcctgtgctcatcgcaggggacaaagccgtgttccgagcccgggtgcaggggaacsccaaaccccacatctcctggaagagggagagcggcatccccatcaaggagtccgccaagatattctacgacagcattaacaaggaacacgtgctgaaggtgcgggggccaagcccaagtccagttaccgagaaggccagaggcagggacccccagggcgggccgccagtcttctcaccgatgagagccttaacggcggcccgagagccgggcagtgggaaaagcagctgtcattgcccgagaggcgcggcaggataagagaggccgagtcaggaaccgggatattgccggaatgagcagaggacccaaagtacccccggggcagagcagagcaggggcagagccagaacgtggcggggcgggacgcaatggaagcgaaggggcgtgtccacaaggcgagtgagccaaaaggaacgcgggaccaagacggtgggcgtagccatggagggcgggaccattgtgggtggcgaggtgccggagggactcgccgtagagtaggggtgagggtcaggggctccgggctcttcagctgaaccctccccaaggaccgaccatccttaggtctaaccagcttctggatcactttctgagagctgggcctacccagctgyaacccctggctccaggcccttcgaggaaagggagggatggatcacggggagatctaggcctataattacttatgatcctataatcactcgggtcctgacccgatttcccgttgtgaaaggcaaagagcctccttttttccccacagacagaagtagtctgctcccaaagacccatcatcactggaccctaagcccccyacagcacacacgagctgccccagtccccctgatggccacctcttacacaagctcattcattcagcagacactttctgagagccttggcttctgagagcctagcaggcttctgcaagcaccatgcagacgggcatcaagtcagccttactcaccactgttscttctggggctcagcccagtgtctggtacagaggagtaaattgtattaaatgaagtctcagccagatgatgccagaaactgcagatagagttacaaggcaggggaagccctgccttctgggagctcacagccaagggggagagtccgatggagaagcagacagttttaytgctatggaatcaggctacaaacatgcatactcacactgactgctagctggtacctccaaatcatacaggctgctcaatcctccacacatatacccaacagtcagttcctattgtcccctaaaaaaaaaaaaggcctcctaccttatctgacagaaagtctccctgtggttccttttccttcccccactaatggcsggactttgatccagctggagccackgacttcggatgactctgacaactataagtgcattgcaagcaatgaccatgcagatgccatctataccgtatctctgctggtaacagaaggtgagttggccccttcctcttggcctttcttcttagggaccagactccccctgtctgaacctgtccctctgtctatcctcaggtcaagagaaaatggacttcaaaaagatgctgaagaagaggtgaggctggcaggtccttctgcccaagatattgtctcctcatcmaggccaaagcctctcaaaggcctctcaacaaggccctgagttccaagaatccatggagtagggaggggtttctcaaggttggagaggcattgtgtacaagcttagtcccttcctccttctcctagggcaccccctgctcccaagaagaagcagaagaaggtggcaaatgagaaagagatgctggagattttgtccaaagtgcccaagaaagactttgagaaggtgtgcatggagtatggtttcaccgactttcgggggctgctcaggaagctcaaagagatgaagaagaaagtagaggtggaggtaagtaccctgcagggagcaggggcctgcaggctaggggcagggcttcacccaaagtgctagtgcctgtgtatttctcagcaagaaggtctccccarttctgcacacacatactcagaggcgtactctccactgtgaaagcagcaagggagcacaagtcaccttccttctacttctgtcttcaccactcccaaacatacttgcatggactttggagtcagatagaccgagattcaaatcccagttctaggctgggtgcagtggctcacgcctgtaatcccagcactctgggaggccaaggtgggtggatcacctgaggtcaggagtttgagaccagcctggccaacatgatgaaaccctrtctctactaaaaatacaaaaaaaacaaaaaaaaacaaaaaaaaaaccgctgggtgtggtggcacacacctgtaatcccagctacttgggaggctgaaacaggagaattgcttgaacccaggaggtggaggttgcggtgagccaagatcacgccactgcactccagcctgggtgacagagcaagactccgtctcaaaacaaacaaacaaacaaatcccagttgtactgccttattagctgtgtgaacttgggcatctctctgagcttcagtttcctcatctacaaaatgaaaattatacttccttctttcatttgtttttgtgttgttgctgtcattcattggttcactcaaccaactcattaagcctctacactggaattagggaatctatataatgggcccaggtacatagtgactattccatgaatgatggttttttactcatcccccgtaatgttcctctcctcctaaatctttcagttgatcactggagcactgcacgttgttatctaatgagcctagtcatttctccccacatgcttaagagtttctccaggattgaggacacagtctgggcaggctttgggtaccactgacacttgtcattttattatcataatctctcaggccatccggattctgaagcccctggaagacaaagagaccaaggttgacaccacagtggtctttgactgcataatggaactgaaagaccccaatgtcaagatgatatggatcaaggtgggggatgcctagccagggtccaccttggcaatatctcttcctctctacccccttctctcactgtatataagccatagcctctcttccatcccatcaagaggatgcctcctggtatggttgaaagaggctggaattgggctctactcttaactgtttcacccctttgttgtgtgatgtaagagagtcacattcctctctctatgcctcagtctacccatctttaaattgaaaggctagattagacagtcttgaaggtcactgaagatctgtgcctctaagggaaagcatctaatgaactcatgcatattaagagctcgggcctgtgaggaggcctgtggggaggcaggaatcttggatcccaccaaaccagatgatgaggctatagagatcatagggatctctgtctttagagggttggacatgcaccctccagcttaggctggcgctggggaatggagacctctggaagcttcctcctaaagcccttcatcagctttcctacctgttccatgaggcagggtactgagccactgaggatccagtactccctgggcaagtacgatgtgaagcagatgggcaccaagtacatgctggttattagcaacgtgaacatgaacgatgctggcatctacagcctgtccgtgggcgataagcggatgagtgcagagctcacagtgctgggtatgagtgggggcatgcaagggcacaaggaggacatgtcgggttggaagagaggaatggccagggttgggatccatggggatattgaagagaggactatgggactgtgcaagaaaggactgtgtggggatgggagtcaatggagggaggaagcatcagatgtaagggagaggactatgagataataagtgccttggggctgtgtagcatagtgattaagaacatagactctaggccaggcgtggtggctcatacctgtaatcccagcactttgggaggctgaggcaggagaaccgtttgacaccagaagttcaagaccaacctgggcaatatagtgaaaccccatctctacaaaaataaataaataattggccaggtatggtggcacacacctgtagtccttgctacccagcacgctgaggctgcagtgagccatgatcctgcacttcactttagcctgggtgatgaagcaagaccctgtctcaaaaaataagttaaaaaaaagaacgcagactctggagctaaactactagaggtcaaatcccgctttctgccacttatgagctttgtgatttaggtcaagttatttaacttctctttgattcagtttccccatctacaaaatggggaataatagaatctacctatgtgataattggatgaattagtatggctaggatggtgcctggaacgtatctaaaaccacataagtgcttttaaaattgctgttaccattactggggagaagaccacatgaacatcataggaggggactccaggagagaagggctcgaaaacaaaaccaaaggcagggtgctttcccccagccatgggctacaggaggccagtgacatgtgagtgccctcttcaccattccacccctcaggagggaccagcccaatgactaccactcctactgtttgctgcagatgagccactgaagttcctgggagagatgaagcctgtgaaggtgacagagcgccagacagctgtgtttgagatccgcctctccaagaaagagcccaactttgtgtggaagttcaatgggaaggagctgaagagggatgacaagtatgaaatcacggtgtccgaagatggtctgacgcacacgcttaagattaaggatgccagactcagtgacagcggcgagttctctgctgaggcggggaacctggtacaaaaggcccagctcactattgaccgtgagtggttgggcaagagcctaaggggtgggctttatggcacagcaacctccatgcaggtagtcatcatttatatatccatctatccatccatctcctttttgcaaagccctgtggtaggtactggaaagacagggggatctcctctctgttaacccctagtctagtaggggaggcaggtatgaaaatgaaattagaatagcagttattattccacgagtcaagacacactgggtcttattatcagctgtgagatcatggaccaagaaagtattagtctatgtctctaatgtcatatattacagcacatctgtgtcactcttgactacttacattctgctatcacaactactttgggagttcgcacataatgtaggtacaccaatgagcatgtcacacatctgaaccgcacctggaatctatatcacatggaatcatcattgctgtgatggagggagacacaagggctgtagaagaccaaagaaaaggcatcacctggcaacatcagaaatgatataatgaaatgatgtccgagctttaccaagaactaaaaggagttccgctttcaaagaatgagggagagtagagaacatccccagcagaggtaatactgctttcaaagaatgagggagagtagagaacatccccagcagaggtaatagcatgtataaatgtccagacattagaaagacaatgcaggtatggttggagctccaagggggcattagagatattgagcactgtaaaagttctcaccccattttacatacgaggaaactgagactcagagaggtaaatgagttgtatacagtcaactagcaagtcagggccagagctgagactctccctgtcgggtacttctgtgagtcacatattacacacaaacacattcagcatcacaagttcttgtgttttctggggacagaaagagggacagggcttttggctctatagctgcagaaaaaagatgtcgtggtttgggagcaggcccaagtgtctgtctgtccacaggcatccccatcaagtttgtgagcaacctcaaaaatgtacgtgtgaaagagaggagtcgcgcatgcctggagtgtgagctgacatccaaggatgtgacactgcgctggaagaaggatgggcagctgctgatgcatggcactaagtacagcatgaaccatgagggcaagcaagcagagctgatcattgaggatgcacagctcagtgatggtggcgagtacactgtggtggccatgcaggatggagaccctactgaatactacagtactgccatcgtcactgtggagggtaacacccgccctatcaatccccactgaccaatcctcctgaccctggcattcccttacagtggacatcaattgcccccctcccactaactccaaccctcccgtagaccatgaccaacttgtgtctccccactctgatcaccctcacctcctaaattctgaccatctctgacctctcatgccctaaacatttatacctcctagacactgatcaccccccatcttccagactctatcccaaatttcctgacttcatccttcactttcagactctaaccatccccagcaaccctgatatcccagacgtcttgatcccgaccatctcctactacctaaccataaaccactttccacagaccctggctaccctcaacccccaatgaccctgtgtatcccacagtctagcgtaaccacaactaaacatcccaactccagtaaccacctgcatcttcaccatctatttccctctccaacccagcatcctaagtccctgctgaccacgctccactaatcaattccccactagccatctcccagttttcctggtcaccatttcccaagccactgacctttccccatccccctcccatgtgttgctccagttccccccactgaccaccccctaatcacctattgaccacattggcaagccgcctgctcatcataaattattttgattgacgcagcacccctgaccagtcccatgaccattgctaccagcccttttcccagaagtccctcccaccccaacatcctgagccagtcccttgcccacctttctccccagagcgtctggccacagtgaagagcgggatgtccgacgtgcacgcggccactgggagcccagctgagttgtgtgtagtgctgaatgacgagaaggtggagggtgtgtggctgaaggatggcaaggaggtctgaagcagaggccagggaagggggtgaaggaggtagacctggcctatgctcacactcaggcccacccctgacccccagatcacggacttgccaggcgtgcagattgtgaagcagggtgcagtgcacaagctcatctttcccagtatgggccctgagcacgagggcaagtacacattccgggccaagggcacggaaagtgaagcctctgtattcatcgcaggtatggatctgtccaaggtaggcaaagctcaaccatgcctggcccacctacaagctcatggcttctcccctgccccatgggctcctccatgccaatgctcaagccttccctgccgccccgccccacagatcctcctaccatcgacccgtcagtactggaggcactggctgcgcacgccatcactgtgaaggtaggccacacggcccacatcaaggtccccttccggggaaaaccactgcccaaagtgacatggtacaaggatggcatggaagtgacggaggaggaacgcgtgtccatggagcgcggggaagaccaggcactgctcaccatctccaactgtgtgcgtgaagacagcggcctcatcctgctcaagctcaagaatgaccacggctcagccacggccactctgcaccttagtgtgctgggtaagggcagggccagtccgggctgggctgagctgagggcacctgctgcccagactcagggcagaaggcaggctgaggaggaggccagagttagagttgaagtttgggctgggaatgggcctagaaggctggctttgcagccagaagcccgcttcctaacttcccagccagttcttggccgagtgaacctccctaagtctcagcttcttacctggaacagggtgattttttttctagtatccatttctagttaatttaaagtgcacagctaagaacacaggacataatatactttcagatgttacttaagtattgttattgacttgaagaggaaaacttgataggaggtaagatggaaatgaggtgaaagagaggtagaatttgccagacacggtggctatagctcacctatagctcacgcctataatcccagcactttgggggtccaaggcgggtggatcacttaaggtcaggagttcgaaaccagcctggccaacatggcgaaacccggtctctactaaaaatacaaaaattagccgagcgtagtggcacatacctgtaattccagctactcgggaggctaaggcacaagaattgcttgaacctgggaggcagaggttgcagtgagccaggatcaggccactgcactccagcctgggcaacagagcaagactctgtcaccaaaaaaaaaaaaaaaaagaaacaacaacaaaaaagaggtgggatttagggatggaggtgaggttgtttggaaagagtagtgagtttgaaagtgaaacagggtgaggtgggaggtcagatagagctggagataaaataaggtgggaaagatggaatggggattgggaatgggatttgggatttgtctgaacatgaggatataagaaaagagaagaggagctggcctgaatgtacttatattcaacacgccacgtacacgccatcaccacctcctctacctgcatttccatcgagctctgggatgggaaagtttgagtttcaattcaattcagcagcaagactgagcacctgctctgtgttctcactgctgtgtacacagagatgaagtatccccagcagttcctcaatccaaaaggggtgaaactggtagacagactgtaattataacgtaaggtaaacagtggtaccagcaagtactggtgttctcaaagctcagaagagggggagaacttgtttggaaggggacagggagatcagctaagggcaggggcccctaaggtctctagtctacccattgctaggcagatgggaaactcacgggggcaaggatcaaactctttgggcaagtcttagaaggagggatggtggacacagggaggggcaaaggatccaaaaagctcaaaatccagctataccctagtctgggcagacctttggtgagtgggaggaggcccttctgatcctttgttccaaagccccattctgaagctgttctctgtccccagaccgtccaaagcctccacagggccgggtggagttcctggagctctcaggtagttgtgtgcacatgaagtggaaggccccaaaggacaatggtggacgacctgtgacacagttcatagtggaacggagggcagttggcaagaagtcctggattaagataggcgaggtggacggcaaagtcaccaacttctccaccaacaaggtggaagagggaaaagcctaccagttccgtatcctggcagtcaattcagaaggtgtgagtgacccactggagacagaagaagtgtttgcaggaaatcccataggtcagtgagatagcctggtgctcagtggggaacccaggggtcagcatggggaccttaagccaggaaggaacactgatctgtggggaattccacaggaacatctctctagctgtctcatgagacagaccgattccagagtaaaaacagaacatcattttggacaggaattgtcaacgttgtccagtcatatcacatgcacaacacactcccatgggtatacccaggacgtgcacaactttggggaactgactccacttctttctccatcccagaagtcatcccagaatccaagtgagcatgatgttgctttagggataaccttgaaaccactctttttctccacagaaaatccttgacaacattggcattttaattataattgcaggctgggcacagtggcgcacacctgtaatcctagcactttgggaggccgaggtgggaggatcacctgaggtcaggagttcaagactagcctggccaacatggtgaaaccctatctctactaaaaatacaaaaattagctgggtgtggtggcgggctcctgtcatcctggctactcgggaggttgaggcaagagaattgcttgaacctgggaggcagaggttgcaatgagccgagatcatgccactgcactccagcctgggcaatagagtgagacttcgtctcaaaaataataatattattattactgcaaatgaattacttgctatacctctcccaactgatctccaaatctccatgtcaggacagtagattgagaatgatgggattgggggtcacaccgtaggaaagtttaagtcactgattctcaatgtcggctatacattagaatcacttggtttctttaataatgctaataatacttgccattcacaccaggcatagaatatgggtaggcaggacccagacactagttgttgtcagtggttttttttttgttttgttttcatttttgtttttacttcccacttgatgttaatgtgcaagcaaagttaagaatcatttgtgccaggcactgtggctcatgcctgtaatctcagcacttcggaaggccgagacaggaggatcacttgagcccaagaattcaagatcatcctgggcaacagagtgagaccttgtctctaaaaaaggaaaaagaaaaaagaatcactggtttgagtttatttaagcaggcgaggcagaagtcagcatgaggtgggcaactatctacatgctccccctcctaacctttgcactctctctttcccccacagagcctcctggttttgcctcccagcctcaagtgactgatgtgactaaagaagccgtgaccatcacgtggaatgcccctacccaggatgggggagccccagtgctcggctacattgtagaacgaaggaagaaaggca

SEQ ID NO: 96373 - DNA, 46579 bp, Homo sapiens
cttggtgccataaggtttggggccatgcacaatggctgatgcctgtagtcccaacactttgggaggcggaggcaggaggatcacttgagcccaggagttcaagactggcctgggcgcggtggctcacgccagcactttgggaggccacggcgggtggattacttgaggtcaagagtttgagaccagcctggccaacatggtgaaactccgtcttttctaaaaatataaaactagctggatgtggtggtccatgcctgtaatcccagctacttgggaggctgaggcagggagaattacttgaaccaggaggtggaaggtgcagtgagccaagatcacaccagtgcactccagcctgggcaacaacagcgagactccatctcaaaaaaaagaaaagaaaaaaagaccagcctgggcaatggagagacgccatctctatttaaaaaaaaaaaaaaagtatgggagtcctcagtgatcatacctatagattccaaaccccttctccatcatttggattgccctgggaagcacaagagaagaccaccatccaaacagagatcagttcttgaacctgtgttgatgtttattctgccactgagaggtacaccagggtttccaaagacagtaggaatatttctgttctctgtgtatattgaacagctgtgcacctaagcagggtgcctgagtaggaagttaatttcattttaagggctggagcttgttacaagtagcggagccaagcctttgcacatccattttcttcagaacccaaggaaaactagcccatcttgacagctctacttttgcgcctgttagtgctgccctgatccctgacaggaagagctggctaattttagataatctgtgccctgacactgaagtgtctaatcataggggctatagaaacaactacattaacaagtcgtccagcctcatgcccaatgtcacaatttttgaacagatggcctccttccttcctgtttactgacatgcaaggctctgagaaaaataattcaatccaatttacagcaaacaccacatttcaagaaaagggaaagaacaggtgatgtgtataccaaggtcccacttgctcaggcaaaaagaggctgcagaaaattggttcatcaatggaattctatcacaaagtgaccattgtatagtgagtttatttgtgctctaaaatagtatcaacgtgcatctttccactgaatgacttcatggatcgtggccaacatagaacttggataggaaatcctttggccttggcgcttctgtttcatggaagaaccgcataacatgtgtccgctgcttccatactttaattgtttcttccagttcgatctttccctgaacagtgaggagagaggtcatcagtcaaagttgtcaagttgaaggcatatgacactgaaggccaggattctattctctgctcagcatggacttgttgaatgaccttgggcaagtaactactctgtctgggcaaagtttctatgtctggacaatgaggtggtcagggtaaatcatttctgacacttttcagattctttaactctgtggttaactggtaccaagaggagaaacatacaggttaacaggctcctatcccatgactacctaacctgactggcttaacttatgtttctgcttatcatttcttctgttactgactggtctatgctgaagctcccattgatgctaacgtgactggccagggggacagaatcagccccaggatttgagtccatttatacaggactcataaccaccctaactgcctcttccagctgtaaactggcattcagatgaagtggtaacttctagggatgaggttcaagaagagttcaaactttcctccctatatctttttttatggttataaaatgcaagtcccagtggatgttcccttgatgaatcttatctatttaaccagatgataacctccaagttcaagtatttctctgaaacacagcaataatcactgccgaaccagtagctgctttctaaacttggagacaaaatgttcatttggaaagactaagaagtagtggacaagttggctgatcttttaaattggtcagggagggtcagttaccttaatgaccagaagatcaaccaccctggggtctgtgacatgggcattcttcataaacatttctcggactttatcccgtcccattttcacagtgatgtccagctggaattggtgcactagagagaaaaacatgactcagggtagaaattgtatggttaaataaaacctagagtcaaatgatactcattgaacacatacaggtcgcccattcatttcttcaccaaaaaattagcctgaccctaggctaggtgcttgaggatgagacatgtgattcatggtatttgctctcaaggaacttattatttgtttggggaaaaagaccactgaatttgaagaggcagtaaagcattgttcaagagtttgaacaacctgggttcaaatcccagcttttgttagctatatgatcccgtgtaagttaactttcttgtgcctgagtgtattttttaaaaaattattttatgggctgggcgcggtggctcacgcctgtaatcccagcactttgggaggccgaggtgggcggatcatgaggtcaggagatcgagactaccctggctaacacagtgaaaccccgtctctactaaaaatacaaaaaattagccgggtgtggtggtgggtgcctgtaattccagctactcgggaggctgaggcaggagaatggtgtgaacccgggaggtggaccttgcagtgagccgaggtcgcaccactgcactccagcctgggtgacagagcgagactccgtctcaaaaaaaataataattattttattagctgggcgcggtggctcacgcctgtaatcccagcactttgggaggccaaggcaggtggatcacctgaggtcaggagttcaagaccagcctggccaacatggtgaaaccccgtctccactaaaaatacaaacatgagccgggcatggtggtgggtgcctgtaatcccagctactcgggagactgaggcaggagaatcacttgaacccgggaggtggagggtgcagtgagctgagatgggccactgcattccagcctgggtgacagagtgagactgtgtctcaaaaaaaaaaaaaaaaaaaggctgggcgcggtggctcacgcctgtaatcccagcactttgggaggccgaggcgggtggatcatgaggtcaggagatcgagaccatcctggctaacaaggtgaaaccccgtctctactaaaaatacaaaaaattagccgggcgcggtggcgggcgcctgtagtcccagctactcaggaggctgaggcaggagaatggcgtgaacccgggaagcggagcttgcagtgagccgagattgcgccactgcagtccgcagtccggcctgggcgacagagcgagactccgtctcaaaaaaaataattattattttattagctgggcgcggtggctcacgcctgtaatcccagcactttgggaggccaaggcaggtggatcacctgaggtcaggagttcaagacagcctggccaacatggtgaaaccccgtttctactaaaaatacaaaagttagccaggtgtggtggcacgcaactataatcccagctactcgggaggctgaggcatggggaaatcacttgaacccgggaggtggaggttgcagtgagccaagatcgcgccattgccctccagcctgggagacaagagcgagactctgtctcaaaaaaaaaaaaaaaaaaaaaagtgagttatcattactgtttttttcattaaatacttaaaattttacttttgttttttattaatgctcaggctgttctaagttctcaacactattacttattccccttccttgatttgattcctcagctggagtcctgatgatggataccataaaacccgtgtggcacaggtttgagtaactggccagctacagatcactgatcttccccatagggatgcatactccttgaccccttcttttctctcctcttcccttgctttctaggctcctgtagccctctgccttcttttcctcctctcaagacccttctgactttgggactttcttcccaaaacagaatttgagggaaggtcttgggaggggtcggtttagaaagagctggatcctcagagtcaggatacctgggttctgtcttctacttggccactgatttacccttcacaagccaccctttttgaatgtggtcctccttcccccagcaccttcctcctgcaaccagagagggttctgggtactcctagaagtattctgccaggcaaacattatgttttcaaactgctgaatttgaatgcaccaccccgaaacacacacacacacacacacacacacactgctacagtcactccccacacacatcttttatctgcctgcccctgaaggcatctgaatttgcagtccctgaaccagcagatcactcaagtttctccttctctagtatcgcgtgggtttaagttctggtcagtagcaatttttccaaaagtcagcttgaagacagggactctgtggagcagacacagttctcatatgtcaaagaaccgggttctgcttggaagctgctgctaaggaaagccctataaataacaaaaataacaacaaaaacaacggcagcagctaatatttaatgagttaaatatgcatcaagtcctgttctaagcactctagatattttaacttaatacagtaaccttctgaagaaggaattattattcccattttaaagatgaagaaactgaggaatagatgaaataactggcccaaggtcacacagctagttgagggcagcgcctgaagaaaagtccgtgctcctaaccaccacattctaccgccttttcacacacacaagcagggactcgacagccctgaggagtggcaccgtgctccagctcactcaaaaacacctctttctcgcactttgggaggccgagacgggcggatcacgaggtcaggagatcgagaccattctggctaacacggtgaaatcccgtctctactaaaaatacaaaaaaaaatggccggcgtggtggcgggcgcctgtaatcccagctattcgggaggctgaggctgaggcaggagaatgacgtgaatccgggaggcggagcttgcagtgagccgagatcgcaccactgcactccagcctgagcgacacagcgagactctgtcacaaacaaaaaaatccaacgggcatctataattacactctgcaactctagactttgggttctgggtacaacagtggctcggcctgggccctgggcacatcacttcacctctcggtgcctccgctgcctcacccacaaagtgagtgtgtcactgacagtcatcgtcctcccgccaattgcgaaggacaaaagagaccaaagctccgatagcacgtaggaatgctaggcacggccggtctgaccaccgcgccgccgccaggtccggcccatggtaggctcgggtgaccctcttcccctgaagcacccgcagtcgcctctgcccaagttggtgacctcagctgggcccatgagaaaccccggccgggccggctacgaccttgagcggcggcctccgggtccccacgtaagccgctacctctcaccagtgttcggcacctcccgataccaggcgcggtagagctcgcgcaccctccgcttggcctcgttcatgtcccgactgaaaatgggcttcacgaaggtgctggcggtagaagtagcttggcggacgccgctccccgccatcttgccaaagcatccactccacaaccccacccctttgcaagcagcgcgtgcggaccgcgggcgaatgtcttttcccattggctaaggaggaacgccccgcctgtatgctgggtgggcgggaggatgactctgaggctctcggattggctgggaagcctctctctggctgagcgaacggtgggtgctgcgcatgctcatctacagaaacgccgcttggcctttggactacaccatctgtcgctcgctctaacgagccggcgttgccgccaggggacgctcgggccgcaggaggtcgctgggtcgtgagctggcgccggggacgccgagcgactgcggggtttccctcagcgtcctgctatccggctgcccgccgcgctccttggtagtgtccgtgggcgcgcaggccttgaagaacctcctcgtggcgggaccccgaggtaactgctgaggcagataatggcgcctgggctgcggtggggcttgtcctgccgcctggcggctttctgcagggccaggatatacttacttttctgtaaaccaactcttccttagcgcaggagaggtgtcaaagagctggcgcgtctccagagccccgggaggaaggctgtaacggcagccccatcgtagacagggacattcgcatcccgagccctggatctctgaaaaccagcccagaatttggaagctggaaggaactttagatcgtccattctgagtgtctctcttcgctggcgttttcccactgaggttatgtaaacatgaagaggagcctacaagtgtcaaggaaaaaacgacagctaaccacagggcaggccatgggcaagatatctcagtgttctccgctctcataggtcaggtaggtacctcagcatccccattttacaggtgaggaaactgagatggcccagagtctaggtcacctgacagatcgcccccacctgcctgactgctgcctaagaggctccgtctttttctgaaggtgtagttgacaggagcctgtgagtattggggaagggccaggggccggggctgagcatctactccaaactttcccatttcgaagggttaaaaaaccagatatactttttttcttccttattatcttctaaaatgtatatatatattcaagtgagctatacaaaagaaagcacgtaacatatataaattataaagcataataataaaatggaagcttttgaacctcagtactgacttaagaagttgtaacacagttaaggtttgtataaagtgtccttagatgtccttagtagccactgttctctagttctctaggtacattaacttggctaggcttcacaacacaccagtgagattgtgttgatatacccttttttttttttttttttgagacagagtgagactcacctaggctggactgcaatggtgcaatctcggctcactgcaacctccgcctctcatgttcaagccattctcctgcctcagctttccgaatcgctgggattacaggtgcgcaccaccatgcatggctaatgcttgtattttagtagagacggggttttgctatgttggccaggctggtctcaaactcctgacttcaggtgatccacccacctcagcctcccaaagtgctgggattacaggtgtgagccactgcccccggctgatatactcattttatagatgagaaaactgaggcacaaagagactaagttactttacagcattggggttgaagcccaggcagctggtgccagagtcagttttctgactctcgcagcacctataccatgatatctacctgtatgattctaaccttgtgtatacccctgcctccttcagaagtacccactatcatgataaattcattgtgttcaacattcaaaaaaaaaatggggcgcagtggctcactcctgtaatcccaacactttgggaggccaaggcaggtgtatcacctgatgtcaggagttcgagaccagcctggccaacatggtgaaacccccgtctctactaaaaatacaaaaattagccggcatggtggtgggcacctgtaatctcagctactcgggaggctgaggcaggaggatcgcttgagcccgcgaggtggaggttgcggtgagccaagattgcgccgctggactccagtctgggcgacagagtgagaccctgtctcaaaaggaaaagaaaaaaaagacctctaaacaacccacaaactgggagaaaatttttgcaaatcacatgttccataagggacttgtatctaggatacataaaattcttacaactcagtaatgaaaagacaaatagccaagtttagaaatgggcaagggagacaacaccaaatgctggtgaggatgtgaagcaacaggaactctccttactggtaggaacgcaaaatggtacagcagctttggaagacagtttggctttctgacaaaactaaacatactcccatcagaagatccagccattgcattccttagtgtttacccaaatgagctgaaaacttatgtccacacagaaacctgcacatggatgtttacagcagcttttgtttttgtttttgtttttgagatggagtctcgctctgtcacccagggtggagtgcagtggcgcgatctcggctcactggaagctctgcctcctgggttcacgccattctcctgcctcagcctccaagtagctgggactacaggcgcctgccacgaagcccagctaattttttgtattttaagtagagacggggtttcaccatgttagccaggatggtctcgatctcctgacctcgtgatctgcccgccttggcctcccaaagttctgggactacaggcgtgagccaccgctcccggccagcagcagctttatttgtaattgccaaaacttgaaagcaaccaagatgtcctttagcaggtaaatggataaataaaccttggtatatccagacaatggactatattcagcactagaaagaaatgagctattaagccatgaaaaggcatggagaaaccttaaatgcatattagtaagtgaaagaagacaatctgaaagagctacatactgtatgattccaactatattacatcctggaaaaggcaaaactatggagacaataaaaaagatggcaggggctgggagtggggagaaatgcacagaggtggtgcacagagaatatttagggtagtgaaattactctggatgttataatggtggatacatgttattacacatttgtcaaaccctacaggatgtacaacaccaagaatgaaacctaatgtaaactatgggatatgggtgatactggtgtgtcaatgtagcttcattgcttataacaaatatatcctctggtgcctgatgttgttggtggggggaggctatgagtgtgtgtggggtgggggaaccctgtattttctgttcagttttgctgtgaactcgaaactgctcttaaagatgaaatttttattttaatgggtaaagtatttgaataaccatttctccaaagaggatatacgggtgaccaataagtacatgaaaagacattcaacatcatgagccattagggaaataaaaatcaaaaccctcgtgagataccatttctcacccagtagaatggctagagtgaaaaaggcagacacagccagtcacggtggctcacacctgtaatcccagcattttgagaggccaaggccagtagatcacttgggttcaggagtttgagaccagcctggccaacgtggtaaaacctcctctctactaaaaataggaaaattagctgggcatggtagtgcatgcctgtaatcccagctactagggaggctgaggcaggagaattgcttgacccgggaggtggaggttgcagtgagcccagatcatgccatttcactccagcttgggtgacagagcaagactccatctcaaaaaaaaaaaaaaaaagacaaaagatagtgttggcaaggatatagagaaattagaactttctatactttgctggtgggaatgtaaaatggtgtagccatttgggaaaacagtctggcagtttcttaaacagttaaatatggccaggagtggtggtactcacttgtaagaggccgaggcagaagcattgcttgagcttaggagtttgagaccagactaggcaaaataatgagaccgtatttaaaaaaaaaaaaaaaagttaaacgtggacttactatatgatccagcaattccaatcctaggtatttaccctgaagaaatttttttccacacaaagacttgtatgcaaatgttcatagcagcattattcaccatagccaaaaactaaaaacacccaaatggctatctgttgataagtggataaacagaaggtggtctgtcacccaggcatggtggctcattcctataatgtcaggattgcttgaggccaggagtttgagaacagcttgggcaacatagtgagactgcatctgttgagggaagtcaggaaccccgaacggagggaccggctgaagccgtggcagaagaacataaattgtgaagatttcacggacatttgttagttccccaaattaatacttttataatttcttacacctgtctttactgcagtctctgaacataaattgtgaagatttcatggacacttatcacttccccaatcaatagccttgtgatttcctattcctgtctttaatctcttaatcccgtcatcttcgtaagctgaggaggatgtatgtcgcctcaggaccctgtgatgattgcattaactgcacaaattgtttgtagagcatgtgtgtttgaataatatgaaatctgggcaccttgaaaaaagaacaggataacagcaacgttcagggaacaagagagataaccttaaactcttgactgccagtgagccgggcggaacagagccatatttctcttctttcaaaagcaaatgggagaaatatcgctgaattctttttctcagcaaggaacgcccctgagaaagagaatgcgtccctgagggtaggcctctgaaatggccacttggggggtggctgtattttacagtcacagctgtagggatgaaataagccccagtctcctgtagcgctcccaggcttattaggatgaggaaattcccacctaataaattttggtcagaccggttgtctgctctcaaaccctgtctcctgataagatgttatcagtgacaatgcatgcccaaaacttcattagcaattttaatttcgccccggtcctgtggtcctgtgaactcgccctgccttcatttaccttgtgatatcttattaccttgtgaagcatgtgatctctgtgacccacaccctattcgtacactctcttcccttttgaaatcgataataaaaacttgctggttttatggctcagggggcatcacggaacctgctgacatgtgacgtctcccccggacacccagctttaaaatttatctcttttgtactctgtccctttatttctcagaccggccgacacttagggaaaatagaaaagaacctacgtgaaatatcaggggtgaattttgcccgatagcatctctacaaaaatttgtttaaaatagccaagcatggtggtacgtgtctatagtcccagctactcgaggggctgaggtaggaggattgcttgaagccaggagttcgaggctaccataaactatgatcctaccactgtactccagcctgggtgacaaaaaaacaaacctaaacaaaacacaaaatatggtgatacggtttggatatttgtcccttccaaatctcgtcaaaatgtcatccccagtgttggagttgaagcctggtggaaggtgaatggatcatggaggcagatccctcatgaacggcttagcaccatccccttggtgatgagtgagttcatctgtaatctggttgttaaaggtgtgtggcatctcccgctttgctctcttgttcctgctgtcaccatgtgacatccctgctctcccttttccttctgctgggatttgaagcttcctgaggccctcaccaggagcagatgctggagccatgcttgcacagcctgcagaactgaatcaattaaacctctttttcctctctctctttttttatttttattttttttgatatggagtctcactctgtcacccaggctggagtgcgatggcacgatctcagctcactgtaacctccgcctcccgggttcaagcgattctcctgcctcagccttccaagtagctgggattataggcgtacgccaccatgcccaggaggcagaggttgcagtgagccgagatcacaccactgcactccagcctgggtgacagagcaagactccgtctcagggaaaaaaaaaaaaaactaccaaattgttttccagaataactgaatcattttacattctcattggcaattcatgagtgatctagtttctccacatcctcttctacatttggtgtagcaactgtttacatttagccatttggaataagtgtacagggatagcccattgtagttttagtttgcatttccttaatggctagtgatattgaacatcctttcccaagtttatttccaatgtgtatattctctttactgaagtgctttttcatgtcttttgcacatttttatttagattatttatttttgagttttgggagttctttatatattctagatactagtcctttatcagatacgtagtttgcaaatattttctcccactctatgccttttcatcctctgaacagggtctttcacagagtaaaagtgcttaattttgatgaaatctattttattatttttcctgttatggattgtgcttttagtgtcaagactaaaaatgccttgtgtagctctaggtccagaagattttctcctaaatgtttgatgatgtacatttaagtccatggtttggtttggtttttgttttttggtttttgtttttctttgagacagtcttattccctcacccaggctggagtgcagtggcatgatcttggcttactgcaacctctgcctcccaggttcaagcgattctggtgtctcatcctccaaagtagctggaattatagatgcgcaccatcacgcccagctaatttttgtatttttagtagagacagggtttcaccacgttggccaggctggtcttgaactcctgacttcaagtgatctacctgccaygctggaattataggcatgagccactgcaccttgttgtaatttttgtatataatgtaagatttatttcaaggttcattttcttgcctatgaatatctgattactccagaaccatttgttgaaaagccatttttcctccattgaattgcatcagcacctttgtaaaaaaccaactgggcacatattagttggtgacaaattcttttagttttccttcctttgagaattttacaatttcccccagcattcttgaaggatattttcattggatatgggattctgagttgatagtttttttaacaatggaaaagtgttgtgtcacttctttctggtttctgttgtctctgatgagaaataagctgtcattcaaattattttttctatataagtaacatattgtttttctctggctgctttcaaaaaatttttttgttttgttttcagaagtttgactataatgtatcttggtgtgaacttctttgggtttatcccaattggaattctctcagcttcttgaatctattgttttatgcattttgccaagtaggaaagttttctttgaatatttgttcatttgattatttatttattaatgtatttttttgagacagggtcttgctctgttatccaggctggagtacagtggcagaatcatggctcactgcaacctagaccttccaggccgaagcgttcctcccacttcagtccccagagtagctgggaccacaggtgtgcaccaccacactcaatttttttgtttttgaggcggagtctcgctctttcaccaggctggagtgcagtggcatgatcttggctcactgcaatgtctgcctcccagattccagtgattctcgtgcctcaacctcctgagtagctgggattacaggtgcctgccaccatgcctggctaatttttgaatttttggtagagacggggttttaccaagttggccaggatggtctcaatctcttgacctcatgatccgcctgccttggcctcccaaagtgctgggattacaggcgagagccaccacgcccggccccctcctatgttgtccaggctggccccaaactcctgggctcaagcaatccttctgcctctgtctaccaaaatgctgggattacagggatgagctatcatgccccactctgatcttttattaacagtctcacaggccctgaggttgtgtttattatttgtttcttttcttttcttctttttttttttttttttttttttttttttggttgagatggagtctcgctctgtcgcccaggctggagtacagtggcgcgatcttggctctgcctcccgggttcacaccattctcccgcctcagcctcccgagtagctgggactacaggtgcccaccaccatgctcggctaatttcgtttttgtatttttagcagagacggggtttcaccgtgttagccagggatggtctcgatctcctgacctcatgatccacccacctcagcctcccaaagtgctggggttacaggcatgagccactgtaccggcctcttttattttctcttttctttcttgtttactttttccagtccattttctctctgttgttcagattgagtaatttctgttgtcctgtcttccagttaactgcttgtgttgtcctcttttccacttttgagcccattcactgagctttttatttcgttgttgtattttctatttctaaaatttctatctgattcttccttatatctcctatttctatgctgagactcttttttattttttcaacatgttcataactgtattttttttttttgagatggagtctcactctgtcgcccaggctgaagtgcagtggcacgatctcggtgcactgcaacctctgcctcccaggttcaaaagattctcctgcctcaggctcccgggtagctggaattacaggcatgcaccaccacacccagctaatttttgtactttttgtagagacagggtttaaccacgttgcccaggcttgtctcgaactcctggactcaagcaaccaacctgacttggcctctcaaagtgctgggattacaggcatgagccactttgcccggcctgagttgcattcctctatgaattttagaaaaagcaatcaatttcaacaagaaaattgctggaatttttattgattacactgaatctatagattaatttgagaggaactgacatctttaaaatgttgagtcttctgattcatgaccatggtatggctcttcattgatttacatcgtctttaatttctctcagcaatgttttgtagttattagtgtatgattttgcatgtagcttttgttatattttttgtctatgtattttatattttggatgctgttataactggtttttaagaagttttaattcccaattgtttattcctattatatagcaatataattgattttaatacagtgatcttgcatccttcagccttgttaagctgtagttgctttttggatgatcccacaggattttacacacaatcatgttatttgaaaatacagttttatttctttctttccaatctgattgccttttacttctcttttttgacttgttcactggctagagcttctagcacaatatcatacagaagtgatgagggtagaccgggtgcggtggctcatgcatgtaatcccagcactttgggaggccgaggcaggcggatcacctgaggtcaggagttcgagaccagcctggccaacatggtgaaaccccatctctactaaaaatacaaaatttagcttggcgtgatggtgcacacctataattccagctacttgggaggctgaggcaggagaatcgcttgaacctgagaggcagaggttgcagtgagctgagatcatgccattgcactccagcctaggtgacagaacgagactctgcctcaaaaaaaaaagcaatgagggcagactttttttgccttaaattaagacattcctggccagctgtggtggctcatgtctgtaatgccaatactttgggaggccaaggtgggtggatcacctgagatcaggaatttgagaccagcctggccaacatggtgaaaccccgtttctactagaaatacaaaaattagctgggcgtggcggcaggcacctgtaatcctagctattcaggtggctgaggtaggagaatcacttaaacctgggaggcggaggttgcagtgagccaagattgtgcccttacactacagcctgggtgacaagagtgaaagtctgtctcaaaataaataaataaataaataaataaataaataaagacatttctgaacttaggaacaaagcatttagtattttaccattgagtatgttgctagctgtaggtttttcgtagatacccctcatcggattgaaaatgtttccatgaattcctcgtttgctgggaattttcttttctttgaggttcagatgttgattttgtgaaatatattttatgcatctattgatataatcatggaatttttctttttctgtctgttaatatggttaatttcatttattggtttttgaatgttgaaccaaccttgcattcctgggagtaaatgctatagataatgttgtatatatttacatattattttcaatgtgataagattttgttaatatttgcatctgtgtttatgaggatgttaatctgtatcatctttacctgttttttttttgttgtttgtttgtttttgagatggagtcttggtctgttgcccaggctagagtgcagtggcgtgatcttggctcactgcaacctctgcctcctgggttcaagtgatttccctgcctgagcctcccgagtagctggcagtacaggtgcttgccaccatgcccagctaaattttgtatttttagtagagatggggtttcatcgtgttggtcaggctggactcgaactcctgaactcaagtgatccgcctgcctcagcctcccaaagtgctgggattacaggtgtgagccactgtgcctggcccattaaggtgcatatgtatttaggattgtgatattttcctgttggactgattttttttttttttttgagacagagtctcgctctgtctgcccagcctggagtgcagtggcgtgatctcagctctcatctcactgcaagctccgcctcctggattgatgccattctcctgcctcagcctcccgagtagctgggactacaggtgcccaccaccacacccggctaatttttttgtatttttagtagagacggggtttcaccatgttagccaggatggtcttgatctcctgacctcgtaatccgcccgtctcagcctcccaaagtgctgggattccaggtgtgagccactgcgcccggctggactgatcttttatcgttatgtaatgtccctttttgtctttttttttttttttttttttttttgagacagagtctcactctgttgcccaggctggagtgcagtggcgcaatctcggttcactgcaagctccacctcccggcttcacaccattctcctgcctcagcctccagagtagctgggactacaggcacccaccaccatgcccagctcatttttttgtatttttttagtagagacggggtttcaccatgttagccaggatggtctcgatctcctgacctcatgatccacccgccttggcctcccgaagtgctgggtttacaggtgtgagctaccacgcctggcccctttttgtcttttttttaaccgttgttgctttaaagtctgtttgtgtgatataggaatagctactcggcaaggcatgatggctcatgcctgtaatcccagcactttgggaggctgagacaggtggatcacgaggtcaggagattgagatcatctttgccaccattgtgaaaccccatctctactaaaaatacaaaaattagcttggtgtggtggcatgcccctgtagtcccagctactcgggaggctgaggcaggagaattgcttgaactcaggaggcagaggttgcagtgagccaagttagcgccactgcattccagcctggtgacagagcaagacttagtctcagaaaaaaaaacaaaaacaaaaaaacatagctactcttggccagctcacatctattatcctagcactttgggaggccaaggcaggcagatcatgaggtcaggagattgagaccatcctggctaacatggtgaaaccctgtctctactaaaaatacaaaaaatttagctgggcatggtggcgcatgcctgtagtcccaactacttgggaggctgaggcaggagaattgtttgaacccaggaggcagaggttgcagtgagccgagatcgtgccactgcactccagcctgggcaacagagcgagactccatctcaaagaaaaaaaaaaaagaatagctactcgtacttgcttttggtttccatttgcgtgcagtatctttttctacccctttaccttaagtttatgtgagtccctatgcattagatgagtctcttgaagacagcagatggttggttggtgaattttatccattctgtgtcttttaagtggagcattcaggccatttacattcaatgttggtattgaattatgagatagtgttttattcatagtgatagttgtgcttttttaaattgtgttattgttttataagccttttaaaacatatacttaaaggaggttctatttttgtttcaagatttagaactccttttgacatttcttgtagtgctggcttgctagtggcaaattctctcagcatttgtttgtctgaaaaagactttatctctcctcatttatgaagcatagttttgctggatacaaaattcttggctggcaattattttgtttgaggaggctaaagataggaccccaatcccttctggcttatagggtttctgctgagaaatctgctgttaatctgataggatttccattgtaggttccctgatgcttttgcctcatggctcttaagatgtttcccttcatcttgactttagataacctgatgactgtgtgcctaggtaattatctttttgcaatgaatttttcaggtgttctttcagcttcttgtatttagatgtttagatctctggtgagagcaaggaacttttccttgattattccctccaataagctttctaaatgtttagatttctcttcttcctgaggaacaccaattattcttaggtctggctgtttaacgtaatcccaaatttcttggaagctttgttcatttttaaaaattcatattcgccgggcgcagtggctcacgcctgtaatcccagcactttgggaggccgaggcaggcagatcacaaggtcaggagatcgagaccatcctggctaacacggtgaaaccccatctctactaaaaatacaaaaaataagccaggtgtggtggcggtcgcctgtagtcccagctactcaggaggctgaggtaggagaatgctatgaacccaggagacagagcttgcagtgagccgagatcacgccactgcactccatccagcctgggcaacagagcgagactgtctcaaaaaaaaaaaattcttttttatttgtctttgtctggttgagttacttcaaatgctttgtcttcaagctctgaagttctttcttctacttgttggagataaatgttcagtgccacaaagcgaaaccagcactcaggcaaaaattttctcagcaaggcaatttacttctgcagaagggtgctgcttgtgtcaatcacgattgcaagagcacactgaacaaaggaaagcaggggtttttattcctaatgcagtccctgcctctttgtcattcctccatgggctgtggttggaccgcacaatctaaactgacccaattggctatttgtgaatactttcccaaataaggaagggaagggaaatgtgagttacartggtgggatgtgcggtttcaaagggaggaacgggtgaagagtgggtaaccaagggaacagatgtgagttattgattaggactgacaggaaagttgtttacagttacagtaactaggggcaaggaggcatagagaacaagaaagttgagtttgagaacaaagaacaaggaagttaacaggctaaacctttgaagaattttattgtatcctacaatttcccccttttaatttttatagttcttcctcttcaaacctttttaagatgtcttggctttgctgtttgacttgatcgtctgaaaggaaacgcttatctgaataaggtggaggagagctaagggagattttagtaagtgctgtttctataagcctttgtactagcccatggttgcatggtgtgacacaacacccaacaagaatgagtacacctattatgactgcaagagaagtaagaattgaggctatgattcctttctatttaccaaaccacctgtctagccatcctgaagaagggttattgactccagaatttttagctaattcattagataaaatggtaagtccttgtaaggcttttgttatgctcccatctggggcagtatggtttgggatgaaggtacgacactgagttttaatcataacacaaactctacctttttcagctagtatcatgcctagggccattctgttttcctaagccatctggctagtcagccctaactcctcagctattcctttgacagcatccctggtataattaataaactgctgttggttataatagatgtaatttatacagtctacatttttattaatagttacccatggaaatattgattcaaatcctgcagactatttggtcccgggcttttaatttatcaggtactccccatgggactccagttgcatctaaataaacttgagagtcaaaaaacctataaggggcttctcttattttatggtgttgtggcttttctttttctggctgatgaaacgccagggtgaaagggatagccaaatggacaagagtgcaggtaccactccagttacttggcagagtgtccagtaagggtccgccacaataccaccatacatcttcttgaggatgactaagggcagactgatgggtaagctcttggaaaggcttaagctcactgcatcctgttaagcttccaaggaacaccaagttttccccttgtcgtgagagacaggacgtgaaattgacattgggagccagaagctggatggccctctggggctgacccgcaggatattgaactttgggatagagcaaagagagagcttggcatgattgattgccccaagctrtggaatcctggaagagagctaccatgctgcccatgcctggttgactgggggaccagccgagtgtaaaggggtctatctgggtctctggctggccgtgagcacaagcataacaattgcttttgtttcatgtgcggacagaatatttggtccattccaaccaggcatttgcatcttgatattttgtttcaattgctaaagtttgccttagatcatttacttctacaatatctactttagtcttatcattgggtatagaaggtatggcagtctgattagaagaaggcttagaaggagaagagagggaagagggtgaagaggatgagggattaataaaacgcatttcaaaagaccctatgaggtctgtgccgcgttggtccctatgccatagaagcgactcaaagtaggtctagagggtcggtagaggccggagtgagagtagaaatctgcactggattacactggttatactgaaaatcgaggggaggggtgcttcctttagtaaagtgaatgtatgattttaagtatatacagccacatgttgatgaggtccagccttgatactcagttgtccacagaacatcattccagctatggcagacctgtttccctatattttatgaggagcaagagtcttggtagcgggagccttttattttaaagtggcagagatacttttctaaggctgagagttgcctttgactttggagatctctacagggtatgactaaacaggcatcaaacataataacttggggtgagtttgatttagtcacattgataacaaggtggtcagcaacagaatgaggaaagaagaaagagtaatagagtagacgaaagagagttaaacttttcttagctttagtttgagggggttttcccctgggataatggcccatgactctggaggtgacagtgctttcttgactcaggtgtgatgggtctatcctttttctgctgtccggactgcagtttcagtggttagaagcaccaggtaaggtccttcccaggctggctcaagtttctcctcttttcagctcttgataaggacgtgatccccaggctgatgttgatgtactgggaactccagaggcagagcctgtgctaggagacctttggttttaagaaaagagaaagtaggggagagactaagaatataattcctgaggaactggtgtttttggaacatcagcagtggagtgtaaataaggcaatccatagagcatcttgtaaggggaaaggccagtatcttttcgaggagcagtttggattcttttttttttatttggttttktcaaatgttttattgagtgtagacatctggagtactataaaacatgcattatctgtagattcaaaaaggagcaagccacattgttctcactgtcaaatgtgttaggcttggcatacatgatggagattaatgaagtatcatgagagtaacatggttcttgaaaagcttctataatttggagtagggtcttaatcacatgaaaagcaaaggtgttcacatttagtgaacttgcatttcattggggggagagggtacacagtattttaattttaaaacaaaaataatttgtttgtcaaagattcccatctccccaactttatttgtcccattggttttcagaaattttaatttttaaaaaatcagatgccttttggaagttgtatgtttatctgagcagtaactaaattttatttcttcttcagttgttaaggtgtgttaaatttgaagaagataatatctccatcttcaacaatataatttctgccttgttgtctgtactttccagcagccttgactgcattttcagaaccttcctctttaaaatcttcatatttcattacttcagccataatgaatcccttttcaaaatctgtgtgaatctttcctgcagcctgaggagccttagtccctttcctgatggtccgtgcacgcacttcatctgggcctgcagtgaaaaagtattttagttggagtgctgcaaacccagccttaatgatctttggcaaagcactttgtgtcatgttcgcttccagatactgctgtctctcctcagcactcaattcttgcaacttgagttccaaggccccactaaaaggaatgaccaaggcacctgggtcatacttgtccacccactctttaatttttatcagccatttgtttttctttctaatgtagtctttttcagaaagattaaccaagtagaccattggttttgaagtcaaaaataagtgtttattcaacacttcaatctctttgtcattccaatcatgatagaagcgaacaggttcttttgatctataacccaggattttactttgcacattatatcatatttgggttttagttttttatctcctcctctcacagccaccttttctagtttatctataatgggcccagtcattcctcatctttaagctgaagctcttcatgtattatttctatatctcgaataggatctacactttcttcaacatgtgtgatatcatcatcttcaaaagcacgtgttagatgaaagatgccatcacaagcactaaaatgagataaaaaagcattccccaggccctgcccattgtgagctcctttcacaaggccagcaatatccactacatttagaaaggcaggaattttgcttgctggtttgtgatattggcaaagaaagtcaaacctttcatctggcacaggtactctgctctcattaggatcaatagtgcagaatgggaagttttctgctgaagcctgactattggttaatacattgaagaaagtagatttcccaacatttggcaatccaacaataccaattttcagtgaggttccaaatcttccaatgattgggggtggtttaattccatcacctcccttttgagggggcatcgtgctcagcctgggctatgacacggggtcccagtagcagcgagagaaaggtcctgccggcagccagaggcggggaggaaggaggagagaacgcaggcccggcccctccgccgagcggcatgccgcactacggcggcgacagcggtggaaccgccgtttggattcttaacagggcaataggaagatatttgatccctggcaaccgaatctatagaactaacttggttaaatggttctttaaggtctgattcatcctttctactctccctgatgaaggtgggtgccaaggagtatgatatttccatctaatgtctagcgcttaggatagctttttaatgatatgtgctatgaaataggtttcactgtctgagtcaatattttctattagcccaaacctgggcactatattttcaattaatgctttaactacatgattggccattgcatttgaaaagggaatagcttcgacccagtgagtgaggtgatctgctattactaagtactttaggcaaccgattgggggcatttcaatgtaatcagtttgaacactttggaatggtcttagccctgaatccctccccgcccagggatgatttctttataacttgtttgttggtttccttacatgttaagcaactatccataacctgtttggctagggtatatacccataaaccctgagaactgtgtcacacatggcttggggtccccagtgtgtcccttgatgcaggtgggtaggatttctctcatgagcggtttgaatagcatttctctttgatctggtaacacccattttccttctgagttttctttggctccatttttattaatttttccttttctgcagcagacaaggtaggggttgcagcagggggaggaagacraggggttaagtgaaaggtgtttcagatgaaatggcagcctgtttagccacttgatctgcaaggttatttccctgacttgtaaaggaaaagtcgttttggtgtccggggacatgtacaatggctatttcttctggcaactggagattgtttaaaacatggacgattagctcctcgtgggtaagatattttggcctttagtttttttttgttttttggtgtttttttgagacggagtcttgctctgtcacccaggctggagtgcagtggcacgatctcagctcattgcaagttccacctcccgggttcacgccattctcctgcctcagcctcctgagtagctgggactacaggatcccgctaccacacctggctaatttttttgtatttttagtagagacggggtttcaccatgttagccaggatggtcttgatctcctgacctcgtgatccgcccacctcagcctcccaaagtgctgggattacaggcatgagccaccgcgcctggcctggcctttagtattaataagaccttgctcagcccaaatttttccaaatatatgagctactccaaaaatgtatttagaatcagtatgaatagttccttccttgctctgtaagtgttttaaaacctggctgagtgcaaatagttcacatgctttggcagaccaactattgggcaaccttcctgactctgtttcttcaagagtttctccatcaattactgaatacccattgtatttttctcctttaattgcttgggatcaaccatctataaataagtgtcaccccattttgaaaggggtctctcttagatccggcctgacctttgtttggtagtcagttagatctagacataagtgttctctttttagatttgggtcccctgttaagaaacctctcggattgagtgagttatcagtagtcaaggttaaatcatctttttagtaaaatagcctcctattttaagattctggagtcagtgagccaccttcctgcttttttatttaaaatagctctaacttggtggggtgtgcttacagtcaatttccccccaaagattaattttctactttcttcaactaatactgctgtagctgcaacgaattggatgcactgaggctacccacaggtgactgggtctaaaatttttgataggaaggctacgggctgccggtgaccaccatgttcttgagtaagaacccctaaagctaccccgttatttacattaacaaaaagatgaaatggcttttctagggaagctaaggctaagacaggggcagttatgagtttgtatttcagctcttcaacctgattgacttcctcagaagtccacaggagacggtccagtttccactgggtaagcttttcatataaaagtttactttttagggcatatgagtcaatccataagcatcaatatccaactaatcctagaaattttctgagttattgcttagtttgaggcaagggtaaggacacgatgccttcaactcgttcaggtcctatcctttgcttacctgcacttattaagtggcctaaatatttaacttcaggctccacatactgaagctttccctttaagaaccataacccctcgaactccagatggttaaggatatgtgtagagaagccagctactttctctacatcttcaacagatacgagaatatcatccatgtactggagcaggcatatttgctttgggatgacaactttttctaacacttgttctaaaatttgaccaaaaaggtttggagagtctgtaaacccttgaggtaaaactgtccatcaataatgttgttttcgccctgaatggggatcctaccactcaaaagcaaatatgtctcagctgtcttcagccaaggggcatgcccagaaggcatcttttaaatctattactgtaaacmactgatggttttttggaattttgctgagaatggtgtatgggttggggacaacaggatggttagtttggactatttgatggctctaagatcttgtaccaagtcggtatgacgcatctaatttcttgactggcaatattggagtgttatacggggacatacagggttcaaggagcccatctttaataagactttcaattataggctttaatcctatcctgccctctaggggtttggggtattgtttcctccttactacttccctggggattcttaacttgatgtggattggagggattcagagtttctcccggtttccttcccttgaccagacactaggattaatgcatttttcatctgtggtggtgagtaggtttaatgaggtaaagaatcctttaggaccaacttgtaagcctgtgcctaattctagcattaagtctcttcctaatagattagtttctgcctcagggatcaacaaaaattggatatgagtcagccgatcttggtatttaacttctgtactttctaagatttttgctttaaatccttctccttttaccccagagactaaaagttcttctgaagagcaggcaatgttggatggggggaagcaaatggaggagcgagccactcctgaattgactaaaaggtgataagctcatgtttggttcccacctgtaaatttatcaagggctcctggtgggactcgagataaacagagcccctgacccccctgttcttcctcaaaagtcatgagttgaagggcttctttctccttttccagtttgggacattctcttttgaagtggcctgcccttcaaacggtctggacggaccgtttatagtttctggccccctggaagctttgtttagaagcataaacgagggtctggaccttttatagtttctggccccctggaagctttgtttagaagcataaacgagggtctggaccttttatagtttctggccccctggaagctttgtttagaagcataaacgagggtctggaccttttatagtttctggccccctggaagctttgtttagaagcataaatgagggtctggaccttttatagtttctggccccctggaagctttgtttagaagcataaacgagggtctggaccttttatagtttctggccccctggaagctttgtttagaagcataaatgagggtctggaccgtctatcgtttctggccccctggaagctttgtttagaagcatgtgggtgtggggccacctgctggaaagtggataacgtgagtttttgccttttgtttttgcttctttcctcacatatattttttgagcttctcccagaagttcacttagaggttggttttcccagtcttctaatttttgtaacttttttgaaatatctggccaacttgtagtgacaaaatggagctttaacactccctgtccaaggagatcttccaaatttaggcctgcatattgtcttgtttggtcctttattcttgtctagaaatttcataggccccctcatctttttcctattgtatatcaaatgctttagagaggttttgggttcagggtactgattccctaattccctttattatcatttcccttaggtcttgcatattttcccagtgagctgcattaatatcgtcccaccgggggtcttgggtgggaaacttttgatctgcggtaggaatgtttgaccaggagggtgttcgtgttcccaaattgccatagcagccctacagatcatgcttctttcctcccctgaaaagaggacgcaggccgggcgcggtggctcacgcctgtaatcccagcactttgggaggccgaggcgggtggatcatgaggtcaggagatcgagaccatcctggctaacaaggtgaaaccccgtctctactaaaaatacaaaaaaaattagccgggcgcagtggcgggcgcctgtagtcccagctactcgggaggctgaggcaggagaatggcgtgaacccgggaagcggagcttgcagtgagccgagattgcgccactgcagtccgcagtcccgcctgggcgacagagcgagactccgtctcaaaaaaaaaaaaaaaaaaaaagaaaagaggacgcctaggatggacattaactccacccaagtgtataactgaggtcctaagaattgatcaacctgatctgttacccaataaggtcatccaataacggcttaagttccttcttcaaacttcagacctctgaactggttaagggagcattcacaaaattaatagcccccctgtccttgtggcacctcttttaaggggaagagagttggggctgactccatagatgtggagggaaatgggaaattttggatatcttttttacattgttctacctcacgttggagtccttttagggaggggtacttaggctgagaaggaacaggctaatgggatggtgattcccaagaatcaggattgtaaggaggaggaataacatgagcaggagaaggatctggagcaggaacggggacagcagctgctacctgaggggaagggttaggggcactgagcgtgggggaagatggtttagaggatcccatgtgctggagtctttaggcatggggactggcttttctcactcttcagtttgaggtgctagattgggtttttccctagttgtctttaagggaaagaggaggacaggtccctgcctccaacaaagagcataggccaattcttcttgagaaactggacttttatcatttacatattgaattagaagttgacacatcacatccttgttcaacccaaactttgaccaaaagattgagggtttgaggatgggtccctgagtccaaataaaacagcaattgtttgtcatttgttgctttttcttatgtttagttctctcattatctttccaatattttaacatgagacctaggggactaacagcaggaatatctttattgctgtctttatcctttttactccgtgtcctgcttggggtgtttcccatgttgggtcctagttaggctcagtccctcatattagagatttcttgcctatccttttctggaggcttgctgaggctcaatccctcgtattagagatttcttgcctctccttttctggaggcttattgaggctcaattcctcatactagagatttctatcctttagccccacctgctggaggctccttgcacccttcttttgcttcgtccactctggtcgcttcccggaggggaatttaggtccctcttacctttggcacgcccatataaaccccatggcaggatctgtcctaagccatatgaggtgaccatggaacctcagataggacacactcattccgcacagcagtagtgcttagtaccattcacacaagcagcaccgcaagcagtaatgcttgtgatcattcatacacactttcaatctccagaatatcttgaccaccaaggaaatgctttgtcacccctgtgacgtttcttaccttggtctgtgcacaaagttacctggtcaccatggtgttgcaagcctttttttccccacattgctgagagtccggatttattcgtcacaccgggtgggttccgatccctcaccctgaggccaccgcaacgaggcagtgggatgcgtctccttatgagaggtgaccagagaccccttccctggaggagaatgggaatcctggatgagccccagatttgttggagataaatgctcagtgctgcaaagtgaaaccagcactgaggcgaaagttttctcagcaaggcagtttacttctgcagaagggtgctgcttgtgtcaatcacgattgcaagagcacacygaacaaaggaaagcaggggtttttattcctaatgcaatccctccctctgtgtcactccttcatgggctgtggttggactgcacaatctaaactgacccgactggctatttgtgaatactttcccaaataaggaagggaagggaaatgtgagttacagtggtgggacgtgcggtttckaagggaggaaggggtgaagagtgggtaaccaagggaacagatgtgagttattgattagaactgacaggaaggttgtttacagttacagtaactasggrcaaggaggcatagagaacaagaaagttgagtttgagaacaaagaacaaggaagttaacaggctaaacctttgaagaggaattttattgtatcctacatacttgttctagtctgttgttgacactttccagtgcattttttatttctttaagtgtgtcttccatttgcagaaattgtgatttttttttctttataatatctgtttctctggagaatttttcatccatagcctgtattttttttgttgtctttttctttctttctttctttcctttttgagactctgagcactctgttgctcacagtgcagtggtgcaatctcagctcactgcaacctctggctcctgggttcacgcaatccccctgcctcagtctcccaaatagctggtattacaggcacgcaccaccatgcctggctgatttttgtatttttagtagagatggggtttcactgtgttggccaggctggtctgaaactcctgacctcaagtgatcagcccgcctcagccttccaaagtgctgggtttacaggtgtgagccactgcgcctggccaatccatagcctgtattgttttttacatttctttgttttcacttttctctggtctctccttgagtagtttaataatcaaccatctgaattgtttatctggcaattcagagatttcttcttgatttgcattcattgctggggagccagtatggtcttttggaggtgttatagaaccttgttttgtcatattacaatttttctgatttcttctcacttgggtagactatttcaggggaaaaatctggaactcaggggctactgttcagattcttttgtcccacaaagtgaccccttgatgtgatgcattctcacttcccctagggatggagcttcgtgagagccagactgtagtgattgctattgctcttctgggtccagccacccagtggggctaccaggttccaggctggtgctgaggaatgtctgcaaagagtcctgtgatgtgatccgtctttagctctcctggccatggacaccagcacctgccctggtggaggtgggaggggagtaaagtagactgtgagtgtgagagtccttgcttgtagttttgtttactgtgctggctttctcaaatgctggttatgctagcagtgaagttgtcacgtggacagactcaggagctctggttagccaggatgttgaaagcagtggaattagctgtttctcatttcttggagcagggttattctgttgtgagttgctgtaatgtcctgacttggttggcctccagccaggaggtggcgctttcaagagaacaccagctgcaatactggaagggggatataagcttgccctaagttggccaggataagtattaggatttctcaggtgatggacagggccataaagctcccaagagtttatggcttttgtgatcagctacyagggcgggtrgagaaatactgtcaggttggggcagggttaggtgagtctgagctcagactctttctgggaatctgttactgatttgtaatttttaattccacagtgtttgaaggacatacttgaaataaatttaaaatccattgagatttgtttcgtggtccagaatatggcctatcttggtgaatgtttcatgtgtatgtgaaactgaggcatccatccctcagtttcaaccacccatagatttgtaattattgttacatttacagaaatttgcaggaaggtagaagttattgtcttgaaccataaaatgtctgtttgaagtctttgagctcctcaagggtaggctgtatgtcctgtttacctttgatcctctcagcataatgcttggaccaaaatggaagctcagcagacactggttgaatgaatgaatagatgacattcaattgttaggctgtgttcttgttttggatttagaaaatatgcttattgtgttatgcagtaagactgagtcttggctgggtgcagtggcttacgcctgtaatctcaatactttgggaggccgaggcgggtggatcacttgacgccaggagtttgagaccagcctggccaacatgacaagaccctgtctttactaaaaatacaaaaaaattagctgggcatggtgatgcacacctgtaatcccagccactcggtagcctgaggcatgagaatctcttgaacctgagaggtggaggttgcagtgagccatgatcatgccactgcactccagcctgggcaacagatcaagactcagtcttaaagacaaaaaaaaaatactgagtcttacacacttttgcatctttgtgtctctatgggtcttcacacagagcttggcacattgtagctgctcagtcagcactgtttgtgctgaattgaaacaatgagatatgtacaaaggggctgtctctcactactggggatttaaagccaccccgaggcatttgacaagctgttctggccaaggttgaagaggttgtcctgtcataaagcccccctaagacacgatgtcacacatagacaccactctctgtgcgaaagggggggcctgtgcactgaactcccagacttagctgggcctcagtgctcttcttgggtttggtcatagagcccaagaggaggtggataagctgcctgacactgatatggtaaaaggattatctgcaaatttctagcgtcatcaagactggcctctttggtaagcaggcctaaaaggctgccctcaataaaccacccaagcaggtgaaaattatctttttaccccaagcctaccttttctacatccttttctacttgacatgccccttctactcctcttctctcctttaggactcattctctctcctttcctcctctaaacctcctcccagaaaaagacctgataacttcacttacaccgggttatagatgactaacaaagcttactattgaatatgttgctagtagaaatctgaataagatacagcaacttttcaactctgatcatggctttaagcactaggatgaaccacagccatgtaatcattcatttggttacttagctcttgctgtgtcccacgcataggggcagctactgggggtttgacagtggacggacctaaagtggtccctcagtcaggggacagtacagtaccctaagagcactgaggagggccaccccacgtgaactcaggtagtcaggggagccctcctgaaagccatggagaaacacattctaggtagataacagcacatgcaaaggcctagaagtgagtgtctgaggtggaagttcagagtctttgtcgtcagcaggacatggagcaacacttgacactgagatttaggcagagagagacagagagacaaagagagatagagagacagaaacagatacagagacagagttagagatacagagagatagacagagacagagacagagatagagacagagctagagatacagagagagacagagatacagagagagagacagatagagatacacagagagaggcagagacagaaatagagactgagagaggcagagacagaaatagagactgagagaggcagagacagaaagagagacagagatagagactgagagatagagagagagaggagtgggaggcaggaggaaaaccagagcatgagaggtcaagcagccaagagaaaaggcgaggtcgttaaagaaagggtcagctggggccgggtgcagtggctcatgcctgtaatcccagcactttggaagaccgaggcaggcggatcacgaggtcaggagatcaggaccatcctggctaacatggggaaaccccgcctctgctagtaaatacaaaaaaattagctgggcctcgtggcgggccgcctgtagtctcagctactcgggaggctgaagcaagagaatggtgtgaacccgggaggcggagcttgcagtgagccgagatcacgccactgcactccagcctgggcgacagagcgagactccgtctcaaaaaaaaaaaaaaaaagaaaaaaaggaaagagtcatctgggtttggtgactaggagcgtactggtgacctcagtgagaggggtttcagaggcttatggagacagatgcaggttgaagtgggttgtggagcgcgggagaggtagaaagcagtaaacacacccccctgccaacaccgctctcaggagactggtgtgaagggtaggggtcaggacgctagctggagaaggaatatgggttcaagggagaagggcttttttctttttaatagaagagatcagcaatgtgtttagatgctgatggaaggagccagaaaaaaggaaaaggagaatattgaggtgagacgagatctccaaatgcccaggtgagaagaccagatgaaatggggcacaggagtagggctagctttggagagggaggggagcctcctcccctcatcccctggaagaggaaatggcctatgagaagccggtgagtgaatgggtttggtggcagcaagttgaggaaatgcccatctgatggtgcctatgctctctgctgaaagtgaggaagacggggtggagttagaggttaaagagagaatctaagggccgggcaytgtgaggagggcaaggcaggattggtggagcccaggagttcaagaccagcctgggcaacatagaccctgtctctacaaaaaaattaaaaattagctgggtgtggtgaggtgtgcctgtggtcccagctactcaggaagctgaggtagaaggatcacttgagtgcaggatgttaaggctgcagtgagctgggatcacgccactgcactccagcctgagtgacacagcaagactctgtctttaaaaaaaaaaaaaagtggctggcctcggtggctcacgcctataatcccagcactttgggaggccgaagcgggtggatcacctgaggtcaggagtttgagaccagcctggccaacatagtgaaaccccgtctctactaaaaataccttaaacccaggaggtggatgttgcagtgagccgagatcgtgccagtacactccagcctgggcgacagagactccgtctcagaaaaaaaaaaatcctccatagtcacctgtagtcagcccttcctcctactcccacaccctggcaatcagtgaacagtttcctgttcctgtggttttgactttgcaagattgtcatataaatggaaacgtatggtagccttttcagtctggtttattttacttagcacaaagcatttgagattcatctagtcacgtgtatccgtagtttgttccttttattgagtggtggtccgttgtatggatgttccagaacatttggactatttctagtttggggcataaaatgactattaataaatattcacgtacaagttttgtgtgtacatagattttccttatacttgagtaaagagcaagcagtggaatttttgggtcatatggtaagtgtaagtgtaagtttaattttgtaagaaactcaaactttttcaaagcggctgtctcaccagcaataaccgagaggttccagttgttctacatcctctccagcatttgttatctttgaaagccattctaaaaggcatatttcaatttttattagatcggtattgaagatttacattattaaactatgtaaacaggccaggcgtgatagtttacacctataatctctgcactttgggaggcgaaggcaggaggatcacttgagctcagaagttccaggccagcctggtcaacatagtgagactctgtacaaaaaataaataaataaatcagaaaaaaattagctaggtmaggcacagtggctcatgactgtaatcccaactacttgagaggtcaacatgggaggatcgcttgagtccaggacttcgagaccagcctggacaacattgggagacactgtctatttaaaaaaaaaaattagctgagtgtggtggtgccctgtgatcccagctactaaggaggctgaggtaagagagtcacttacttgagcacaggttgtggaggctgcaatgaaacgtgatcactgcactccagtctgggcaacagagcaagactctttctcaaaacaaaaaatgtagacagtagtcccagttgagtcatgattttagtttttcttcttctctttctttagttttttgtgcatctattawataattaattcatccaaattttctgccaaaaatagaaatctctttgcagtacatttagacagatcasgtcatttctccatatgatcattttcatggagacatacctcaggagccctccatctccctgattccatctggatggggcaccctggaggtctgctgcccagctgtcctcctgagctccccattcacccttatgctcaggggctctccctgcctgttgtgctgggtcccatgttatcttcttttctatttctcctttattttagtgaagtacaacctccggttgcttcctgaggggtagtcttgagacatttatgtatccgaaaagacctcaattcatacttgcatagcatttggctaggtatagaattctagattggaaatattttctctcagattttgaaggtcttcattatcttatagcttcaaaggttggtgttgagaagtctgatgaatrttgaattcctgaagctcagacttttttctctctggaagtttttrggttccactctgtcctcagtgttgtgaaatttcttgacaacaaaattggggctgggtccccttcattcattgtcatgaacacttggtgtttccttctctactggaaactcatgttcttcctctgtgagaacttgtcttgacaaaaaagaaacgtatttattagacatctttccttgcctcctagtctgttgtctctgctgcctgtttcaraaacatctaaacaacaatttagctgttggagctcctgacctcttctctgttctttctggaaaatatttttttcaagtttagcttctatactttgattagattttgcattcctattattatattttttatttttaaggcaaggtctttctctgttgcccaggctggagtgcagtggcacgatcacagttcactgcagctttgttcctggactcaagtgatcctcccacctcagcctcccaagcagctggaactacaggtgtgtgccaccacacccagccagtattttaattttttgtagagatggggtctccttaggtggcccaggctggtgttgaattcctaggctcaaacaatcctcctgccttagcctcccaaaatgctgggattacaggcatgagctaaggcacccagactatatttttgtcaagaattagtggtggtgggtgtttgaacatttttattttagaccctcctattcttatttcatgaatgcaaagttttatctttctaaagatatcaattatagattttttttttaagacagtttcactcttgttgaccaggctggagtgcaatgatgcgatctcggctcactgcagcctctgcctcccaggttcaagcaattctcctgcctcagcctcctgagtagctgggattacaggcacccaccaccacgcccagctaattttttgtatttttagtagagacggggtttcaccatgttggccaggctggtctcgaacatctgacctcaggtgatccacccatctcggcctcccaaagtgctgggattacaggcgtgagccaccctgcccagcccaattatagattttttaggtttaggtgttgacagtagctctcacctcagcctgttctctctccttgtcatgcagcccacaggggagatggtcaggccagtgtgggggctaatgaataaatgctacactgtgcccactcaggtgggtaagggctggcactcctcttcccctggagtggggcggctgtgctggcacccttggcagacacagtaagggggactgcacctggaaaggatgggccagtcggggcaggactactcatcactcatagtgtgggtgtcagggttgtgtcacccctcccacctccctctgcagagacgcaaagtcaagagtaggaagaagccaacctctgaggtaaggcttcccctggaaggcccagggctggggctctctcctttcagagctcagttagacccagacacacggcagggagtcccaagggtagtggcaggccccctccaggaaactcacaaggttaccacagctcaactgaaaaggaagaacttcccaggactgtgacaccccagtgtgagaacaggaggatgaggtgctctgaaggcctttctgcccagtctgccctcttattcctcctgcaggtcacgacccccaggagacctggaggactgaatgctgctgcccccaaggaggaggctgccgtcttatcccaggagggagagcaggtgaagtccccaggggaggaagcacctagccccattcctgctgagcaggaggtggcaggtaccccagactgggaggtaaggacagcccggggcttcgactgaacgtctccagcgtgggtccaactgagcagccatggagcactgcagagtgggaggcagcagggcagggaggcagtgctggaggctggctcaaccccaagaccagcaggccaagctgccatcccaggggagcgaggacgtctgtgcagagctgagaggcagcagccatgtgtgaacagactgggcctcatcctggccccaccgactttgtgtggacagagcctgtttccctgtctgtgcaacacagaacctgcctgatctcactgctggatccctcttcttcctgccaggaaaataaaaaggttcaaaaggaagttgctgcgtatccatctggtaagaccactgacccagcgtgctgcagggggctgcttccaccctgcttctcagtgactgccagggtcacagacaccccagccctttcccaccttcctgacctggggaggggaggggagggaagcagcccaggagtcaggtgccttgaccttcctgggagcctccttgggtgggcaggaactctgggccactcccctgagctggctgcatccctacctttcaccacagctgacctggccccggggcatctcagagggagggttggttgctcccaggaggggactcacaaggctgcctgtttctactttgcagaggcctctgaggacagcaaagagcaaaggccctgggaccgggtctacgtgcccatgacagagctctggctggactggttctgagcctctaacacccccaagactcagaaccgtgaagaaaatctttccaataaatccaagagttgctgctgctataggccaggctgccacctttcggggcctccgtcttcagacaaacccagcctggcttcatccacactccctgtccccacagctgcaggaacagcacttcctgccaccgagccgtgtgaccacagtggattgtctctggaggggcccaagggggccctggccacccttctgactgactcggtgccaggggacagaccaacgtccctctcgtgctgacagccgggccgcaccctggcatgagggcatttacagaaatgctggcggaactgctgccagggaggctgtagggtcctctggcaaaagaggcctcaggtggctcctcagagtgtctgtggttctctgtcccaggctgttccctaagaaggtctgcccaggactcaggtaatcatatgctcattagaaactcttgggcactgcctgtgtgcccagcccagcccattatgtcggtgaggacagacgtggaggacagcagtccctgcccttggttggggctccaggccagcaagggccacagccccagaaggcagagcaggaagacaggactcggggcaggtgaagcagccttctcgttggcagaaggaaacagaagcccggggtggggaagggtggggaagggtgggcccggggtcacacggggtaatggcagagcaaggactagggtcagggtctctggctctcagctgcccatgccacctcctccttctctgcccgccccagtgccttatgggtccaaggttgactcctgtccctagggcaggcctgtgggccctgcctgatccctactgggaggatggtacctagggttggagccaaacaagtgtcctcctccagcgccagcctggccctgagtgcgaactcgtcactggtcaggggtctgtacagcagcatccctgagggcccagagaggtagccagtcctgtggtgaggtgacgaggctgagggtggtggctcagtcctgggcttccatggggccttcccagggaacgttctggcacctgccgactgagccctgggaggtaggtagccctggcatatagctccctgacgccatgatttgtcttccgttttggggtgtcatatatgaagggaggtgactgttgtgatggtgctggcaggactgctgtccctgatgtggggtgggctgagttaggcctgaaatatgggcctccaggctgagtcctgccctctccaccacatccagggctgactgacacctctagtcagcccattctggccccttccccacatgccaggacaatgtagtccttgtcaccaatctgggcagtcagagttgggtcagtgggggacatgggattatgggcaagggtaactgacatctgctcagcctcaacgtacccctgtctcaaatgcggccaggcggtggggtaagcaggaatgaggcaggggtggggttgccctgaggaggatgatcccaacgagggcgtgagcaggggacccgagttggaactaccacattgctttattgtacattagagcctctggctagggagcaggctggggactaggtaccccattctagcggggcacagcacaaagctcatagggggatgggctcaccaggaaagcaaagacaccatggtggctgggccggggctgtccagtgggcaccgagaagctgaagtgctgcagcagggaggtgaagaagaggaagagctccatgcgggccaggggctccccgaggcatgcacggcggcctgtggggaggggaggggcgtcagtgagcctggctcctgggtgatacccctgcaagactccacggaaggggacagggagccgggctccccacaggcacctgctgagaaaggcaggaaggcctccggcttcacaaagtggccctgggcatccaggaagtgttcggggtggaagcggaagggcttctcccagacggcctcatccttcagcaccgatgacaggttggtgatgagtgtcgttccctgggcaggagatgcagggtgagagtggggactggactctaggatgctgggacccctgccaccaaacacacgggggacacacactgcctggcacacagctggactctgtcaactagtcctgcgcccgagaagctccacagtaccctctccgaccccacagcagggcgcagtcacacctctcagaggcacccacactgccccctctccctgcaggcgttgggtcctccaacattctggcaggtcctggtttgtctccccactagacgggggctctggatggacaggccagccctgcctatactctggaccccccacccaagtggggacagtcagtgtggtggcattgaggactaggtggccagggttcctagagtgggcccacctggcagtagccatgctggggctatcaccaggtgctggtgctgagctggggtgaggagggcgccaggcctaccttagggatgcggaagccctgtacttcgatgtcacgggatgtcatatgggtcacacccagggggacgatgtccccaaagcgctgcacctcatgaatcacggcagtggtgtagggcatgtgagcctggtcacccatctctggtcgccgcacctgccctatcacgtcgtcgatctcctgttggacacggcctggacagacatgcgtccccacaatgggtcagcacccagggggtccggccctgacactccttcttgcctcctatgttggaggaggtcaggcttacaggatcctggtcaagcctgtgcttggagccccgggtgtcccagcaaagttcatgggcccccgcctgtacccttcctccctcggcccctgcactgtttcccagatgggctcacgctgcacatccggatgtaggatcatgagcaggaggccccaggccagcgtggtcgaggtggtcaccatcccggcagagaacaggtcagccaccactatgcgcaggttctcatcattgaagctgctctcagggttccccttggcctgagcagggccgagagcatactcgggacagaacggggtagcccccaaatgacctccaattctgcacctgtcagcccagatgcggctcgccgggtgatgcactggtccaaccttttgcccagcctcccctcattcctcctgggacgctcaacccaccacccttgccccccaccgtggcagccactctcaccttctccatctctgccaggaaggcctcagtcaggtctcgggggggctgggctgggtcccaggtcatcctgtgctcagttagcagctcatccagctgggtcaggaaagccttttggaagcgtaggaccttgccagccagcgctgggatatgcaggaggacggggacagcattcagcacctacaccagacagaacggggtctcaatccctcctgtgctctgcgttcacctggacaagtctcaggccccagccatctccaggtagacccagggcctgcctgtccttaccactgacctcaccaagtccctccccaagtgccagcctccaccctctctccttgcccagaggagaaacctaaaatcgaaatctctgacgtggataggaggtacagagtccttggcctctcctggtgccccctgacccgggcacacctctcccacgaccatgtctgagatgtcccctcctcctccaggcccttcttacagtggggtctcctggaatgtcctttcccaaacccatctatgcaaatcctgctcttccgaggccccagtccagccccggcacctctcgggagctcgccctgcagagactcctcggtctctcgctccgcacctcgcgcagaaagcccgactcctccttcagtccctcctgagctaggtccagcagcctgaggaagcgagggtcgtcgtactcgaagcggcgcccgcaggtgagggaggcgatcacgttgctcacggctttgtccaagagaccgttggggcgaaaggggcgtcctgggggtgggagatgcgggtaaggggtcgccttccccgtcccccgccttcccagttcccgctttgtgcccttctgcccatcacccaccggagtggttggcgaaggcggcacaaaggcaggcggcctcctcggtcacccactgctccagcgacttcttgcccaggcccaagttgcgcaaggtggacacggagaagcgcctctgctcgcgccacgcgggcccatagcgcgccaggaacacccctgggggtgggacgggcacgtgcgcgtggccatgaaggcattagccccaccatccaccacccactccaaccctatgctccccctggtctcccgcagtccctggctctgtccagctggtcacagggcccactctttgtgcatccaccttgctcccttggctggggcagggctttgccccacctcgtctctgcccaccctgaccgcctttgcactcagggaagaccccgcgggccccgcgccacccacactgagcttacagcacaggtgcggtccccgccccccacttcgacaccggattccagctgggaaatgcgccagcctcacccattgggctcctgccaggtctcggcagtggccccgcccactcgtcacaagccccgccctcgtccccatgctcacacctccctagtgcaggtggtttcttggcccgctgtccccactcgctggcctgtttcatgtccacgaccccgcgccctctctgcccagctcggactacggtcatcacccacccgggtcccacggaaatctgtctctgtccccaccgctgcttgccttgggaacgcggcccgaaacccaggatctgggtgatgggcacaggcgggcggtcggcggtgtcctcgccgtgggtcaccagcgcctcgcgcacggccgccagcccattgagcacgaccaccggcgtccaggccagctgcaggctgaacacgtccccgaagcggcgccgcaactgcagagggagggtcagggcctcttgtcaagccaggatcaccccagactacaggtcctagtcctatttgaaccttggacgacccccggggctaccaggagtgagcaggtggaaggaggagacccagcctcctgatcgtggggcgggggtgggggtcacaccttctgtgatggaggaactcagtttggatgcgtcacccaggtatgaccttgcaagagtcaccaaaattgccgagaggccccagttagcatcccattcccagatgatggtccatgccggtgagcagtgaggcccgaggacccacagtgcaaaaggtttgaaccgggtcactgcacccccttcatcctcgatttcgtgatttaaacggcactcaggactaactcatcttccattcccaaggcctttccttctggtgtcagcagaagggactttgtactccataacatatgttgcccaatgggcttgcatgcccactgccaagtccagctccacctccaggcccttgccctactcttccttggcctttggaaaatccagtccttcatgccatgtataaatgcccttctccaggacgtcccccaaacctgcttccccttctcagcctggcttctggtccagcctgtggtttcacccaccatccatgtttgcttctggtaggggagcctcagcacctctgccgccctccaggacctcctccctcacctggtcgaagcagtatggtgtgttctggaagtccacatgcagcaggttgcccagcccgggcagtggcagggggcctggtgggtagcgtgcagcccagcgttggcgccggtgcatcaggtccaccaggagcaggaagatggccactatcacggccaggggcaccagtgcttctagccccatacctgcctcactaccaaatgggctcctctggacacacctggcacccccaccccaccaggcacagaggaccaggcaggacactctcagcacaccgagcgcgtgacccttcccttataaagggagctgatgatggcctttgccctctgctgtgagtgaacctgctgtgttgactgtgctgccagtggcagagtcaggccagggcgggtatgggctgctccagaggttcttgcccctgcttcctgctccaggcccttacccagggtaggccggtggaggggcctggtcggagaagtcaccccctctccccactccaagctcctgaagcctgcaaagccttctgggataaccagggtttcagtggacccggccatccacctcccagctaggctcatacaccctaatgtagtcacaacccctcctccagaacatggccttgccctttccctacccccacctgcccactccagagtgaccttcagcacccttatctgtcactggcacttacctggggccttagagctcctgatgatgagtggcatcatgggcctggtcccttcacttcaccttgcactcttgacatgcacagacgctatgcacacacctgatggtgcacagatctcttgtccactcccagacacttgtccacttgttcacacttgcagggacacgattacacacgcagaaaatcacccacacaaagacaatattcacacatacacagactcacactgacacttagggcacacattctctctcacacacaccagtc

SEQ ID NO: 96374 - DNA, 46720 bp, Homo sapiens
  misc_feature (1)...(46720): n = A,T,C or G
cagtataatacctgtgcaatgttcatgtaaattgcctgaagtaatgtcacagacacatagtggggcttatcacgtgttctctggtagaagcaatatgcaactaaaccatattaaatactagatcatatgttaaaatatgttctgaaaacttttaatcatgtaatactgactttctatgctacttaaactctgttctgtaattaaacatttaaatgattttaagctaactctgaatttaacttacaagtaaaattagagccgtcaagggaggtaattcatttccttatttgacttttcaatttatatgtgttgtgcttaatttccactgacttgtaaacataggacacaccggaaccaatctgaagagtttgttgactctgaggcaaaaccgatctttgcaaaacgtggagtctataatggaaaaaaatttaagttaatcataactgtatagagtatcataaaattctacacatagactagtctattatttgaaaagctcatctgaaattttaaaaatacagaaaaattgacccttttcatatgtttccccaaatctgttattagaagattaaaatactgtttttaaacatgtgtgtctcattataaaaagaatttcactaaacagtactgaaggaatttctaccatcaagcaataaaaaaccaaataataacaaatataaaacttttcagaaggatatctggaattttaatgatttggctgtataatgatcagaggggaaaaagtcagcagactaaagctatgaaattagtgtctgagttgttttttaggctatattatctatcaaaatcactatatattcatatgtaataatatccactataaaaagcccaaataaaactcttgccacaaaaagatacctcttagctatataagtgtctataataaaatcaaagcacatatcatagtggttagcacaaaatatttacagtaagattaatcattgtcactcactgacagtgggctaggaatatataaattgaacccaaatatgtaggtacaaggcagggtgcattttttttatggtttggtttataaaccttcagagaataccgtggtgttcacccacgaatcaagaactgttttgccatgcacagtctaatcctttccctgaagtaaaccagggaccagaaagaattatatacttgaaccataacatcaatttattttattaaaccatattctggtactggactttaaaagcacaaactgcttttagggcacttacataaaacagtctgattaacctcctattcaggaagcttttgcttgtaacattacagtttcttctttttgagtttgcaatacataactttctgatacctgtattagtaataattgtatataatctgagtagatggttttcatgagcagtaattttttttttttttttgagaaagggtcttccactgtcacccaggctggagtgcagtggcatgatctcagctcactgcagcctcaacctcctgggctcaggtgatcctcccaccaggtgtgcatcaccacacccagctaatttttgtaggttttctagagacagggtttcaccatgttgcccagactgatctcgaactcctgagctcaagcaatcctcccactttggcctcccaaagtgctgggattagaggcatgaaccaccatactggcccagtaaatctttcatcttttcttccgctttatattgcttgctaccgtgcttaacatcaacttcattaaaagtagattgtaaggaaacattatgttaccttcaccttatgttttgcaatcttacttttcctatatgttagttcccctctaccctcttctttttaaattttacttcacttccctttttcaagactttggggtagatatatagatatagatatagatatagatatagatatagatatagatatagatatattttaaagaaaattatgacagttcaatttgtaaattctgtatcaatattatttcccacaaacatgttccttagactagcagaaggcagttaagtgctataatatatattatttctaaagaacaataaagatatattctattttaagctacatactaaattttattttgtaacatttaaccacaaattgattttaggggctcaacattttttaaccaaccaaatgaggaaaagacatcctcatttcttttttgagaacgtctgctgcaatggccactcaggaatatacatagaaggcatatatatggacttcaccaaagcattacacatggttcatttaaaatttttttaattcacggagaaatggaaaaaaaagatttgaggatattgttgaatgatcataaaaatggttctgttgaatagagggaaatttctggtagtgcactccaaggcttttggtcttgacactcttctctttcatgtgtttaacaattatttggattaagcattgagagggatattggataattagcagttaataggactgactttagagtgagaaaaatctgcagatgtgcaagtcctttatataaaatggtgtagtatttgcatataacctgtgcacatcctcctgtataccttaatctctgaataacttataatacataatacaatgcaaatgctaggtacagagctgttgtactaatttgcttttttgtttgtggtatttttactgttccattattttcgtgtttttgtttgtttttcagacaggctcccactctgttgcccaggcaggagtgcagtggcacaatcttggctcactacagccttgacttcctaggctcaagcaatcctcccacctcagcctcccaagtagctgggactaaaggcacgcaccaccacacccagctaattttagtatttttagtagagagggggtttcgccatgttgcccaggctggtctccaactcctgggctcaagcagtcttcctgccttggccttcaaaaagtgcttggattgcaggtatgagccactgtgcccaactaaaattttaaaatattttcaatctgtaattagttgaatctgagaatgggaaattcacagatatggagaaccaactgtgtatcaggacacaaactagccaaaaggaggttaagctctactgcttctgacttctgaccaaaaattctctcaaacttttcattcagagggcctcccacttgccatgaaatagaggtgagggtggaaggaccacacaatccagtatagttctgtaatcacaaggatctcacaactaaaacaattttgcaagttcatcacttagtctttatattactatcaaagctgactaagctttttctgccgttagacttctgctgttagacatattcttaacgatctcgaatatttaattgaaaactttagtatccacaattctataactttgagaattataaagaacctgtctttataaagggtttatttaccttccaattgtcttatatactcatctacacccattttattcatttaaatagattaaaataatccttcgcaaaaaaaaaaaaaaaacaaaacaaccctcatttgtttatgtacatcacaggcataccattatatacggggatctaggatctgtgcaaactacaatccacaggctaaatctggcccaccatcattttcataaatcaagtttctttgaagcacaacttcagtcattcatgtgctcacatatttgttcagtaccgtctttggctgcttttgagctacaatggcaaaactgagtagttgcaacataaccacttggcctaaaaaggcctgaaatatttactgtctacccctttatagacagtttgttcatccctgtaggtatataccagttaattccctgtggacatgcggtggacacaggcatttttttgaagtgtcatttcaagagcattataaaaactagaaataattttgcttaaacacactttcaaaaggcaaggagaattgcagatcaaatgtctaagaaaaaagaaaagtttttttccaaatgatttaacaacctgctcatggctgtaaactaactataccacagtgaggtcttgcacaaattgtttagcattttttaaagcataataaatatacagacatcagtgaaattattttatttcagtaaccccagaacatcaaggctaccaaaggccagttggtgctaactgcagaaatcatgttttgcccttacttgctatttcaggaactgattaacacaaatagtctcaaggtgttccttctaattagaaaattcataagctttagccagtgactatccacttggctaatggcgttatcattccatgagtccttggttcgaatcttcgtacatacaggaggtttcccgccaaattttttctctatacttgctaaacagaaatcccaaacataaaatactcaagggcgaaaagaaaggggcaaagtgatatagatttggatctagatctaaatatagatctacagatccatctatctaaaatgttttggaagacaatctgatgtgaagaaatctggagaattttccctaagcgtctgggacaaaaattaaaatcaactgtatacaaaaaaaaaaaaaagaaaaacttaacgtattcttatgtagtgaaattcagtaagagcccaaagtaaggacctacacattcagtaaagcctttttatacaggaactaaaaggttcaccaggccattgtgttgttttaatcactccgccagccaaccaggcagtgagaaacccagactcaagtgtgttttctctcctctccgggaagctttatttccttcgggcagagtggcctctgtaccggtggttcagaggcatccatcttcctccccaaatcctattaccaaaatgtcttttaaacactcgggtaaaagcgtctaaatgactttcctacggcaggcccatgtgcatagatttacgggtgaccaggtggaacaaaaaggaataaaaccgcttctcagaagacaattttccaacaagggacaccaaaaactggacaaaaacgtaaaggcccacttaaaaggcttctcctcttagtttaggctgctcatttacaaagagcaggtccactggttcctggagaacgacctagaggaagagtcccgacccggggaagagcaggcgcagagccgacccggaggaccgcccaaggggcggtcccgggagcaggggcgggagggcgagcgcagcaggcggaggaggccgcgggccccgtgcgcgcactcacacacgtggcgggcagggctgcgcggcgttccgaggagcctcgaccagaagcagcaggaaaaatgcgcgcagagttgagatgaccagcgagtagcggaaaggggaagggacggtacggggaaaggcatgcgatgggagcgggctggcttctagttttccttcctttctcctccaataactcaccaaggaaatctcactgagaagacgggggaaatgaaaggaaatgggggagcagtgtccacgagccgctaaagcctccacaggagacggagcaccgtacctgcagctagctccccggtcccgcccccgcgcagtggactctgcgcctgtgcctgcggcggccagcgtgcctccgctccacgcccttccccgagcggcctcgcgcagggcacgtgactctcctttctcactgtagcctatccgagcactccgatctcctcaggctcctcccctccctcgtctccctggcggcgctggccttgcgtcctcgtggtctcagccgctcgctccgcccacaccgcgattggggcctgctcacaaaaaccttattgggtgacgcctgcgcaccagctgcgctttgccgtctctactaggatttttcttttttccccagatacacagaaatagaaaagagcacagtttttaaggggacatcattttcaccccgttaactttcaaaggcacgtaaaaacagtggcttccaaatgagcttctctagcagaaggcgctgcagaaagagggaagaggggagacctagtttgcagtgctgcctgccacttcctcgttgcctagtaacggtttccacggcaaccgcacagtcaacgacgcttagcaatccggagagaaatagggtgttttcttcccgagagaggactgctaagagggggttaaagggggacgatgtgaaggagagaacctgtggtccttcagaaggcgaagaagaaagaaaggggaagcagtgaagaaasrgacggagatactgggacagggagaaaaaagttgtggagagtagcttttaaggagtcatttggtggccatggatccaacgtgctcttctgagtgcatttataacctcatacccagtgacttgaaggagcctccccagcctcctaggtatgtggataagcaaagactatcacttgaaacaagaatggggaatactcagtattaattaagcatacatatactggaatttttaataataaataaaatgtatttttgcctcgatgaagtagccttggaggataacttgttagagaaaaggtcgaaatatctaggtattcagcatctcacagttttacagagagggcagtctggcgctgtgagatgaccattttattatattacacttaacctcttattaatacggtatgtgattattgtgtaatttaattatatgtgatatacagcatagtatgaagtttcatgttgaaaagaaaaaaatcacaattctattatcttgtttaaggatacttgatgtttggtttcaggagttcggtgttgtatttctaactgcactactccctctctaatgggataggataggacttttcccccaagatttttatgaaatataaatttacatttgcttttgagcctcaggtttttgatcagtgaaacgaaatatctaccactattaggcagtttctaaggactttttcagatctaatggtttaaatggaaggaagaattggtggatagataatgaaccaaaaaatatgtaattgagttgaaattttacataggtcttagaacctcttaaattctccaaatctcaaaaacgtgcaaaggaagcacttcagttactcccatctgtagggacttcttagaacttacttaaatctgtggggagcaaagaaagtagtggagaaaatctcatttctcctaggacttgaaatgtttcctgtcttttaccatcatccttgtccgtatgcaagtcaaaaccacatttgaaaaggactggactaaaaatcgggcctagcaattaattgtctttgtgaactttagaataaagtttcatttgtttactgatctgtgagataaatgtaccagataatatccaaggccccttttagatctaatggtcaattatttttactagtattagggtaatagcttcaacaagtaggcagcttcttcaattttaagtatctggtttaaattagagcagtaactgtattacatctccattagcatatcaacatctagagactggaaagaggaatgtaaagtaagttatggcacagttgcagaatttattttcaaattttctattgttgcaccaacttttggtttcaaattcctgcatattacatgagataaaactcctctataacagattggtagattgtatttctatagaatattgaatttgagagttattttattaggtaggtattctgttctttggcaaattaaaaagctttactgcatctagacgattttttttttcaaaaaaaatttataggaacagtctttattcatttggcaagcattaatggagcccctattatgtgtataatattgcactagtatatctgttcttggtgctgttggagtgatagcacagacttcttggttttactatgaagaaatgagtagaagaaagatttatgattagaggaaatagaggcacccaaatgtgatgccaaaagaatcatttctgttaggttaaagtcaatttacactggcaagattctgacaactgcctggcttttgatctcccacgcctcagagtttaccgtctttttggggaactgaaatatgaacactaaaatttatcattgaaaaccataatgagagatgaagatactaaatgagaacttagaagatgaatgtatgtgaccaaaatcggatgaaaggcacttttctgcagttgaactattggctgagacttaagttatgaaagcctcagagtcaatgggaagtcatgattcagttttcaaaatttgagttactcatgatgcataagatggtttccaagattttcaccaaatctgtcaccctttttttttaattacttttttttcaagacggagtttcactctttttgcccaggctggagtgcaatggcgccatcttggctcactgcagcttctgcctcctgggttcaagcgattctcctgcctcagcctcccgagtagctgggattacaggtccctgctaccatgcctggctaattttgtatttttagtagggatggggtttcaccatggtggccaggctggtcttgacctcctgacctccagtaatccacccacctctgcctcccaaagtgctatgattataggcgtgagccaccacgcctggcctatcaccctttattgatgtctgcagttattgaatatctccagtcatcccctctttccattttgtttaaagcaatattccagttatggtctgaacagtccatgaaaccattatctcctttccataattcttggcacaatattttcatccattcagcctaagcttccataagcattttgacagtcatgtccaactattggctcacactaaaataccctgtatggattttgactaaggttggtctctcccatcctctaattatgtagctgattcttttttatctcaactcattaatctatggagatagttttgcatttgaatcttttatacattctgttaaccattctttttgtgtcatttgcaaatttaataaatatgtcttttatatctcttatctatcatagaacatagtatattagtctgttctcacgctgctaataaagacatactcgagactgggtaatttatatttcaaaagaagtttaattgactcacagtttcacatggctgaggaagccttacaatcatggcagaaggcaaaggcggagcaaagtcacatcttacatggtggcaggaaagagagtgtgtgcaggggaactcccctttataaaaccatcagatctcatgagacttattcactatcatgagagcagcacaggaaagacccactcccatgattcaattacctatcaccagatccctcccatgacatatgggaattatgggatctcatcaatttaatgtgagatttgcgtggggatgcagccaaaccatatcattctaccccagcccctcccagatctcatgtcctcacatttcaaaaccaatcataccttcccaacagtcccccaaagtcttaactcatttcagcattaactcagaagtccacagttcaaagtctcatttgagaccaggcaagtcccttctgcctacaagcatataaaatcaaaagcaagttaggtacttcccagatacaatgggggtccaggcattgggtaaatataaccattcgaaatagcagaaattggccaaaacaaaggggctataggccccttgcaagtccagattctaatagggcagtcattaaaccttaaagttccaaaatgatctcctttgactccatgtctcacatccaggtcacgctgatgcaagaggtgggatcctatggtcttgggcagctctgtccctgtgacctggcacagtacagcccccattccggctgctttcatgggtgggcattgagtgtctgcagcttttctgggtgcatggtgcatgctctcagyggatttaccattctgaggtctggagaacagtggccctcttctcacagctccactaggcagtgccccagtgggaattctgtgtggggggctcccaccccatatttcccttccacactgccctagcagaggttctccatgagggctctgccccgaagcacatctttgcctagacatccagacattttgatacaacctttgaaatctaggtggaggttcccaaacctcarttcttgacttctgtgcacccgtagtcccaacaccatgtggaagccaccaaggcttggggctcgcaccctctgaagcaatggcctgagctctacgttgtccccttttagccatggctgtgactcagggcaccaagtcccaagattgcacaaagcagcaaggccctgggcccagcccatgaaaccattttttctcctaggtctctgggcctgtgatgggaggggctgctgtggagacctctgacaggctctggagacattttccccattgttttggctattaacatttggcttctccttatgcaaatttctgcagctggcttgaatttctcctcagaaaattggtttttcttttctattgcatcatcgggctgcaaattttctgaacttttatgctctgcttccttttaaacataagttgccatttgtcaattttggcttttgttgccattgcttttggtgttttagacatgaaraccttgcccatgcctatatcctgaatggtaatgcctaggttttcttctagggtctttatggttgyaggtctaacgtttaagtctttaatccatcttgaattaatttttgtataaggtgtaaggaagggttccactttcagctttctacatatggctagccagttttcccagcaccatttattaaatagggaatcctttccctattgcttgtttttctcaggtttgtatctaattaaactagagcttctgcacagcaaaagaaactaccatcagagtgaataggcaacctacagaatgggagaaaatttttgcaacctactcatctgacaaagggctaatatccagaatctacaatgaactcaaacaaatgtacaagaaaaaaacaaacaaccccatcaaaaagtgggcaaaggacatgaacagacacttctcaaaagaagacatttatgcagccaaaagacagatgaaaaaatggtcatcatcactggccatcagagaaatgcaaatcaaaaccacagtgagataccatctcacaccagttagaatggcaatcattaaaaagtcaggaaacaacaggtgctggagaggatgtggagaaataggaacacttttacactgttggtgggactgtaaactagttcaaccattgtggaagtcagtgtggcgattcctcagggatctagaactagaaataccatttgacccagccatcccattactgggtatatacccaaaggaccataaatcatgctgctataaagacacatgcacacgtatgtttattgtggcactattcacaatagcaaagacttggaaccaacccaaatgtccaacaatgatagactggactaagaaaatgtggcacatatacaccatggaatactatgcagccataaaaaatgatgagttcatgtcctttgtagggacatggatgaaattggaaatcgtcattctcagtaaactatcacaaggacaaaaaaccaaacaccgcatgttctcactcatagatgggaattgaacaatgagaacacatggacacaggaaggggaacatcacactctggggactgttgtggggtgggggtaggggggagggatagcattaggagatatacctaatgctaaatgacgagttaatgggtgcagcacaccagcatggcacatgtatacatatgtaactaacctgcacattgtgcacatgtaccctaaaacttaaagtataataataataataaaaaaaatgagttccaattccaaaccatatctttgtgaatacataaaactgaatgcttttaacactactcaagtcacctcttgaatgttttgccgcttagaaatttcttccatcagatgcccggaatcatctctctcaaattcgaagttccacaaatctttagggcaggggcaaaatgccaccagtctctttgctaaaacatagcaagagtcacctttattccagttctcaacaagttcctcatctccgtctgaaaccacctcaacctggactttattgtctttattgctatcaacattctggtcaaacccattcaacaagtctctaggaagctccaaactttcccacatctttctgtccccttctgagccctccaaactgttccaacctctgcctgttacccagttccaaagtcgctttcacatttttgggtatctttatagcagcatcccactctactggtaccaatttactctattagtctgttctcatactactgataagtacatacccaagagtaggtaatttataaaggaaagaggtttgactcgcagttccacatggctggggaggcctcacaatcatgggagaaggtgaaggaggaacaaagtcacatcttacatagtgggaaacgagagtgtgtgcaggggaacgcctctttataaaaccatcagatcttatgtgacttattcactatcccaagaacagcatgggaaagacctacccccatgattcacttacctcccactgggtccctcccacaatatataggaattatgggagctacaattcaagatgagatttggatggggacacagcaaaaccatatcacatggcaagtactttgctaggctactagacacctctctctaggctgatagcaatacttttgagtgttcagtcaccaaagtaaacctattaactcatatttctctaccttatcaacaaggatttaacaagattctctgctaacatcaacatgcaaattattatgtctaaaatatttccctaatctattaatcacataatcttattttttaattgattttcatttgtggtgactgaaactccaaatggccttatgcaatcattgcttctctatgaatgtaataaaaattctctctacaactcttacagaaattgtcctcaggctcaccagtgtagaatttctgcatgcatacttttttttttattatactctaaggtttagggtacatatgcacaatgtgcaggtttgttacatatgtatacatgtgccatgttggtgtgttgcacccattaactcatcatttacgttaggtatatctcctaatgctatccctcccctctcctcccaccccacaacagtccccggtgtgtgatgttccccttcctgtgtccatgtgttctcactgttcaattcccacctatgagtgagaacatgcggtgtttggttttttgtccttgtgatagtttgctgagaatgatggtttctagcttcatccatgtccctacaaaggacatgaactcatcattttttatggctgcatagtattccatggtatatatgtgccacattttcttaatccagtctatcgttgttggacatttgggttggttccaagtctttgctattgtgaatagtgccacaataaacatacgtgtgcatgtgtctttatagcagcatgatttatggtcctttgggtatatacccagtaatgggatggctgggtcaaatggtatttctagttctagatccctgaggaatcgccacacttccacaacggttgaactagttkacagtcccaccaacagtgtatttaatgcagtgaacagcattagtttttgtttaatgtggttctgtttttcattgtgattaattgtaacacataatcagtgtttcatttttggagcttcccatccttcttggactactttctgctttattcagtgtcaatactgttaacacttacatgttctgaagtctttataacatctctttgtttaaagtatggttatgtatctgactttgctgagaaatctgttccttgactattaggaactcttaggtgacatggtcattttctcctgatccagagtttcttgtcttacccactttgctaactaattacagccaagaatttaatcaaggaaaacagtaaccctttttaattaacttatattcaaagaaagtctagactattccaaagtctctttttgtttgtcatgatgacattttatgctaaaattcccattgctgcaatatatggtctcttagtattatgagtagtgttagaagctattttagtgttttaagtgtttagtgttagaatttaagtgttagaatgtatttttcatctggctaggcagtctctacagacccacaagactacttctcttcatctcttacattttgtccaactgcccttctcatgcttatatatctcatatatttatatttattcatattatatattatatatacatatatataatatatcacaggcacacaaatgaagatgtgttataattagtagaattacaattgaaggcctggaaaactatgtggttgacaggataattcaaaaggcacctttcccttcaggcatatgggtgaggggagagacaaccagatacaggatttttttcagcaaggaacattgtggcttccatatgcatttactggcttaatgtttattttgagttactgcctataattcagaaatctatacgtggctgggcgcagtcgctcaagcctgtaatcccagcactttgggaggccgaggcaggcgggtcatgaggtcaggagatcgagaacatcctggctaacatggtgaaaccccgtctctactaaaaatacaaaaaattacccgggtgtggtggcgggcgcctgtagtcccagctactctggaggctgaggcaggagaatggtgtgaacccgggaggcggagcttgcagtgagccgagatggcgcctctgcactccagcctgggtgaaagtgcgagactccatctcaakaaataaacaaacaaacaaataaataaataaataagaaacctatacataatataacgtggtaaaaggcattagcacacctctctggcatttcatatatacataaaaatgttgagagaagaaaatatgacaacaatactccttaaaatcagttgccagggaaatgtataagtgagcttttgtgaacgttagactcattttttagattattcggttacagaacaaggtttaatatcttaagcaatactaacaatatattgtatatgagaattcatttttacagatcagggaaatatgtcagtctgttataatcactgtctagacatgatgactcaaatttttacagaataagactgtgtctgccaggacacaggtaaaatcaagtaaagggttaaacagtttcaatttttaaacgttttatcaggatggatatccaatattcataaccacaagaatactattaatagcaatatgttcaatgtattagaatttaaaacgtgccagttattgatctttttcacaagaatcctatgggataagtagtattatcccattgttacagaagaaaaatctcaggcccagaagttgaggcaatgaggaaaaacaagggctgagatcgagacacaaatctaataccaaagctcgtaagtttaattggtttgcacagttcttttagcctgagacagtaaaacaaactgagtcctttttgcttcagtaacatctataattgtttagtttttgataatttattatatatcagatactatttcgtgtttatacacaaccttgttctaatgcagtgaggttttttttgatgaggctatcaaagcaaatgggaaattatgatagaaaagtaaggtagagctacaaatgaggacctacatgaaatgtatgcttcacaatcatgcacgtttgcttaaagtctgaaacaaatttgactctattagttaagcagccagcccatcaaggaagaaagatccttcccatgcttctttaaaaatcaattacactctaagtcatattgtccaaagacaaaagcaaagcagtagtcacagaggagcacaaatgttctcggtgtgctgccacaaatacacttcctccaggattcacggagagaggagaccatgtgtgtaatacaataaagatttcagccgcacttctacattaaatctgctgagtttcataagtctactgttgccctcattatagaccagtgttccagtacgataacataactaaacaaaagcagttttggagacagcaatgtgttgtgctctgggtgtgcagctatctgactgcatagtttaattcaaggatagattttcctgctatctagatcagcacagtctaatagaaatgtaatgagagtcatgtatgtaatttaaatttttctaatcacttttaaaaagtagaaataacgaaaaatttactttatgtagtttatttaatgcaatttatctaaaatactatgatttccgcatgtggcaccagccacatttcaagtgctcaatatccacatgtggctatattacacagcacagatgtagatgaatacattaactacatactcttttgatattccacatattatttcactcaacagcttgtgagaggtactgagcagcactaagatcatcattatactcaatgacatatgcctgtgttgtcaagtaagtgcagatcagagctatgacagacaaccaggctgggggaagaattggcatccatttttgaaaatttagttacttgatatagacatgagcctgaattgaacactctcatttcaagtctgtaggtggacttaagggatatctgtgtacgtgtaaaaattctcctcaagaaataatttggatagctttctaacacagcctaggctccagagttcagagttccacacgatagtgtaatgctgcagtaatactgggaaaaattgaaaaagaaaagttgttaatccttgatgcctattttgcccattagaggaaaaaaaaatctcaattaagcactttcaaactatcccagctttttgagtaatatcatttccttgtgtgccctttgaaataaatggtttttaaaatgtaaatttactgtcttaatgatgggacttactatatggtgattagtaagtctaatcttaactgtatggtaaaatatagttttggtatgttttctgaagatgacaattttagtttgagaataacttatctttagcccatatctcataattctaataataaatagaaaatagagccaattatccatgacactgcctgacttcaaactatactacagggctgcagtaaccaaaacagcatggtactggtacaagaacagacacagagatcaatagaacagaatagagaacccagaaataagactgcccacttacaagtatctgatccttgacaaacccgacaaacacaagcaatgggaaggacttcatattcaataaatggtgctgggagaactggctagccatatgcagaagaatgaaactggacccattcctctcaccatatacaaaaattaactcaagatggattaaagacttaaacgtaaaacccaaaactataaaaatcctggaagacaacctaggcaataccattcaggacataggcacgggcaaagatttaatgatgaagatgccaaaagcagtggcaacaaaagcaaaaattgacatatgggatctaattaaagtaaagagcttctgcacaggaaaagaaaccatcaacagagtaaacaacctacagaatgggagaaaatttttgcaaactatgcatctgacaaaggtctaatatccagcatctataagaaacttaaacaaatttacaagaacaaaacaaataatgctattaaaaagttggcaaaggaaatgaacagacacttctcaaaagaagacatacatgtgaccaacaagcatatgaagaaaagcttaacatcactgatcattagagaaatgcaaatcaaaactacaatgagataccatctcacaccaatcagaatggccattattcaaaagatactggtgaggttgtggagaaaaaggaacacttactcactgctgatgggagtgtaaattagttcaaccattgtggaagacagtgtggcaattcctcaaagacctaaagatgggaataccattcaacccagcaatcccataactggatatatacccaaaggaatagaaattgttctattataaagacacatgcatgcctaggttcattgcagcactattcacagtagcaaagacatggaatcaacctaaatgcccatcagtgatagactggataaagaaaaggtgatacatatacaccatgggatactattcagccataaaacaagaatgagatcgtattctttgcagggacatggatgtgtacatgtaaaaattatccaataaataatttggataactttctaacacagcctagtctccagagttcagagtcccacacaatagtgctgcagtaatactggctggaggccattatccttagcaaactaacacaggaacatgaaaccaaaatactgctaaattctcacttaaagtgagagctaaatggtgataacacatgaacacatggaggggaacaacacaccctggggcctatcggaggctgggggtggaaggagggagaggatcaggaaaaacaagtaatgagtactaggtttaatacctgggtgatgaaataatctgtacaacaaacccccgtaatgcatgtttacctatataacaaatctgcacatgtatccctgaacttaaaagaaaatagagccaattatctaataaagtcaccactagatctttgtaataaaaccacaccattcagaaaatggagtaaaatgcagctatttaacagaaagaataagatttatgtgtattaagatatcacactatattaagttttaaaaatctagttgcaattcttacagaaatagaaacacaggcttggcgcagtggctcacatctgttatcccagcactttggaaggccaaggcaggtggatcacttgaggccaggatttccagaccagcctggccaacgtggtaaaaccctgtctctactaaaaatacaaaaattagccaggcatggcggtgcatgcctgtagtcccagctactcaggaggcagaggcatgagaatcatttgaacccaggagacagaggttacagtgagctaagatcacaccactgcactccagcctgggcaacaccactgcactccagcctgggcaacagagcgggcaaaaaataaatgaataaataaataaattaattaattaattaattaattaaagaaacactgaaattgaatttattctggaaaatttattggagagatggaggagacatagattttaatttacttaatgttatttttgtaatttggaaaatatcatttatataaaatagagtatcttattttctataatagatggacaggctttcagttcatatacctacacaaaaatatattgaatcatgggtttacaaatttaaaagaggtggaagtaaagacaccttttttttttaccccaaatgaaattatcttattaatcaygagaccatatctgccagccccaacttctgtgggcattttaaggcacagatttggtttgaacattatttcttgaaactatctaatgagctcattcagtttggactataattgattcccagcctttaagttcaggattgaggcaaggctcctaaaaggaaaaaaacaataatgtttcttcaaacaaatttatctacataaggaagaagataatacaagttgttacaaaagcggtatagctgaactgctttcaaccaaaaatgggatttatcttcttgacttaaacaactagaacaccagaaaaaaaatatatgaaacaacagttatcagactctgaacaataaacaacatagagtggtcatctataaaagaagagaaacaaatgaggcaagccctacgactgccccagcatactctctggagagaaattccaggccaagatccagaagaaaaaattaaaacaaagcctaggagtctccctgagttaaggagacagaattcagagtttgcaaaggccaaagctgctagaattcacagcacagagtaccagagaggagagttgcatagagagaggaytgtggaaatatgaacaaggagttccctaaagtctttggttgatagcacatgtatgtaatgaaacaaccaaggccaagtaaataaccaacagaaagcagtagtgccaggtaaagttcgtgttcccaccagcccaggtggagacacctcctaatacacagggcattgagtagtgcactcagaagtatattgcctcagtagtggggccaaattagaaatagactaaaagcacttgtggaattaccctaacacttaaagcaagccttaaaatgatcacactgtttccaactatcataactgaatcccagaaaaaagctaaggaagaaatttaaagaacaccagaaagagaaaaagaagagaaaaattcagcaacaaacaatgtaaaattcacaatgtttggcatccaatcaaaaattaccaggcatgcaaagaagcaggaaaatataatgcataaccaagagaaaacatagtaaagacagacacagaaatgacacagattagagaatcagtagacaagaccttaaaacagttattttaaatattcatcatgtattcaaaaggtagaagaaagcatgaaccaagatggggaaagaaatggaaggagagatccaaatctaacttctaaccataaagaataccatatacaaaatgtagctacatgtaatagattggattaacgcagctaagacactgaaaaagaaaatttagatgaatttgaagacacagtaatagaacaatgcaaaatgaaatacagagaaaaaatagactgaaaaagaaagcagagaatcaatgaggcttgaacaatatcaagcagtcaaagaatcatggaagaggagaaaacggatgaggaaacagaagaaatatttgaataaaggtaaaaaaattgtcaaatttgatgaaatctcaaaatccaaaaatccaagaatcacagttaaccccaagtagaaaaaagaataccaagagacattaccatcaaatttattaaaactattaataaagagaaaaaaagtttaaaacagccagaggaaaaaaaagaaaaattatatagaagaagaagaaaaaaggacagtaaatttatctttagaaacgatggaagccagaagtttaaaaatgtcctttatggagaaggaatggtaccagttagaaatttggacttatacagcagaatgaagaacactggaaatggcaaatatatgggtaaatattcaagattttttcaaatgtatttaaaatacaattatataaagggaacataatcacaattatttatggattttataccacacagaaaagtaaaatatattacaacactaagacaagagtggggttggatgcaagtattcttttgaaaggttctcataccacatgttaaatgctataatattgcttgaaagtaggctctgataagttaaacctgtatactgtaaagctacagtttccataaaaccaaaccaaacaaaacaaaatgaaaagcaagatagaatgagcaaggggatatgtaaaaaaacagcaagctggaaactttaagcagaaacaaatttttataatcacattaaaagtgaaaggtataaacataccaaacaaaagtgattggtggctggataaaatttctatgcagtctataggaaaactccaacaagtagaaagtccaagaatggaaaaacatatactattacaaatcaaagggatgcttgattagctaccataatgtcagacagagtagattctagagcacagaattttaaaaggaatagagtgttattttatagtgatgaagtgatctgtttttcaagaagatataacaatcctaaatgctatgcacctacaaacagagtttcaaaatacataaagcaaaaactattttaattgaaagaagaaatagccaaatccacaattacagtcagagaccttaacatctctctttcaataattagtagaatagacaaaatcaggaaggatacagaacatttgaagatactttcagtttgacctagttgtcatttatagaacactccagccaacagcggcacaacatactttcttttcaagtgtatacagaacatttactaaaatagaacatactttgtgccataaaacaaatgtcagaaaattcaaaggaattgaaatcatacaaagtatattctctaaccacaatagaaatatatctgaaatcaattagctatctggaaaatcccaaatctatgaaaactaagcatgtctaaacaaacttctaaatcaaagaagacatcaaaagtattaaagttcaaaataaaaaacctaaacttgtatcttaagaaagtaaaaaaagaaaaacaaattaaaaccaaagtaagaagaaataataaagataagcacagatatcattgaaatggaaaacatgaacattggagaaaatcaatgaaattctggttctataagaagattcataaaattaatagacccctagccagactgatcagcagagaaagacagagaacacaaattactaacatcaagaatgagaggggtgacatcactatcgatgctacagatgttcaaaggataataaggaaatactatgaacacttttgccctagcacctctttcttagggcagagcttccatctagtttatctaagtctgatggacagggctcaggtaagtatgttttatgattatgcttttccatacgaatatagacttaaataaattaaaaatgtaagatttaaactttaagtaaactttaggtaatttttactagaagtataaatgctacaacttttaaaattcaattttaggtacatatccatttttaaggcaactgtaaaagatgacatgcaaaaagctaaaactgcaatraaaactatgggaccagcaaaagttgaagtaccttctccaaaggatttcctaaagaaacattcaaaggaaaaaactctaccacccagtaggttttatcatgctttatttttaatattaaaagcattagcaggtgatttaactattattttattgttgatgaatattaaacatgcacaggtgatagcagctttacctcatattaaacagaatttgactaggagaaagtggaagtagagaattgggtagaaaaatagaatggagtgtgataaattgcccccagaatagactttagattgggtttggactatccaatgaagcccacatgcatcaccatcttagtccctagctgtggggcttcaattataaacaacaattataggaaaagtcaagaccccagggacagtatctgactaatgggcaagattgcccagcatctaaaccctgtctggccttttctccaagagatgaaaattacaaccattactaccagttgttgaagcaactactgggctcattttgagtacgggcttttactctcccagacctttaagactaactggactgcaatgagttagatgtaatggaggagacttcatgaataagtggtagaaccagcttagggccccatgcttattttaatgctgtgctcttgctgtactaaaatttttaatttttgatcaagtagccttgtgtttttattttttactgggcctcaaaaattatatacttgatcccagttatggagtcttttgaatgatttcaggaaagaaagctatcagggaaagggagagtagatgaaaagtgatgtgtgacaggtatgtatggaagcaatttcttcatagcccaagtatgtcttcccagatgtcttagggcaataaagaaaagagagcacctgggcaacaaagcaagaccccgtccgtacaaaaaaattaaaataaaaaaaattagctaggtgtgatggcatgcacctgtagtcttcactactctggaggctgatgtggaaggatcgcttgagcccaagagttcgaaactgcagtgagctatgatcaagccacagccttctagcctggacaacaaagtgagaccccatctcaaaaaaagaaagagagagagagagagagagaggaaggacggaagggagggagagagggaagggaggggaggggaggggagaggagaagagaagagaagaaaagaaaagaaaagaaaaaagaaacgagtctgtctcttcaaaatgttggctttttatgtctgctggcattgaggaaataatgcaacatctcaagcccggctagcgatgtacattttaacaaaagtgaaactacttctctttatggcagtatttaatgtccccaaatcctctctcaacccatatctcatgaaaaaaggtgagggcactatcaggcaagatggcaagatggaagaagcaagtgtggaaatacaacattcatgcttaattcgtgacttcagaagtctcttttgtatcttcctctagtcttggcctgttgtgacccagcattctatgaccaacaataccatttgagaatataggaaaatgttaaaatggaatttgatgctttcaatgccttaggaccactggtatcccttgggtcctcatatagcctctctagggttaaacatatgatataacacaaacatatatatatatatatataaatcctttgtgtcaaataagaaaaaaggaagaagcctatcattttgtaaacattgtaaggcaaaagcaaacccaaaatttcattggcctttagaataattcatcaattcagggtattagggctgggcacagtggctcatgactgcaatcccagcactttgggaggccaagacaggaggactgctttagcccaggagtacgagaccagcctgagcaacaaagtgagaccctatctctataaaaaattttttttaattagctaggtgtgctratgcacatctgtggtcccagctatatgggaggctcaggtgggaggatcacctgagcccaggaagttgaggctgcagtgagctatgattgcatcactgcactccagcctgggtggcagagggagaccctgtctcaaaaaaagaggaaaaaaaaaaaaaaaaggaatgcagggttttgcaaaagctttaaaaactcggtccaatgagagttctggaggacagttctggagaactaggagtccaacatcaagatgtcagaggattagttgatttttgcttttcttttttaggagtatttttgtttgtttttatttttggagatagggtctatgttgcacaggctggagtgtgtggtggctattcacaggcatgatgaaagcacactgcagcctcacactcctggcttcaagcaatcctcctgcctcagcctcccaagtagctgggactgcaggcatgcaacaccacacgcagcagggttggtttcttctaaagcatctctcattggcttgtagatggttatcttttctctgtatctttacgtgttcttccttatatgtatgtctgtgttcaaatttcctcttctaaggacaccagtcatattggatcagcgccttctctaatgacctcatcttgacttaattacctctttaaagacctttctacaaatacagttatattctgagatactgggggttagggcttcaacatatgaattctaggaggacataactcagcccctaacaagaggctaatccagttcatagacttttaactgtaagtattggctttgctgataataaaagttatataaactaataaaaaaggtcaaatgatgcagaaatgaataaagtcagtccttagtaattgtgatggggttaaaattggaaaaggcattttcaagacagttgttgctttcagttcttaaaaataaattatttcacatttttgcattgtggcaaaccatttggctatattaaaatagatcaatgggaatgatcaaactgaagaggctgtgtaaaaacggccaataagcaagaaatacttcttccttgtatttatatactgttcatatatatatatatacacacacacacacacacacacatatatgatcttttttgagacagagtctcactccgtcacccaggctggagtacaatggcatgatctcggttcactgcaacctccgcctcccaggctgaagcaatcctcccacctcagcctcctgagtagctgggactaagggtgcacactatcatgcttggctaactttgcattttttgcagagatggggtttcactgtgttgccgagactggtctcagactcctgagctcaagcgatctgcccacgtcaccgtgggccaccgtgcccggcctcctcaacatattaattgattatgttgcccttaatttatttccattttaattactgactttttttctttttaaaaaattattttattgaggcctgattgacaggtaaaaagctgtgcatatttaatgtctacaagtcaatgagtttgggggtaagcataaacttctatcttaaatatttaaatatattatgactgcaacttcaatatacaagtggtgaaatatctggatattataaatagcactgagtagcagtgtttgtagtttaatattaacaaagaaatgttatatttaacagaaaaaaactttgatcggaacgtgcccaaaaagcctgctgtgccattgaagactgatcatcctgtcatgggaatacagagtggaaaaaattttataaatacaaatgcagctgatatcatcatgggagtggctaaaaagcctaaaccaatttatgttgataaaagaactggagacaagcatgatcttgagccttcaggactagttccaaagtacatcaataaaaaggtagccttgtggtatattaataagagggctgaaattcaaataatttaaatatggtgttcatgatgatcatctatgttatcattattagtgctctcattggacacattgtctactttgctgattctcattcttctgcaatctgtgtttggtccaaatgtaatgggatgaagttacaaagaacccatagtaaacaattccatatagttcagtagataaaagttattgttttccttaattttgattattaacatatttaacaattttaataaacattctctgaaagatatttttggttagttggaaatgtcactaaaagcagtcattactgtaaatctagaaggaataagctgtcagatggtcttaagatttagtcattaattgcagtaacttggcagctgaataagaaaaatgaagcagaatgcagctttagagccatccatctcatcagtgtagtataaataattcacattcctattttaacatgaatatatttatttggttttggttttgggtaaagacttgaaagtactgtacaataatctagtccttttgggtccttcatttgtatctgaaaaggtgtgtaatttcattggtgaacattatagtttaaatatagattttttttgagacatattctcatgctgtttcccaggctggagtacaatggtgcaatctcagctcactgcaacttccaacttccggctcgagtgattctcctcactcagcctcccaagtagctggaattacaggcatgcatcaccaggcctggttatttttttgtatatttagtagacagggggtttcaccatgttggccaggctggtcttgactcctgacctcaagtgatccacccacctcagcctcccaaagtgctgggattgcagacataagccactgcacccagccaaatacagatctttaaaataaaaaagcttacaaaaaatcttatttaatgctactttattttgcgcacttataaagcttaaaagtgcttgaaacacacaaaatatgaatgcaggctgggcacagtggctcacaactgtaatcccagcactttagaaggccaggaggattgcttgaggtcaggagttcaagtccatcttggccaacatggtgacaccccatctctactaaaaatacaaaaattagccaggcgtggtggtgtgtgcctgtaatcccagctactcgggtggctaaggcacgagaatcgcttgatcccaggaggcgggggttgcagtgagccaaggtcgcgtcactgcactccagcctgggtgacagagcgagactcggtgtcaaaaaaaaaaaaaaagagtgcagaattctaaataataataagttgcatcaagaagaaatgaaggaagggagggagaaaggaaaggaaggaaggaaaaaggaagagagagataaagaaaaaggaagagagataaagaaaaaaagaaaagaaattgcaatagtgatgtacagggacctaaaattgaagagtccagtgatctaccatgataaatccaatgccagtggaaaatcaaaacaggaccctcaaggctgttttcagaggacactgtcttctcaggaatctaggagttcccaggataagccaataaagttacttcaggcttctccaggtacttcctccttctgtggcccctggaaactgttttatagtcgttgtcccacaggatagggaaaagtggaaaactcactctcatggctcttaaagccacttccagtccattatttctccatgatcatatgaaaagtctttactggtcatgccaccacctgtcacacactctgcccctcccttctggctgctctctaagctgtccacttgaatgcattttctaccttcaacaggaaatttggagtatccatcatggaaacagaaaaataccagagtttaccaaaccatgaaagcactgtgcacctaatgcccttttggtgttgctgactaagcaatcagtgctcatgaaagacttactcaatttacttttcccttatcagagttaagttttaaagatctatcattggtaggtgagatagtaaataaattcttttaaagtcaatgtcatatttttataaaatgagtgaactcccatttcagctccaagtgaattatatgccattcataccatgagaaacaatttctgaaaacaagcaaggatagatgatcacatgaggtatttagcaataccagtaaagacattctttcaaagtctaactctgccacttagtaactgtgatttccaacaatccattggatttatcacagggttgtagtgaggattaaattatataaagtatattgagcacttgacacaaaatgtgacacctaataaaagaacaaagagtgaatagtataatatatgcaattttattaacagtatgcattagcctccggtgattcagcccataggaatatttcagatcattgaagcttttgctcatttgtgagttttttttctgaactgtatcacaccattccctttctttttaaaaacacttaatttaattttttttagagatggagtctcactatgttgcccaggctggtcttgaacttttgggctcaagcagttctcctgcctagctgtcccaaagtgctggggttacaggcttgagccactgcgcccagtcattctctttcttaaacagagtatgccaaatataatttaatctttctgtgatcctgcagaatcatcatgatgaagctccattattgtactaagctgtaatgaggtgtttccttcagtgtttcctgaagtggattggcctgtctcactcactgcaccagctgaccagaatactggcctcccagagtctatttgtattgtcctctgcagcttccagaacacatttatatctaggatttctatcccttgttcagtcaggatgggttaagttacactgtgatgacaaacaatccccaaatttcagtaacttaaagcaacaaagtgttattgtttgcttttgccacgtgccctttgagggttgttacaggctctgcttcttgtccttcttccaggacccagaaaaatctaaacattgcttgtcactagaccagacaggaaaagacacagcaagtcatccactaattcttaagactcctatcgagaagtggcagaggtcacctccactgacactgagcaattcagggcatatggctacatcttactttatgaggacaacacaggaaagtgttgtcctaccaagtgtctagaaggagaacagaatatttgtcagaattttaatgactaccatacctcccaactgctgcttcttcggagagttcctccccgacctccttatttatctaaaatagcccctattattttcttttcccccactatccttctttattttacttcagaacacatacatattatttcattctctatttttggtgagtctctgtcaccatagaatgcaaattccctgaagacggaaactttgccttttttattcactagtattcctagcaccaagtacattctcaaacatcttttgaagaaggaatacatagtaattctgtttctatagatggtgaaatcaaacgcatttactaagctgaaagaatcacagctgatggcttcactgtcagtcgttgtgacatgggaaaattcccttattcccctcgcagagtgtaccatagggctgtggctcacttcttcagtgccccactgctcacacttctagggggagcatgccgaagggcaggttgtgaggctctgactccaaagcagggtctatgggtcgatgtttacagctcctgaagccgcagtgggcgtgtgttacagggtgctcttttggtttagctgtccataggtggcttgtgtttgctcaattagactccctgccttatgacaaggacagagggcttccaaaggactttctgtatcccaggagtcttgccttggtatacttgaagaattggatcacacgtgggcttggagaatgagtgcaaggttttattgagtggaagtagcttcagcagatgggagagccagaagggagatggtttttccctggagccgggcagctctgtggcccgggctctcctcccaccaccccggccaaactctgcgttgttccactgatcgatggcctgccggcatgctggtgcccattggtgtgctcttttgttggcacgcccctgtcaacagcctccacttatacgttcttccattgatgtgttcctctcgacgtccagccatttgtgtgcctgcctgctagggtctcggggggttttataggcacaggatggaggcataagttttcaaagactttgtcttttctttaacgagaccacgaaaaagagacttcaaaatattcaagatatttcaggtaaaaactgaagcatgtagaaggtagaaggtagaaaagccaactcttgaatatcttattcaagatatttcaggtaaaaactgaagaacgtagaaggtagaaaagccaactcttaggagtaaagtatcagccaggagcaggcgtgggaaacattcagaaaagggaaaacaagcaactgcaataacaactccatttatttatgtatttagagatggagtcacactctgacacccaggctggagtgcagtggcaccttggctcactgtaacctctgcctcccagattcaagagatttttgtgcctcagccacccgaatagctgggactactggcacatgccacgatgcctggctaatttctgtatttttagtagagacggggtttcaccatgttggccaggctggtctcgaactcctgacctcaagtgatccacccccccacccctcagcctcccaaagtgctgggattacaggtgtgagccactatgcctgggcaataacaactccattttaaaaggcaggaatctactagctctcaatggagggaaaaaagtcactgaattttgtcaatttacagggttttgaacaaaggatttagtctgtaccatttctttttcttccatcatcagttgatacgtacccatatgtaagattgcatacaaaatattgattacttttttctgcaaaatctttttaggattatggtgtcacacctgaatacatatgtaagcgaaacgaggaaataaagaaagcccaagaagactatgatcgttatatccaggaaaaccttaagaaagcagctatgaaaaggctctccgatgaagaaagggaggcagttttgcaggtgtgtgttctgccatttacattcatctgtaactctttggatcatctctgaaagaaaggtgtaccatcactttgatgattaaagtcagcacttggattttgaaatcagaacaatctctttgggttacagttaaaaactacatacagcaaagctgactctttggagagagcaaaaagttgtgatatagggattcatttaataatattttatttccaatttggtgaactgtttttttcctgaactagtgttgtaaggaagcctaccttcctctacaacgaacatgcatgaaatgaagcaaataaagcatttttattttcatttttatgcccctgagtttgtgaaaaataatattcataaattagatatttttcactagatggagctctagaataattgaaactgtccttaaaacaactttttttcctttcctataaggcaaatgtccaaaattttaaataaacaggtgctaggtttcacatatgtttttcttgtttttaattacatagacttaaagatatatttatattggattttttaatgcagggcttttatctgaagcatttaaaatattagggggtgtaagagtttctgcttcatcatttgtatgagcgtttaattaaacacctctttgtactttttatagtcatactgtctcttatagaggcagaaataatacttaattctttgtttatttttcattttgaaagcatcccacgaagccatttctagtttattattaatctctgttgaaaaatggattcatatgctgttacaacttctgaacattttatcaatgtcatcataatcatcaataaacatttcttaaatgctaaaccctgaggatattttaaaaggcataagattttttaaaatatctgcagtggagtattgtgcaatttaattagtgagaggtactatggatctatgtacatgtatagatgtgaatatgtgtatgtgtgcagctcttaagtttcataaggttccaaggcactagtcacccctggaggattgtagatcgttagctgggcctgaaaatgtagagtgacggcatgtcccagacagtaggagtggctcaaaggcaaggacggtgtctctttgctgacagcagcatccccagtgcctagcacagtgcccagtgaaaacgcagatgttcagaaatggtctgctgcaaaggaggaaggcagacaggcaggaaggaaggctggcagacatggaagtgagaattggcatgtcattttcagggagagttctcgtctgtggcccattctgtctctctcatttggattttcccattttcagaaagtacgtgcctttgtgaaagccaggtttttacacctaaatgatgctgaaaaataagaatatgacaaagaacttagaagtgacaggtccttcccttctgtgtctttttggctgtaggagataagcagccctcagcttcccattacggtcgctacagagttaccctttgatgtgacgatagcaaatcatccactggacgccttatgagccagggagcagagctgccatagtaacaaagccaccggctggcctcctgacgagccctgagccacacttccttccctaggcaagagttgcatgtagttcgatgacaatctggttgtatgtccctgagtaagccacattctgctcattcttcataaaataacagtctcattatacctggacaggatcatctggtctagtgattccaaacttctcatttttaaaatgaggaatatatatatatatacatatgctgtgtcactctacattttcaggccagctaaagatctataatcctccagtggtgactagtgcattggaaccttatgaaactgaggagctgcacacagacacacattcatatctctacatgtacatagatccgtagttnnnnnnnnnnnnnnnnnnnnaacttagaagtgacaggtccttcccttctgtgtctttttggctgtaggagataagcagccctcagcttcccattacggtcgctacagagttaccctttgatgtgatgatagcaaatcatccactggacgccttatgagccagggagcagagctgccatagtaacaaagccaccggctggcctcctgacgagccctgagccacacttccttccctaggcaagagttgcatgtagttcgatgacaatctggttgtatgtccctgagtaagccacattctgctcattcttcataaaataacagtctcattatacctggacaggatcatctggtctagtgattccaaacttctcatttttaaaatgaggaatatatatatatatatatatatatatatatatatatatatatatatatatatatatatatatacatatgctgtgtcactctacattttcacgccagctaaagatctataatcctccagtggtgactagtgcattggaaccttatgaaactgaggagctgcacacagacacacattcatatctctacatgtacatagatccgtagttcctctcaccaattaaattgcaaaattctctatttatacgtattttatatataaataaattatatataacatatgtacaatataaaaaataaattttacttatatataaatatatatacacatatataaatatatacacatatatacatatataaatatatatacacatatataaatatatatatacacatatataaatatatatacacacatataaatatatatacatatataaatatatatacacatatatataaatatatatatacacatatatatatatatatacatttttttttgagatgaagtcttgctctgtcacccaggctgaagtgcagtggcatgatcttggctcattgcaacctccacctctcaagttcaaatgattctcatgcctcagcctcccgagtagctgaaactacaggcatgcaccaccacgcccacctaatttttttgtattttttagtaaagatggggtttcgctgtgttgcccaggctggtcttaaactcctggcctcaggtgatccacccgccttggcttcccaaagtgctaggattacaggcgtgagccaatctgcccagccgttaatacaaatacattgtgggcccctttgttcattcatttatttattgaatatctagtgtgttccagccagagggatactgtacagagcaaaataaacacagtcctcagtgtcagtgaacttagagtttgattttcatttctctttggtcacaaaactatcaagtacatcaatagggactaaaactcatttaccaattgccaggctggtgtttcccccactacagaacacatacttgcagaggaggtaacaaagggaggctacttcagtcagggctccagcaggaaatcgaaggcacactcagctaggacttggaagagaatttatgtttgtttattttatgtatttatttgagacagtcttgctctgttgcctaggctggagtgcagtggcacaatcacggctcactgctagctgggataccaccatgcctggctgatttttttttatttcatttttttatttttagagagggagtctgactatgttgcccaggctggtctcaaattcctggcctcaagcaatcctcctccctcagcctctcaaagtgttgggattgcaggcatgagcagtggccactgaagagaatttatgaaggaattattgacagaagtgaagtagggttaagggaaccaacaagaagcactgaggcaccccaggagcagggacagtaggaatttaccaccacctacgcttgaaaggcagcaggcacaagaagcagtgttgtcagaatccagtgagagctggagctgggctgagggtcatagtcacagatgaatgcagctagaacccatgtctagactgtcctaggagaggaggagaaatgccccaacctcactctccaccctccagggccttctgtggctgaactcaggccagagggcgaaagagctgggagcaccccacaaggtggagaatgtttgggggtgggcgagggtgcaaaaggagcatgaaactgaaaacttcttattataagatcacttctccctgtctgaattttttccaaaatgaacgatattatttcagctttaaaatagaagagaggaaaattaagaattaacaataagggaaaatcactattgctgcaacacatgaagtatctttttagatgaaataatgaaaaaacctcttaaagtcagcacgtagcgtatttcaatataatatgaaatattagctacatttagtttccatccctggctgttgactttgatccaaacgttattgtacacactggaagataaaagcaaactatcctttaaaagaaaatacagagaaaaactgtagctgctgtgactgcaagtaatatggaaacatcacccaactagctatgaaaaacctttgatatccgcaaatgtacaaatacatagacttcctctctgcaatagccactcctgtggagcactgtgggaacctctttcacatttcataatgaaaggctgtggagaaatagaattcttttgagggcttctttttggaatacatcgcatacactgtcaagaactgtgtagcctcctctttttaaaatttaacctggatactttttcttctatcctttccctttcccagatccttagctcactcaagaaggcctcataatttgttgcccttttccccaaccaacctcttctatacagtgtgccctgacctgtcatcatcccttttatctaagcatggaaataaatcagtgaaattgtattgtccctgaaagtttctacaagattaaatttgtacaagagcttactatgacagcataattatataagacacttgtaatcctcttttacacctaaatgtatggccatagttttcaaagaccatgttttcaaggcagtattttaagttttggagttttggttttgtttttgttttcaggcagggtctctgctctgttgtttcaggctggagtgcagtggcgcaatcatcgctcactgcagcctcaacctcctgagctcaggtgatcctcccacctcagcctctcaggtagctgggactacaggcccatgctaccacacctggctattttttgtattttttgtagcgacagggttttgccatgttgcccacactggtctcgaactcctgggctcaagcaattcacctgtcaaggcagtatcttaaattgcactttctgttttgcttttgtgtaaataaaataatctatgtgcccataatgaataattaaaaagtgttgacttataaaatttcattgaattaatttaattactagtttaagaccattttgtctgtggagcccatagggcactgtgataaaaaaatgataattatgcagaaacagaaataacttttattgctcctaagagatccctaattttgaatttgttgatttctgagaatagaaactgttagctacattattgaattagcatgtgtgttacatttaatgacctttcaatcatttatagaatacattaatgggaactgtagatcccttgactatatggagggcaattggttctttctaatatattgaaaggacacttagaagatcatcttttgtacaagtgaattttggcaattttacaatcccatttgttagatataagaaaatatagccatccacatcagaattaggtcttttatgtgatttgtctgttgaagaatgaggataaaaaataaaattttacaaaacaattttctgttcaaaaatgtttttgactcgaggatatcattctaagttgttttttacccatgcatttgctgtgagctttagcttcacactactcataactctgcgtgtacatttttgatggtaaaaacaagtacagtaacaacaaaagcagagcaaacaaatactcccagtgggaactgagcacacagtcaaggatgggatttggcctctgtacagtatttttggttacygtggccaagtacttgataaatacatttcattttagaagttatttttgtcagtttcttttacttattgacatttttcattaccaattagcttttccmatttcctttayttttgcagtttgctttggtatttacaagtttcttgaccatttgcaggggctgaaaaagaactgggaagaggtgcataaagaattccagtccctctcggtctttatagattctataccaaagaagatccgcaagcagrggctggaagaagaaatgaaacaactagaacacgacattggcataattgaaaagcacaagattatttatattgccaataagtaagaatggatctttaaagtataacaatttcaatgtaggggaaaaaaacatggaaaatataaaaaactccaagtttttcaaaaaggaaaatactatgaagagaataaaaatagtcttaatcagaatgcttaggcaatatgcaaagaataattgagttattcacttacacaagaagaaattttgtttttactagtgtcacgttttccacatataaactattaaatttgagaatatgtgttccagttccacaatgtaattcattattattatgtacttgtttcacataaacattaatttctaggtcctgaaaaataaagtcagcactcagaacttcactttttttttttttttttctgcagcgcatgataccaacagcacaactttgaaaactgttaagtattttgaactggaaatagtaacacgtgccttcttgctactctaaactgtctccaacacattgtttctgagctccacaaatgcaaaagatgtattttcctgtggcccatgacatttgcagttattcccagtgagaaatattttcagtattcgtaacactgtatatgatgaaaggcttctatttggaggaagaaaaattaagaagacaacttacaaaatcaagatgacaacttataaaggcatcattgaggatgattaaggagaatagcctcctttctagcataccaacctcgatactcttattttattccacaactcactatgcatatcttatttaaatgtttttttccttttggtcctttctacttatctattttgtgaattctaaagttacatttgtaagattacataatctattaagcaataagtttatgttagtagagctgttttcaacccaaaaataagaaaaaatagctctaaatatctaaaaggaaaaggttattttatgaaattttaaattagaaaaatttggtaaaatatatgcaactataaaatatcagagaaataacaatttctactgcttacactggtttttatcctctggacaacataaaaaacaaaatatgggagtctttcaggcttttttcacaaacacagaatttggaagccttatagaaaagcttattttggttacttaaagaaaagtagtttatatacaattattttttgaaaattcacttgaaacttgtccatatgagtatctttattcctttattaacttagggcagatataaaataaaggataatatatgacaaattctcacttaccaagaatggttggttgctatttagggtaggctaacagctgtgacagtacactccaaaatgtataattacgtaaacacatattcaattcttgctaacatagcagtactttgctgtgagcaggtcagcaggaacccttttctgcagtcactcagggacccagacttacagagtgggtaggatgcatctgatccagagttagggagaggcacgtacaggccaggcctagaaatgatgcatatcattcccgtttgcatcgctaagtaagcaacttaagttgctttaacaaactaactccaaatctcagtttcctgataaagatacatttttcatttacatcactgtgcaatgtgactaagggtaggggtataagtctgttccatgcagtcactcagggacccagtctccttttgtctggtgactctgttgatccaggcagtctttctctgccaattcaggatgagatgtttaggtaagtattttatttgtgaaatgattgctatacatactcatttttaaataattcaaaatcagtagcaatgcaaaaatattctgattactttagccttatggatattatgctttgaagtcatgagtgggagttgccttaaatgttaaaatgaaaactttgtggttttaacagctaattcttttgctttctgtaaatgtctactaaagaatctagacttttctctatggtctacagtgttgtcctagatgaacattgttgcctttctttcacagagccttcagagggaaacattcccatccattgttcctggaaaggtgatccctaccacgggatcccaaacttggatagagccagttcaacctcccccaatccatacacatacatacctaggtcatcctatcacccaaaagagggacaaacatctgacttggacagctgaccagtgactgatcagattctctctctcttgagagcatgaattaagagacatggagactgcagtcacttgggagtagacacctgaaactaaaaagtcaaacttcattatgcagctagtttgacttggtttctcttcctgttcaaaggaagaatgggtagaataaagatttgatgtggtctggccccttgtctatgatctttttagcttgatttcttgaaatgctgcttcttccctacccactgtaactggcattcccatagtaytgaggtactagagacctctgagatctgcacacatggttccctccacccagaaaactgcccttttctttctctcatcctacatagctgcctggcaaatccctagtcttcatcagctcacatcacatttccatgacaatcccctttgattcctcagaatctggccttcctttatagcactggtcatattgtattgtgcatatctggttatttgcctgttttccatgaacatttcaagcttatgggggagaagacactgtatacattttcatctgcattccttagaatctgcataacagctggtatagagaaggtactcaaaaaatccttaatgaataaagtaatggatcgtacccaaacatgtattttaatgatctcttgatattattatcatgacataagtcagacttggaggatagagaatttgactgctaaacaaaccagttgattccataccaatcagttagtacaaaatcaaggtagaaggaggcaatttcacgtggtgcttaagatctcaagtactaaagtcaggtaggctctggtttgcattccagctcagctgcttactaagtatgctacataacctttctaagccatgttttccttttctgtaaatgggattgctaaaccattccatgatctgtagagttatgagaatgaatggaacaatacgtgcgtaacagcatagttcctggcgcgtagaaagacaacttaatactatgacttattattaagagctctcaattccatagtccttttgtccagttggtgctaggcccattaacataccatcaatagaatttcccacacccataaaatctggttgcaggacaggacttgtttgaaccacttagaagttccagcctgagattagcctagcctggttaatctcttcagtggcccacaaaaatgataactatatttggtaacttttatctctagtaactggcaaaaatttggcaatacttcctaagttactcagcacaggcattcaaaaagaaagataagcttaaatcagtaatgatgccagagagtcactgaggagaaaggtctgcaaggttgtgtccaacaaagcctcatgggtgatatttattagtgaattaatgtggcccaggacctgacctgagggcccatgcgtcactgttctcaggaactcagagtcagatgcacatgaattaaagtctatgtgagcctgagttattgcctggacatcgatttttaaattaagaaatacctctcagctaaataaatccccataatcagtgcattctgtcccagttgtcaaactatgtgggaagataaatcataatcaaaaggtactttgggccaggtgcggtggctcacgcctgtaatcccagactttgggaggctgaggtgggtggatcacttgaggtcaggagttcgagaccagcctggccaacatggtgaaacactgtttctactaaaaatacaaaacttagctgggtatggtggcatgcatctatagtcccagctactcaggaggctgaggcaggagaattgcttgaacttgggaggcaaaggttgcagtgaaccaagatggcgccactgcactccagcctgggtgacagagggagactctatcttgaacaaacaaacaaacaaacaaaaaacacccaacaggtactttggctaaaacagagtcaagagaaaaaaaatttattttatcaaaagcctgtcagctgacatagctctctcattgtcattcaacccatattgactatctgccatgtgccaagaactgttctagttgctgggcatataatagtgaacaaaacagctatgttgggaagacagaaataatcacacaaatataatgcatttataattagaaattgaaattagtgttttggaagaaaaaaaacaggatgctatgcaagagaataccaagggaatcctaaatcagattttgtaggatctgacattttaaatgagactgaagaattagtggaagttggaaaaagttgagaagaagaaaagggttgcagaggggaaagaactccaagcagagagagaagaatgtgtgaaggatctggggcaggaaacccttgacggataggcaaggcatccatggggctggggtgaacttagaaaagggcagaaaggtgcaagctgaagatgaggaggaaatcaggcaccactgatgcgttttaagcagagaggtggcacgaggcaatcagtatttgtaaattatcattcgctacgtggactgaagtggaagatcagatgagcatggggagattagttagtggactagttggtaaagaagatagtggcacagatcaaggttgtagcagtgcagacaaagagtagctgttggcttcaagaaatatttaagaggtaaaaatataacttggtgatggattgaacgggggaagagggaggtttcaaaatttacaaccaaattctgatttgagcagccaggcagtggggaggcgggggcggggccgccattttctgaactggggaaacctagggcaggagcagtttaagagaagatatggtgaagagatcaagaatatgattttaaacatgttaggcttatgaaaattgtggcatctagttggaaatttagatcaagagatggaaagatagattgaaagagtgagagatttggatcaaaggagatgtggggtagacctttatgtttggagattcatcagtgtgaatgagatcaccttgggacaaagtgagaaggcaatgaataagctctcagcaactgccatttagaggtaaggtgggagagaaggagtcagtaaatgaaaggccaaaacaatgaaagtttagtgtccagagaggtcaaaagaaaaccaggaagccaagaaaattcaagaaaggagcaccttttccctaaagtagatccttgacaatgggaatgacattctcaacaccctggccaagactttctcctgactctgagtaggacacaggtcaacatctacactggcacctggcctctgttgcattgtttgtagtctaaactcttccattgaatccttttctctttctagatatgttaatgccattaataccagccacaacattagcattggacccactatgcttattaacacagtccacagtaatacagtttgaataccaaattgaaggaaacttttcaaaaggtcaaggaaatttttcggcagttaaggaagccaatgctggtgaacatcatatgtaactctcaagagaacaacctaatttcgctcctttccaagttcttagtaaacctcaggtgatttattcgtaaacactggttactccaagtaagagacaaacacagatcgggggaagaaaagagcaaaataatttttctggaggattagtttctttctgctgaaatgtgctatggtttaaaaaatcagcaggtctgactgacagcaagttatgtaacttttggaaaatcacttagtgagcctcagccttattttccttatctgtaatacaaagaaacagaaccagattttgtccaaccctccttccagtcctaatggtctataactataaaactctaagactatttcaagttactgcaaacaagagtttggtctccaaactgatcggaatgcaggaaagcgctggcggatacagaaccaatgatttgcaccaacacatatcaacccaagaacatcatttgacaagctagaaagaatgataagtaaaacaaaaattgtcactaatttttcaatcttttcaaatgaaagcttccttaacaacagtcctttgaggttttcaaccacagagtgttcgtcttctaaggactttaaatacatggtctctctaggaagccagtgctattatttataaagagagagagagagagaaggagaagaaaagaagacagagaaagagagggaaagagagagagaggagagagagagagagaggacaggagagagaggagagagggagaaggatgggagaagaaaagtaaaaaaaaaggaatgacatgtgttcttttatctagaatgagagtttccaatgatagaagaacattctatgctcttaggacaatgtctgaggccaccaacaaaaaaaaaactatgtgttcataattttaaaaattgtggagcgaagccaaagggaatagcatttttttgtctttctacataatgtgcttgatgaaaaagaactgaagttagcaacagagtaagtgaataccaattatacctgcaaactgaaagatagtgtttcacaggactggtgtaaaaaggccatgcacatactaatttttaaaactgcacacgcagatatagcctttagatgtagattttttattctaaacgaggtgcctatataggaaacaagaatagatgggtagtatatttttttgttaaaactgctttaccttaggcactcaagtcagtgatgtctgtgaagcaagaacataaacttatctaaatgatattgctgatgtgaaaaacatctgtggaattcttttggaatacaaaatatccatcccattcctgaacttctgctaccaagttctcctttcctgagacaactaatgttatcaatttttaatgtaacttttctataaatattgtataaaaacaaatgcatatatatacacacatacataataattacatacacacatatgtatattcctctcactttttaaaatttaaatgagaacatgcaataacatttgcctttttcagttagtaatgctgtaaagctcatttttttattaatacatattcttcattcctttttgtggatacatggtgttgaactgtgtaggcgtatataataaacttcaccagtaccctattgatggacatctaaattgttttcatatttcctattaaaagcaatgttgcagtgaatgagcttgaaaattgcacttgttgattgtattaggaactattttttactttgctgtttttgcctgtgtgtgattaggtaatgtatatacctgacctaaaatgtataatttactcaaaggtaagtaggaagaagacatctttctcgtgtccctttcacataagcaaccactatgaccaacttcttattgttctaaatgtatacattctattcatataagtatccatagtatgaaaataattatacatatatctatagaagaattacacctatttgacagatacttggttttcttctgtcacagcctacagagatcagaagacttgtcataaaaggcatcatgtatgaatgtaagcctttatgttaggaatagcttttttattatttcactctttatcaaccacacaccatcaatattgtggatctcattaagaaagcaatgctttcattgatttttaatgcctatgtttttattctggatggaagaggggctatggatatgggacactcccttccctgtccttggcctcactgtgttgaattttccaatttggattcattggtaaattcattggtttaatctggataaatgctttaaaacaaattccctggcttttttgcagaattattgagatgacaggcagctggcacccacttagtaagatgatgttcagtactaactagtaagaatgctttatagccaggtgtggtggctcacacctgtaaccccagcactttgggaggccgaggcaggtggatcatctgaggtcaggagttcaagaccagcctggccaacatggtgaaaaccctgtctctactaaaaacacacaaaaaattagctgggtgtggtggcaggcacctgtaatcccagctacttgggaggctgaggcaggagaatcacttgaacccaggaggcggaggttgcagtgagccaagaccatgccattgcactccagcctggacaacaagaatgaaactcagtctcaaaaaaaaacaaaagaaaaagaaaaaagaatgctttataggtatagatgatataaacagtgagatagacgagttaggctgcaaattttaacattgcaaccatgtgagtcctgctttcattatcccagtggtggggtctgcattgggtttgctgcttcctatgttttgtgtttttctctttcttgattgtatttttccagtgctgagagtctacttgtttattaactctagattgcaggctgcatgcagagagaccctcccttcacacacaataaaatctccactatgcagttacgtctctccatgcaaactgtacacttctcgcctgagtccttctcttccatatgatcttgctaaaagtacttaggagcagtcgttctaacccaccaaaatattctgagtttttccaatcagtctcccaggaaggggtagaaaggcatgtggcttcccttctgtgacagtgcatgtgacaattttaccaaatggtttgccatggaataacaaggtcaacagctttacagcct

SEQ ID NO: 96375 - DNA, 82532 bp, Homo sapiens
cttcgaacagaaaagggtagagactcttttcccattgtattctgctcaaggtatttccccccaaataagttgagaaccatggagtagagaaaagagagctgaagaacagggtgactgagcacaagagaaaaaaaaaaagactgcaacttgctcccagggctggagaaaattttaaaaaaggaaggttggagtccatcagtgttctattagtcatcttctccttcatcctcctctccttcctccccttcatcatcatcttcatcttcttcaccttcatcctcatccccttcatcaatatcttctaattcttcctccccttcatcaccatcatcatcatcatcatcatcatcttctcctccttcttcatcatccatatcaggaaccaagtaatactgtaatgggtttggccaaatatcatctttgatgacctcttctaactcatcagcacctgcatcagaatgatcagtaaaccaggtaaagaagctctctggttcctcatgctgcctcttcctgctggctttattctgcgtttgacttgaacgtttcgtcacatcctttccagatttccatttgattttggtggactttgaagatggatcaccactctcattcagatgaaattctttggagaaaactttattttcaaagtaaggattttcatcaaaataaaaatctattctgtaacctgatttaatatcttcaaattctgtcacttcaactttagtcaaataatgcagtgcctcttcgtcctcctccccaagcagtgaagacacttgtggatggttgacaaatgttgttaccccaaaatttgggattttggcgatcaattctgacctcttctgaaaaaatggttggcggagtttgttatatttctgttctactttcaaaatctcctcactgtcttgttcattaagtctgtctatttcattttgtacttcatcaatgtgttcaattgcttcttgctgttctttttctcccttcttcggcaagcctgcagaggccgatgtctcctccagtcccagagcaggaggtggtcttggtttcttcttttgaagtgggagtggagactggcgtttaggggccatgctgttagggaagtccaagaaccagaccatgagtctccttgctcgtctggaagcaggcagaacactgtaggatgtactgttaaatgaggaaaaataagatgcagaatactaaatatagtatgcatgttaccttatgtttaagaaggggtcatctgagtacatggaatatatggaatacacacatacatatacacatgcattcttttttccaaggtaataaaggaatttacccactttatttctagtagtatgtagtttcactttttatatttagctgtcttatccattaaatttttatatatagttcttttttctttttttttgagatgcagtttcactcttgtcacccaggctagagtgcagtaggttgataatcggctcactgcgacctccacctcccaggttcaagcaattctcctgcctcagcctcccgagtagctaggattacaggcctgcaccaccacgcccagctaattttgtattttcagaagagacagagtttcaccatgttggccaggcaggtctcgaactccggacctcaggtgatctgcccaccttggccttccaaagtgctgggattacaggtgtgaaccaccatggtcagcgaatttttatatatagttcttaaaaacaaaaaacaaaaacaaacacaaaaaaacaccactcagctgggcatggtggcacatgcctatagttccaactactcaggaggttgagacaggaagatcacttgagcccaggagttcaaggtcagcctggaaaacataacaagctctcttgctctctctgaaaagctttttgcttttttaaaaaaatttattgagatggagtctccctctgtcgcccagactcaagtgcagtggcgccatctcggctcactgcaaactctgcctgccaggttcaagcaattctcctgcctcaacctcgagtagctgggatttgaaatttttcatattaaaactttcattttttgttttgaaacagggtctcactctgtcactcaggctgaagtgcagtggcacgatcacggctcactgcagcctctaacccctggtttaggcgatccttccacctcagcctcctgagtagcgaggactacaggcatgtgccaccacacctggctttaattttatttatttatttatttatttatttatttatttatttatttagtaagtaagtaagtagagacgaggccttgctatgctgcctaggctgttcttgaactcctgggctcaagcaatcctcccacctcagactcccaaaatgttgggattactggtgtgagccaccaagctcagcctaaacatttttaaagagggagaaataatgcatcaaaaatgggtttgctttcatgagattagagttcttgaaagaagtttttccttccaaggcaattttacctaaatttacttttctcacattaagatcacagttaaagatgaccctaaaccaaattaggagtttagccacgtttaccttcacagctcccaccgctagttccttaaactctcttttcctcctgatcaaaaattatttcaggaagaacatctgaaaacctcactcacattaagggataaatgactatagagatgaattaaaataaaaataatgctttaagttaaattatctaatggtagaatgtgaagcatcaatgacaagtttttttgtttttttttttttagagacagtcttgttctattgcccaggctaagtagtgcagtgctgcgatgtgatcataacttactgcagcctcgaactcctggcttcaagcaatcctcccacctcaacctcccagtgttggaattacaggcatgagctaccatgcccagccatgttttgttttttaagggagtatttactcattctttaatcatttcacatagccgcctaagctaccttaagtttttttatttttatatatatatttcttgagacggagtcttgctctgtcacccaggctgaaatgcagtagcacgatctcggctcattgcaacctctgcagtgaaatgatatagttaagtgattctctgccccagcctcccaagtagctgggaccacaggcatgcaccaccacacctggctaattttggtatttttagtagaaccggggtttcgccatgttggccaggctggtctcgaactcctgacctcaggtgatctgcccgactcggccttcaaatgtgctgggattacaggcatgagccaccaaacccggcctaacttaagttgttttaagataaaacatgaaccaggaatcattctgtcacccatttccaaccagagagtagcctagttgttactttatcaggtgataaagaggcctggtagaaatctggcagggctttgaagggagtctggtgctagactacctgggtggttttttgatttttttttttttaacatgtggatatttaaggtatacaacatgatgttttgacatacatagtaaaatgatatagtcaagcacatatcatcatcacacagttactgttttccctctcaccacacatagttactttttttgtggtatgatcacctaaaatctactcgcttagcaaatttctagtatacaacaaatattattacctatagttctcatgctgtacattagatctctatacttactcatcctacataaatgcaactttgtaccctttgacctacatctcccccaaccacctttctgtttatgtactttttaaaagatcctacatatgagagtatgcagtatttgtcttttttctttttttttttttttgagacagagtctggctctgtcgcccaggctggagtgcagtggcaatctccgctcactgcaagctccgcctcccaggttcacaccattctcctgcctcagcttcctgagtagctgggactacaggtgcccaccaccatgcctggctaattttttttgtatttttaggagagacagggtttcaccgtgttagtcaggatggtctcgatctcctgacctcatgatccgcccacctcggcctcctaaagtgctgcaattacaggcgtcaggcagtatttgtctttctgtgcctggctaattttacttaacgtcctccagcttcatccatgttgtcacaaatggcaggatcttctcttttaagaatgaataatattccattgtatatatacaacattatccgttaatctatcctagggacagttaggttgtttccatatcttagctattgtgaataatggggcaacaaacatgaaagtgcagatatctctatgaggtgctaatttcatttcctttgggtatatacctgaagagggtttgctgggtcatgtcatagtcctatttttaattttttgaggaacctccatactgttttccataatggctgcaccaatttacattcctacgaaaagtatatgtaaattgactaaatttgccagtcaaaatataaatactgcctgggttataatacaccattattatggtgtaacacaccatatattatagtgtgatatatgacattgtgtgaccttggccaagtttacctatcctttgtatgcctcagcttcctcatctgtaaataggtctgaagacagtacctagctaaatggttgttgtaaggattaactgagttaaaacacacagagcaaatagagtagcgtttatcacataataaggattcaaatataagctactattatgttatctttgacacccctcgtttctacaggaataattaagaatcaattatccatccaagcatttgggaattaattttaaaaaatcaattatccagttatatttttcagaattaagatgtctgaatatttgagagggggcattatctgaagaaatggttacctcttggccaatcttatggtacaaatacaaagtccatatattcccctccccgcctcctttttttttttttttgtttggtagagacagggtctccttatgttgcccaggctggtctctaattcctgggctcaagtgatcctcccgccttggcttcccaaagtgctgggattacaggtgtgagccaccgcaacctggccaatgtattttccaagcaattactattcttcaccttgtgtgtagagtttgtgaatgaaacagatttttttttttttttttttttttgagacagggtcttgctgtgctgttcaggctggagtgcagtggtgcaatcatggctcactgcagcctcgacctcccgggctcaagccatcattccgcctcgcttcccaagtagatgggacttgcccggcccgaagcggaactactgagtttccttattttggaggcagtaatcaaataaaaaataccaaaaccttaaatgataatcagtttgctactttatttgggacaaaagagaattctatatttcatccatccatcacttcactgctcaaagactttgccccttacctatttctcccttcttggtcataaatgttagggctttatatgcaaagccctgtgctttctccgatcaagtccaaaagcttgtatgagccactccttggataagaaggggatggggccttctagatgctgtaagtatctcttatattgaactcagaattgttctgactggcagtttatgaagttcttcccctactcctcccatcgccaatttttcttgccccaaacatttatacctcagggttaagaagccaggtaagtgagggggtgtgactcgcccagtctttcgttggaaaaaagtgtagacctgtcaggaagacacagcatagaaaggctgcatgtgctgatttgaactcgagcctcagtaaaacattgaaatgaatgaacaccaaccggaagggaaagaagaggggaggggataaggagcctgaggattggtttgccccgcgggatggtccgcgcctgagccatgggaggcggggtgcccgccggcagaagtaaacagagcgagtacgcctgcgcacgctcttcctgggtcaagagccggctcgsttctgggattctgaggctccccaccgcggtccggcttctctkggagactgtctacaaaccgacgagaggcgtcaaccttttaccctagggggcggatttgggtaggagccgagcgttcggtcggaaacgcccccttcttcctcctgggcggggcaagtgaggccaagtactgggcctccagggcgtcgtacctctgtgagacatggctcgctgtggggaaggcagtgcggcccccatggtacttctggggtccgctggagtttgcagtaaggggttgcaaaggaaggggccgtgtgagcggcgccggctgaaggcgacggtgtcggagcagctcagccaggatttgctcaggtaggaggaggcgggaactctggctgctwcagttcctaaatcgcccacctccgccccgaagctgaggcttctttcggctctgcctccccctccctcagcacttggttctcctcgcctcaggcgactgcgggtcgttagccagtctccccactattccgaaaagtggcttcgctcgccctgaataaacaatcccgagcacctcgacaccatgtaccagattcaaaaggaaaacaaaaaaagcttagtcgtgtgcagcactagtttgctagaaatatctcaacacaggcacgcttagttgtttccaatcactaaggtcgggtggatccaggtcctgaaacttacacaatttttaaaataagcttatactattttaagaaaaataataaaattaggaaaacgattatttgaaatgaggaaagaacaatactatagtcttggaggtctcttctgaggtctctttaaacaatttaccagaaatgcttcctgattgcgacctggattcctctctccacctagagctctctgtagctcccagcaactctcagctcctgtgaggaccaaagcaaatggagggtcttcctgacatttaacctttgtaagcctcatggatatccttctcgggttattgggaatccagctaaagtaatttcagcttacaaagaaattgaagcttagaaatatgacctagctaatttacatttccagcaagacattgattcttaaacttgggtgggcatcactgaaattttccatttctaacaaggccccaagtgatgctaatgctgctggctagggtgactatgagaaccactgaggtaaacataattactaataattaaaagttgtgcagcattctacttttttttttttggagacggagtctcgctctgtcgcccaggctggagcgccgtggcgcgatctcggctcactgcaacctccacctcccgggttcaagccattctcctgcctcaacctcccgagtagctgggattacaggcacgcgccaccacgcccggctaatttttgtatttttagtagagacgggatttcatcatgttggccaggctagtcacgaactcgtgaccacaagtgatccgcccgcctcggcctcccaaaatgctgggattacaggcgtgagccactgcgcccagccaggattctacattttgaagtgctttctgtcaaaaactcacccatacttaaggctccgatagctataaacagaatttatcaaagtaaaaaaaaaatccctttaatttgggactatctactggggaagctactttgtctctaccagggagggactgatgaaaaagatggaaaaaataatactaaagttgttaacgtttctagggtaacacatctaatttatatgaagaaaatgaggttaaagtattgctagtgaacaatttatccttatcttagttacaactgagggtaggactcagaactctcaaattcttattataaacaaagaaaaatagatgtagcaaggtttttttttaaaacaaaacaaaacaaaatgctcacccaaccaccttaaatgctatactaaattaattttctccaagcatagcaatgtcatttatttattctacaaatactaatgaagtatctagcactgaccacgtacctagcccggtactaggtcttaagtaataaacgttaataaaacattgctttgttgtttgtccttacactctagtgagagaggaaatggctaaataaaagtgatagttgtggtggggtgagttgggaagactttatagggtgacatttgagtgagctcttagggattggttaagaattgattaggtaaagattgggaagggagaggtagaggatatctaaacaaggggaataacttttatggaagcacagaaatttgaaagagcttgattgattttgagaaagcaagtcgtattagactctgccaaatagtaaggaacagagacactcctaggttacctgacgtgacaagatatgtagagaagtgaggaaaagtgggagacagttttagctgtcaaaaagccagctccaatgtagaactggaaagttgtttgggatatggtaacagtcatacaataagaccacattgacaaatggactgttattcagggcagtggtaaaaaaaaaacactaatacttattgccatcctactatttgctatacactgggcttacatgaaatgttttacttacttctctcatgaatcctgtgaggtaagtcttgttattctcatttaacacaagaggaaactgaatgttaaaaaagaaatgatggtggcacctatagtcccagctacttgggaggctgaggcaggagaattgtttgaaccggggaggtggagattgcagtgagctgagatcaagccactgccctccagtctgggcgtcagaacaagactctgtctcaaaaaaaaaaaaaaaaagtggtggagtcagaataagaaccttggcaatctggctccagagactttcaaatgacttgcccagggtcacataaccagaatatgaacccaagcagtctgcctcctctacagtaaactgatcttccagttaactttgtaccttcatctcctcttctctccttacccatttctttttctaccatagatttgcttaagaatgctcttcagtgccatcagttggttcatgtttattatagaacatctttgctcaagttctcctgcttgattactgcattggccagtggctaaccttggtttagcccattgtccattcagatgtgattaggatgtaggggcatgtggtacaaaccagggccacatataagtaataaataaatttggtagctttattcggaaggagattgcatggcaggcaatcaaagtgacagtaggtaagggtgaatgggtagactaagactggatcacaggggctttctttctccagtgaaatgtttgtgatgtatctagaaggagtggagaaccatcggtgtttttaaaatagggaattaacacattttgaatctggaatttaaggaaaggaaaattggaaacaaggagaccagctgggagattttatagtccagggatacataatggcagtggaaatggaacaattgataggcttggtgactgatgacatgctggggaacagggaaaaggaagcattgaaaatggccccaaatcttaggacatttgaaagggaaacatgtaggctactaccataccaccctgaacaagcctgatcttgcctgaaagggaggtgtataatgaatgtccagcaagctatatccaggaaacaactggaaatatgtctggagtagaggaggggagtttgactagcagattggtagtatcactagcacctagttatccaaatatgagaaagagccaagttattccttccctgccaattttaccaactcgtgccaattttattacgtaaatatattttaattttatcccatctttatcaccattgatcctctcctggcttcattcatctgtgcggtagttttctcatcttcattctcattttcatctaactcctcttctacacaaatttatatattttgaaaaataaattygccattgtttcaaaccatttgcagggcaaacacacctgatagcaataatgtaggcatacacttaaaatgaccctgtatggtggatgtacctgcgtgtgttgcgagctagggaatctgggagtcgccatcccagagattcgttccttgtctgtgaggaacatctgagctcctgggcccatactgtggaacacaggctgtaaaggggattgaagccctgggttagggttgtatgaaggttgccaggtggaggacattaaaggaagggggttaagtgaaaatgctgtataaacttccatgctgtttgcaagggtttgcagttttcctgctcagtccaccaccactggactgtaggtaaggtggatatcttgtccagcctgccaccactggactctctcccctgtatgtaagcccctaataaaagcccatatcttgtttgctggctctgggtctcttcagcctctggagcctggtgccttccctactgaggttaatagaggttcagcacacacaattttatgactcctctttcactgtagggtacagttaagctctttgcctcttattcatctttatctctgcagcttcatctgccacttcgcaccctctcagtactctgtgctgaccaacatatagttccacactcacacatatctttgtaaggaacatggagccaggcacttacttaccttgccttagttccctaaccagctcttactcagtctttaaaatcccattgggttttcatgccctctgtgaggtctcctcttttgtctgtccctgaacaaaatttacttatgctattaaatatatcacacactttaattttcagacctggcttccctactatactataaactccctgaggataggtattatgttttagtcatctttatgttcccagtgcttagtacatagtatgtgctcaataaatgtttagtgctgagttttatcrgcagtgtaaattgctttagataagttatgctatggtttgaatgtttgtcctctcaaaactcatgttgaattttacaggcctggctgggcacggtggcttatgcctgtaatcccagcactttgggaggccaaggcgagcagatcacttgaggtcaggagtttgagaccagcctggccaacatagtgaaaccccatctctactaaaaatacaaaaactagcctggcatggtggtgcgcacctgtactcccagttactcaggaggctgaggcaggagaatcgcttgaacctaggaggtagaggtgcacacctgtactcccagctactcaggaggccgaggcaggagaatcgcttgaacctaggaggtagaggtgcacacctgtactcccagctactcaggaggctgaggcaggagaattgcttgaacccaggaggtagaggttgcagtgagccaagatcacgcaactgcactccagcctgggtgacagagtgagactccgtctaaataataataatttacaggctaggcaggtggcttattcctgtaatcccagcactttggaaggctgagggggatggattgcttgagctcagtgttggggtgatcagacccaacaccaggcctttggggctacaaagttcggcagagtcaaaggaatgagacgacataaagtgggaccagggggccaatgctagtatggaggctgtgaaggccctgagctctggaagcccacgctgtttattggtgatcaaagaagcaggtagtgaggatgtaggggttgaaagaaagtggtgtatcaagcgcatgatctacagctgtgatggtttagcattttctttgaagcatatggaacatgttctgctatttgagatagtgggaaacatgttcttctggtttaagatacaattgatctatgagcctgggagtgctagaagcaaggagccagagaccacaaggggttttatgccctgagccccggattccatccaagccactaggggtttaatgccctgggcttatattgtggtgcggsagggcagccttccaccctttggcacagagcttggtgttccaaaggccacaaggggttttagaccctggaccgcagacatgttccaaaatcttttacattatgtcagacgtgcaagccctgcctcagcgtttttcccaacactcagcttttccccaacactcaggagtttgagaccagccaggggaacatggcaaaatcctgtctctacaaaagatacaaaaattatctgggtgtggtgatgcatgcctgtggtcccagctacttgggaggctgcggtgggaggatcccttgagcttgggaggtggtggttgcagtgagctgagatggtaccattgcactccagcctgggcaacagggcaagactctgtctcaaaaaaaaaaaggaaatttgattgccattgtagcagtattaagaggtatgacccttaagaaatgattaagccaagagggctccaccctcatgggtgcgagtggtagtgttataaaaggatgagtttggctccttcttgctcccttttatcctctatccttctacatgtgatgacttagcaagaaggcccttgcagatgccagcaccttgatgttggacttccctgcctctggaactgtgaaccaataaatgtctgttcattataaattacctatcctgtggtattctgttatagcagcacaaatggactaagataggtgaatacagtagtgggcaaagatatgagatggaaagaagctgggccttggcatcattgagacttctccagtctgtccttcctctggactttactattcgatgggccaataaactccttaatgtttaagccagtctaagtcagattttcagatttgtaacataacaaaatatacttgaaactgataaaaatggttctatcaaataaaaarcactgtattttcacattaacaattttatacacacttttttttttccatttagcaagtactcatgagcatctgttagcaacaaggtgggttccctcctgatggttgtatggctaccagctgcagtgcttccttattcacttgaggggtgggatggggggaaggagggtgggaggaaagaacaaattgagtgtttgtagagtttctatttcaattaaagtttgagagtccaacacatttttgtgtaactttaaaaattacttatgaaaataatttattgaaaatattgaccaaactaagatgcatctatttggccattattttcaaggttctgaaagcttttatgctctgaagcatttgttttgtctagggtaaaataggatcatttaataagaagatactgaactcttgctgtatactgaagatacagtttttgtccgtggggagttcattgtctagtggggagaaagacatgtaaaaataataatgatgcaatgacagaaatgctataatagaggtatgtactgaatgtgatgggattagaggaaggagccattaacttggtcctgggggagtatgaatgtcattggctgctttccaagctttcactgtaatgggtatctttatcagttacttgtacctcctgtagtgtactggtattattgccagttttatatatcctgtaatacagaagtcctctgagaatgcataccttgctgatgatattgctatagtgatatgaagttttatttaatatttagagagtaaaatagttactgcaaagaggcaaaagattatattatgacattttctattatgttgatttctattcttctatcactcacgtatacatgtaatcagtgggctttacaagaactatatctgtacattagcaaagggatttgaaaggatcacgaatccatcattttaatgatagattagagcataattctatttgtgggagtgggagactggaaaagagagtaaatgtcacatttttgacagccacacctggatttcagacttgttaattaacattagccagaactaagtaccagtttctaacctgaattttctactgatatgtgtggtttgttgctgtcattaactattaactttttttttgcttcaatttaagtaagattttaaaaaattgattattttaaataattaatgatcatgtcaactttgcattttaaaaataaatctaaagaagatagtatatctaaaggaaaatcaacataagtagcagaaaatatttttttattatcagaaggaattcataagtaaatattttgaaacagtagtcttactcttttagtgaaattgtctttgttttcactatgaattttagaaaattaggctctaagccaatgttaaacaatgttttttggaatgaactgagaacaaactcatttttgtattaactttatgttgcctctgtattttttagcttatgtgttattttaaacctactttataaaaatatgtatacgttttttagtatcactaattaaactatgattcctttttattccttataggcttctaagggaagaattccatacagatrttaccttctctgtgggttgtactttgttcaaagcacacaaagcagtccttttagcaagagttcctgacttctattttcatactattggacagacatcaaatagtttaacaaatcaggagcctatwgctgtggagaatgttgaagctttagaatttagaacgtttttacagtaagtgctttctttatccatgtaagtctaatatgtaattgcttatttttaacatgtatgtttttatttaatatattttcatatgtattttgtaacctgataagaaaaatccattcacttaaattccaaattatcttagtaattagtgttgayagaggctaagtgttaatattagtactagtagtactaatattagcttagtactggtagtacaatattagcttagtactggtagaggctaagcattaacctaagactgatcctgagaaaagggaaatggtgtgctctccagtaatttaaatgaattattctattccagggtttctcagtagtggcactactggcatttcaggttgtataattatttgttgtggggacaatgctgtgcattttaggatgtttagttgtgaccgaaatgtctccagacattgccagatgtcctctggaggtcctaattgccccctcttgagaaccgttgctacgtactcactctgtattgttggcatgtgaaactttaaagtatgtatatttataaaaatataacgtcataactgtttttattctcatggcttatgtcttagtccatttgggctgctataacaaaataccttagactgggtaattggtgaacaatagaaatgtattgatcacagttcgggagcctgggaagtccaagatcaaggtgccagcagattcagtgcctggtgagggttagttccttgaagatagcgtcttctctgtgccctcacatggcaaaagagataaacaaactttcttgggtcttttttataagagcactaatctcattcatgaggatggagccctcatgacctaatcatctctcaaatgtcccacctcttcataccaccacattggggattaagtttcatcatatgaattttggggttggggggacacaaacattcagaccatagtaacttgtatttggtcaaattgttttttgagaacagaacatcaatttgactttttagtaattttggggactcatgtttgaactcagaattgtcatcagctaaataatgggagaaactagtttaaattaatcttcattctgtactttatttctttctgttgttgcatattatttcattgtatggctattccatattttgttaatccattcgttgccatttaaattgtttctattaatactttttggctatgatgaataatgctgctataatacgtatatacaaatttttctgtgaacctgtgttatttttcttgagtatatacctaggagtgggattgctggattatatatatggtaactatgtttaaccttttgagaaactgctgaactgttttccaaactggctataatattttacattcccactagcaatgtacaagggcttcagtttctccacatcctcggcacatttgttgttatcttctgtatttttttattattaccctccttgtggatgtgaactagtatctcattatagttttcatttgtatttccctgatgactaacgatgttgagcatattgttgtgtgcttatttgccatttttatatctttggagaactatctacatcctttgcccattttgaaattgggctgtctttatattattgacttctaagtgttctttatatattctgtaatattagactcttatcacaaatatgatttataaatattttctcccattctctgggttgtcttttcactttcacgatggtatcatttatgacacaaaagttttaaattcttatgtagtcaggccaggtgcgatggctcacacctgtgatcccagcactttaggaggccgaggtgggcagatcacctgagatcaggagtttgagaccagcctggccaacgtgctgcaaccctgtctccattaaaaacacgaaaaaattagccgggcatggtggcgcatgcctgtaatcccagctacctgggaagctgaggcaggagaatcacccgaacccagaaggtggaggttgcagtgagctgagattgtgccactgcactccagcttggatgacggagcaagactccatctcaaaaaaaaaaattttttattatgtagtctagcttatgtaatttttcttttgtcactgtgcttctggtgtgatggctaagaaaccattggcctaatctagggttttgaagatttactcattaatatggtttggatttgtgtctccacccaaatctcttgtcaaattgtgatccccagtgttggaggaggggcctagtgggaggtgattggatcatgggggtggatttccccctggctgttctcatgatagtgagttctcaggagatctggttgtttacaagtgtgtagcacctcctccttgttctctagagctcttcctcctcctccggccatgtaagacatgctgctttcttcttcgccttctgccttgattgttaagtttcatgaggcctccccagctatgcttccatgccttcctgtacagcctggggaactgggagtcaattaaacctcttttcattataaattacgctgtctcaggtagttcttgatggcagtgtgagaacggactaatacactcgtgtgtgtgtgtgtatgtgtatgtgtgtgtgtatgtatatatttttttgagacagggttttgctgtgtttcgtaggctggtctctctttttttttttatttttagacggagtctcgctctgtcgcccagggtggagtgcagtggcgcaatctcggctcactgcaagctccgcctcccggtcgccattctcctgcctcagcctcctaggctggtctcttaactcctgggctcaagtgagtctcccgagtagcagagattacaggcatgtgccactatgcccaggttactcctatgtttttttctaagaatttaatgtttttatatttttaactcttacatttataggtctttgatccattttgagttaattgccatgtattgcgtaaggaagggatctagcttcattcttttgtatgcagatatgcagttgtcacagcaccaatttttcctcctcctctcccttcttttcctcggattgtctggacactcttactgaaaatcagttgcccattgctgtggactgcaattgtctccacccaaaatttatatgttgaagccttaaccctcagtgtgatagtaggtggagactgggccttcaggagttaggttgaaatgagttcatgagggtggggtcttcataaggattagtgcctgtataagaagacttagggcgggtacagtgactcatacctgtagtcccagcactttggggggctgaggcaggtggatcgcttgagtccaggggtttgagaccagcctgggcaacatggcaaaacccagtctttaccaaaaatacaaaaaattagctggatgtggtggtgtgcacctaatagtcctggctactcagaaggctgaggtaggaggatcacttgagcccagaggcagagtagtkagctgagatcatgccacagcaccagcgtgggcctcagagtgaggctatctccaaaaaaaaaaaaaaagaaaagaagaggcaccagagagcttgtgtgcatacttactctatccctgccatccaaggacacagtgaggcgatggtgtctggaagccaggaagccctcaccagaacccaacatactggcacttcatcttggtcttctagcctccgaaaactgagaaatacatttctgttgtttaagctactcagtctatggtatttcattatggcagtgtaagttaattcacccataaatgtgagggtttatttctggtttctcagttctataccaccggtttgtatgtctgaccttaatgccggtgccacttatctgttttgactttcatgagaagtcagttggattttcgggtttttatgtccttatgtatcttttatatgtctaagaaacttctgggatatctgtccttatatcccagacattttttggatgccagtcttttagttatttgctaacatggtttttgcctataatcaaaatgacatttacattagtatagaaaattatctttggataattatattttaagtgtatttatgtgattggcttattcattttatgctttagcagtttctttaatgacttttttctttattatttctgtttcatgtgtgaagctcctrtggagagcataaatggaaaattgcctaaccttggctaccygtgttcattaaaagaacttaatatactataatttaagcagatactttaagtacaacttagaaaatcactatcatttttcagtacaggttatataggctcatcattgagtttgaaataccaatttttttttttttttttttttgagacgggagtcttgctctcattgcctaggttggagtgcaatggcatgatttcggctcactgcaaccttcacctcccaggttcaagcaattctccagcctcagcctcttgagtagctgggattacaggcatgtgtcaccatgcccggctaattttgtatttttagtagagacagggtttctccatgttggtcaggttggtctcgaactcccgacctcaggtgatctgcccaccttggcctcccaaagtgctagggttacaggtgtgagccaccgcacccagccgaaataccaattttaaagtgtatgcttttttctcctagtaggtgatagagagttgttataagaacaagctttgtgatgaagccagttctaccacttctgtatgaacttagactaatcacttaccattagtttcctcctctgaaaaatgggcacattaataattcttatagtggtgttgtgagggttaaatgtgatggttataaagcacttagcgcagtggcctgggcatgtggtaagcactgaataagattgttttataggtagtgacttcagatatggctcaaatgattgtcagtggaaagttgagcttgctttattatctcatgattattgtgttattcatagtagtaggtgctatgaaattatacatttcttcagctgttgaatgtatgtttaaaagaagatccttggcatagatcaaatttttatacattagagaaagggagacattacatcaatgataccctttatttgttatcattaaaagtgattggaaaagattgaattagacccagtatgggagagtggaggaagcactggacttggcagtaagacagatctgccttcttgctgtgcattatcttgttttattttttttcagcctcagttttctcatttcaaagaaagtagttggagtagctggctttgtgcttcatagcacttcacagtgctctatttcaagcactaatcatattctgttttgtattaggttagtcgtgtgtgtctgtgattatgtaagctccttgagattagattgtctcactgatgtgcacatctccattggtgcctcatgtagtgtcttgcatatagaaagcacttgtgacgtacccttttttgstttcaaagcagattgttttgacatttgtctgtatgaaaagaaggcaaaaggaagggagtacaatggaaaatgttgacatgaaaatttcttctagtgaaaattcccataaaataatttcttgaatttttgctttgtgaaattcagtccttgtaagtctcttcagttcacatcctttctttttaagtaatggataaagattttgaaatagtcttttatgttactacttattgtagccctttggtgtgtactttgtgcacttgagttagagtgtgaaatacagcctttgaaaagttgttttatatgcagtgacttcagatatgcctcaaatgattgtcagtggaaagttgtgcttgctttatgacctcatgattaaaattcaattcaggatcataaaaatccttgatttcccaagaagactaacctggttattgttgtgagagtgtgtgtgcatgtgagaggtaaagaaaagagggaggacctttggatgtttagtttaacatcaagagctgggagataccaggataaagtctcagtcaggtaaatacataaaacagcacagaacaaaggatatcatttcctctgcaagctttctctggcggtagccattgtctctcccacatcccttatactacaaggattgaaagtggttggaataagtgtcttccttgttgtattttctttctggtatctggggtcttgctgatggggttgggggaaaagactgcccctcccaggttcgctaattcctagagatagtaaatgacttgcctgtgaaccagccaatcctaagtacatggacccacctatatatccattcatatatgcacattctctatctggttctcatattccaggagataacattcttttcccctaatctccctatagccaagtaccagacaagtagggatcactcccataggccagagccagtcaacattattcaaaaaatccagccctgatcctgttcagttgcttaccttgccttgcttatttcttcccttgaaaaccccaataaaggcttttgtccatgctttccccttgctccttctgaccaaccctgttgcttccctgtgtggccctgcatggtgtgccccctcctcttgtaaattataactaacaaattatcttttcagtggcagttgtctcctgatctgttggcctcactatacctgaataacaccaaaatttctgtacattttaaacactcatgaatgtccttgcttccttccttcttactcccctattgttgaatctcattttactagtctataccacaggacagtyatcagcagactgccagttcagtcctccttccataaagattttagctactattgtcaattttcctaagtatatgtrttagtaattgcaattgctatgtagatgatgtttccagtaacttggcctctcagtgccttcaattcctgtcttccagtaatcttgttgtccactctacctcaactactcactgccatgtcaaatcctaaatagtgctgttatcaataactacagccccccgtcatcttgattctaagaatcttactctctaacttctacctcctgtctttctagcttactccctttaggacttcaactctaataattcattaattgcaggtcctggtagagttaatcttactactttttttttttttctgagacagaggcttgctctgtcacccaggctggatggcagtggcgtgatcttggctcactgcaacctctgcctccaaggcttacgcaattcttgtgcctcagtctcacaagtagctgggattacaggctcccaccaccatgccaaactaattttgtgtttttagtagaaacgggttcgccatgttggccaggctggtctcgagctcctgacctcaagtgatccagctgcctcagcttcccaaagtgctgggattacaggcatgaaccatcaagcccaggctagattttaattttcttttatcctcttatgtcctcatttccctccttactcagcttaaatgcctttcactatcattgtattactccctttgcatacaccttcaactctgttgttccctttgaatttgatttgtatgtcaaaaccccaaatcttacattcaactgtgacctctccacttctgcattcacacagctgaatgtggctgggaaaacacacagtcatgctaaccaccagtaggcacttagtgctgttagtcatactacatgcaatcacctatatttccttttttttttttttttagagatgatatttcattctgttgcctaggctggagtgtgatggtgcaatcatagctcactgtaaccttgaatgcctggactcaagtgatcctcctgagtagctgggactacaggtgcatgccaccacacctggctaatttttctattttttatagagatggggtcttgctgtgttgcccagactagtctagaattcctgggcttaagcagtcctcccacctcggtctcacaaaacgctgagattacaggtatgagccatagcgtgtggccaatcacctatatttccctagtcctatttgagttcccactttcttggagtattattttatacttcctctttcctgaaccttcagccgttcctcttcattctcacttttgatgacctgctttctatttcactgagaaagtcaaagcagtgagaacttttacaaacttcttccatatctgttcacatacttgcatctgtacctatatgctttattttcctccctgttattactgatgaactgtcagtgcttctaaaatcaaatcctctatttgtccaccagatctcatcctattccttttcacctagtctgggacattgttccagcagttttcatctttccacagaaatttcttctgtcttagatctcctcatctaaacatggtattttctcccccgcctaaaaaatgactctttcctgacctgccttcactttcagctaatactccaccagctaataccctaatgctctgctccttttcacatcaaagctcctcaagaattatctatcacactcttgccaattcgtttcctcccatctactctttttttaatggatataattttcacatactataaaattgaccattctaaagtgtatgagtcagtggttttaatatattcacaatgttgtgccaccarcatcactaattccagaatatcttcatcatcccagaaagaagccccatagccattagcagccacccctatttcctccttcagccagcccstggtgaacaacctactttctgtctttaaggatttgcctattctggtcatttcatataaatgraatcatwcaatatatggccttttacgtgtggctttccaaactcgacatggtattttcacagttcatctatgttgtgacacgtatcaatactttattccctttatggctgtatattttattatatgataaatcaggggtcataggattatcctcaggtttgatgatttgctgagaggactcacagtactcarcatatagtcatactaaaggctatgatttactacagagaaaggaaacggaaaagctgcgtggggcaaagttcatgaaaatcaaggcataagtttctaagggtcttctcctggtgggagcacagaggacatgcctaatttccccagcgatgagttgtgacaatgcttctgaaatgttgccaacaagggacactcatcagaagctcaatgcccaggtttttttaattgggaattggtcacgtaggcactcctgcccacgtgtactcgaattccagactcccaggaggaaagtctgtgttcagcctaaactattgcttgtataaacagtttagacatagtgagccacctttacatttagagaatgctaagaacagcgcccaaatccatgtttccagatatcagccaagggccaagtttataaataaayctttcaaggtatagcagtcaggcctgctatgttacctattttcccctacatatagatatactgtattttgtttacccagtcatcagatgataggcttttgggttatttcggctttttggctattatgaataaatctgctatgaacatttatatataaattttttgtgggaacatacattttcaagtctcttgtattatatacctaggagtggaattactgggtcatatagtaaccttttcaggaactgacagactcttttccaaaatgactgtaccattttacattaccaccagcatgtacaaaatttccaatttctccatattctcaacatgttatctgtttttttttwaaattatacctatcctagtggctgtgaactggtattattgttttcatttgcattcccatggtagctaatcatttgcatttccatgataggtaatgatcttgagcaatttttgtatgcttatcagttatttttacatattctttggaaaactaatcacgtcctttgcccattttaaaattgggttctctttaaactattatgcttttagagatttctgtatatactggaatactagactcttatcagacatgatttgcagaagttttctctcattctctgggttctcttttagggtattctggaaatcaaacatctttaatttgtgtgatttccactttatcttttcttttgtcgctgtgcttttggaatcatatctaagacaccaaggtcatgaagatttatgcctatgtttacttaaaacagttttgtacttttagcttttccatttaggtctttgatctattctggtkaattttygtatatggtatgaggttagygtctaacttcattcttttgcattyggatgttcacttgtctcagcaccatttatgggggagactgttctttccccattgtgttattgtctggacacccttgtcaaaaattagttgcccataaatgtatgttctagactcagttctattccactgatctacatgtccaccattcttatgtcagtactacacagtcttgattactgtagctttgtaggaagcttagaaaattgagaagtgtgaatccaccaactttgttatttgcaagattgttttggctgttctgggccccttgtatttccatttgaatttgaggattggcttgtcaatttctgcaaaaaaaaaaaaaaagtcagctggaattttaatagagattgcatttaatctgtagatcaattcagaaagtactactatcttaacaatattaagtcatctaatccgtgaacacgagatgtgtttccatttatttagttgctttcgacattgttttgtagctttcaatgagtgtcttatacttcttttgttaaatatattcctggtattttattttttagaatacgattgtaaatggaattattttctaatttcatttttggttgttcagtgctagtatataaaaacataatttttgcatgttgatcttgtaagctgcaaccttgctaaacttgtttagtagtgtttttgtagatttccaaggattttatctatacaaatttgtcatctataaataaagatagctttacttatttctttaccgtgtagatgccttttatttctttttcttgcctaattgccctggctaaaaccttctataaaatgttgaatagaagtggtaagagcagacatcctggctgatcttaggaagaaagctttcagttaccattaaagtatgatgtcagctgtgggtttttcatggatgtcctttatcaagttgaggacattctcttttattcctagtttgttgaatgttttatcatgacagcgtgttgggctttgtcaaatgatttttctgcattgattgaagtgatcatgtggttttgtgtactttattttactgatatggtgtataacattaattttctgaattcctgagatacatctgtttgtcatggtttataatcccttttatatgctgctggattcagtttaaaattattttgttgagggtttttttatttacactaataaggaatgttggcctatgtttttctttcctttgtctgcttttgtattagtaatactggcctcacagaatgagttgggaagtgttccttcctctcctgtgtttttggaaaaatttgtgaaggattggtgttaattattaaacatttggtagaatctaccagtcaagctatctggttctgtttttttctttgagggaagattttgattactaattcaatccctttacttgttataggtgtactcagatactctgtttcttcttgagtcaggtttggtagtttgtgtctttcttggaattgtccatttcatctagattatctacttttttggcattattattattattattattatttttgagatggagtctcacactgtcacccaggctggagtacagtggcatgatctcggctcactgcaagctctgcctcctgggttcaagcgattctcctgactcagcctcccaagtagctgggattacaggcaccctgtaccacgcccagttaattttttgtatttttagtagagacggggtttcaccatgttgggcaggctggtctcgaactcctgacctcgtgattcgtttgcctcggcctcccaaagtgctgggattatgggcgtgagccaccgcgcctggctggcattattattttttgtttttatttatttccataggtttgtgggggaacaggtggtgtttggttacattaataagttctttagtggtgatttctgagattttggtagacccatcaccggagcagtatacagtgtatccaatttgtagtcttttatccctcatcctccttccaccgtttcccccaccaatccccattgtccattgtatcattcttatgtctttgcatcctcatagcttagctcccatttatgaatgagaacatatgatgttttctaatcctgagttacttccacatcacagggtagttctctctgaggaatattctgagttgtcattttcagtctcatatcccaagctctgaagggcacaaggatcaactcaggccasgtgtatggatacttgacattgatggttgctggaccttagccatttatgcccatccacatggctccagccatctcggtaaaagtaatgccttccaagcaaatccccagaataattttactgaagcatgacaaaattcacatggaagaagacagctcctgaaatattcatgacagctcccgcaggcacactactcactgccccaccaggacccggggaacctccacctgccacacagtcccccaaggggaaacagaggcatcgaaggttccaggggtgaggtgacactcactgtgggtagccagcagcagccacgaattccattttttggcattatatattactttttaacatttaacatttttatagactccttttcaaacttgctgctgtttattttttatttttatttacttatttttgagacagggtttcactctgttgccctgactggagtgcagtggcatgatcacagctcactgcaacttgacctgcagagcttaaatgatcctcccacctcagccacccaagtagctgggactacaggtgcatgccaccacactctgctaagtttttaaattttttgtaaagacgaggtctcactatgttgcccaggttgctcttgaactcctgagctcaagcaatcctcctgccttgacctcccaaaatgttaggattacaggcgtgagccatcacacccggcttctgctgttttattttatttattattattattattcttttttgagatggagtcttgctctgtcgctcaggctggattacagtggcacaatctcagctcactgcaacctccgcctcctgggttcaagtgattctcatgtcttagcctcccaagcagcttacagacacccgccaccatgctcagctaatttttgtatttttttattagagacagggtttcgccatgttggccaggctgatcttgaactcctgacctcaaatggtctccccacctcggcctcccaaagtgctgggattacaggtgtgaaccaccatgcccagctggcttctgctattttagattgacctttctacagttagtccaaattaagaaggtttaatattatatatgaaagtagcacactaaggaaactagcattctttctttttaagaatcaccaatgttattttattaatattttatattttgtcttttaggattatatattcatcaaacagaaacataaaaaactatgaagaggaaattcttaggaaaaagataatggagattgggatatcacaaaagcaacttgacatcagttttccaaagtgtgaaaactcatctgattgttctcttcagaagcatgaaattccagaggatatcagtgacagagatgatgatttcatttccaatggtgaggtattttttatggagttgtatttatagccgtraaaataattatattctgatacagttagagaaaagcatacttcaaaaatatgctttactgattttttttttaataagcatggagaactgaaaacactagtattgttaactcccagtttttcccaagtaattggagatagggttattatgaataaatccatacataactcacaattctctttttagccattatgcctctacgttattgtccttattataatctataccaataaagaagctttggcagagtcaattctgtttcacaccctaacaaaaatggtagcctagttttatgcatattaaatggttaagaaatacataaatactataatacatatggcattttaccatgaaagagacctgaagtttgcttgtgaaagtagatttcagaaggattgtggcttgtgagttattgcaaattgatggaatgagaaagtggatttcagaagggttgcagcttgtgagttattgcaaattgatggaactcattttttcaaaacaagtgttagagcggaattgattatatttgaaaatatttgttgggttaaaggatcttattactggtgtgtaaaccaacaacaattacttacgtgatttatcctggttagattcctgttatattacagtcaacatatctaattatggtgaatgaatagacattctaggccttgaggtagatcattcatatgcattaaggatggaatgcattaaagatggatgcatgtgtagagagaggttctgacaggaaacctgaggtccctggatcagagaacagaacatttatcatttgcagagcatcttagtgccagttctcagctcctaaactccgtgaggcactgcagtgagggcctgatgttacctagcccatgcagtgggattgcaccacagaaaaggaacaccaaaattaggaaactttaagcttccacaggttgttggcagatcttcccattctcctctctagagacagaaagacctttctttggaaggtaaatctttgggaggggaggagaaggtagtttccttaccctgtaatataaggaaatgacttccaggggaggaatgtttctcaatttttctggagtaatacatatctctagtttccaaggcatgtttgctttttaatcatcctttaaccaagtttactggtgctctgctcagmcaggtcagaccatgytaaaacataaaaatattcatagaaaagtgtctcccaatagttggttatctgaagtcagatgggaatttataaaaccagatatagatgggtgtgtctcataacacatgcagtaaactgaggtatctggtagatatttaggtgtgcatgtgtgcaggtgcatggctcagttcagctgagtgcagctttctgcawtaacytrgtgtttctcatctgaattttgcacytaagcaaatgcgaaattcatgttatgctcaaattgttccctaatacatgaattgtattggatcaaactcattttctcaaaacaagtgttagagcagaattgattgtatttgaaaatattttttgggttaaaggatcttattactggtgtgtaaagcaacaacagttactcatctgatttatcctggttagattcctgttatattacagtcaacatatctaattatgagtgaatgaatacayattctaggccttgaggtagatcattcatatgctttatttaatttagtctcataaaaccctaggaagtgttacagactgatgttatcaataagacccagataggactctaagactcagagagcataagagactttcccgaggtcacacagagcaattgacagagctgatatttgaaatccagttttcttactctagtctagagctctgctgtggctctatggcaaccctttaaaatggccatataagttgtgagtttaagtgaaaagagcttctgcctttcgactgttttctccatcactccatggaaaatccccacattcaccagtaacctgccagttgccagcttaacagacatttttttgcctacatcttataaacctttttgcagcctttcatactgttaatactgccctccttgaaacttctgttttctgtgacaccatgctttcctgattttccttcttggccatttctcagtcttttttactgatgtatcatttttctaccccttaaataaatggtattctgtaatttttttgagcttcatatccaaccactgactaaacatacctgttaaagtctaccttattattattttttttttttgagaaggagtctcactccgtaacccaggctggagtgccgtggcacaaatcttgtctcattgcaacctccgcctcccgggttcacgccattctcctgcctcagcctcccaagtagctggaactacaggcacctgccaccacgcctggctaattttttatatttttagtagagatggtgtttcaccgtgttagccaggatggtcttgatctcctgaccttgtgatccgcccgcctcagcctgccagagtgatgggattacaggcgtgagccactgtgcccggccccttatttttttattttttaaatttttattgtttttaatgagatggggtctcactctgtcacccaggcaggagtacagtgtcatgatcgcagctcactgcaacctctacctcccaggcccaagtgatcctcccacctcagcctctcgagtagctgggcccagagggctgaccaccacacctggctaatattttgtattcttagtagagatgaggtttccctgcgttgcccaggctggtcttgaactcctgagctcaggcagtccacccgcctcagcctcccaaagtgctgggattataggcatgagccactgtgcccagccaaaatatatcttaaatatctcaaatgtaacctgtcccaaattcaacttgtgggactctgtcaccagtgactgatcttcaccagagctactggccaaagtttgttgacaggcaaggttacgataaacagttgttaaaagaaaaacgttagataaaatgaacctgagtttatatgaacaaagaacaawtcatgaatcatgcagcactcagaaccagaagaggttcagagaactctgctctacaactggccagtgagtatgtatagacagaacatggaagtaaagtacagaaatggcttgattggttataactaagtgtttgccttatttggacatggccagataatttggctgcctgtgattggccaaagctcggctgcttataattggctgagatctagctatctattaccaaaaataaacactcctaagttaggttaggttttggtttgtttacatactaaggttgcagttccttaagtaggaactcaaagtatggaggcagcttacttcaaatttaagttaacagtttctgcctttggattagtctcttgattgtgagattgaccaaaaccttgggcattgatgccagtctcttgataccatcataatggacttgtttggtctcacagtagaatttactggtctccatgtcaggtcagttaaatgattctttacattcttgctgttttagtcaaagttaagaccatttaatgcacgatggatggcagcatacaaatatttaagtctcctgagaggatgtggtataccagggatgctactatcatgactatcaggaggctaataccaaaaggcaaaagtgtactcctgccaggcgtggtggctcacgcctgtaatcccagcactttaggaggctgaggcgggcagatcacgaggtcaggagatcgagaccatcctggctaacatggtgaaaccccgtctctaytaaaaatacaaaaaaattagccaggcttggtggcatacacctgtagtcccagctacttgggaggctggggcaggagaatggcatgaacccaggaggtggagcttgtggtgagccaagattgcaccactgcactccagcctgggcgacagagtaagactctgtctcaaaaaaaaaaaaaaaaaaaaaaaaaaaaagtgtagtcctttataggggcccctacaaaccaaactgatcaaaattaatsaaatcaaaatttaggcaagataratagttcaacagtwtttgagtcaaattggtcatagtctgttcagggaatgatggtgattaaggaccatagtttactgtagaatgatctgatttcaaaaggtatccaagtttgtgaccagcctgggcaacataaggagacccccgtctatataaaacataaaagtagctgagcatggtggcgtacacctgtagccccaggtacttgtgaggctagggtgggaggattggattgcttgagcccaggattttgaagctgtagtaagctatgttcatgccactgcactccagcctgagtgacagagcaagactctgtctctaaaaaataaaatacagttttttttagataatccaatattgttgttagcctgataacacaggtcatagtaacctagagacccacaagaagaaacatagagattagaaatttttctaatttctaattaagaattaattaattctaattaaaaattagaaaaagatgctcataaagaggcttcatttttggtgtataattttgtgataatactacctatatttaaatatgtatatttaaaagtrtacagtcatgtgctgcataatgacattttggtcaacaatggaccacatatatgacaaaggtttcataagattatgataccggatttttactgtaccttttctatgcttacatacacaactgcttaccattgtgttacagttgccaacactattcattgcagtaacatgcggtactggtttatagcctaggaacaataggctataccatatagcctatgtgtgtaataggctatatcatctaggtttgtgtgagtacactctgtgatgttcacacaggaatgaaatcaggtaacaacatatttctcagaactgtcattaagggatgcatgactgttattaagcaatgcatgactatatctatatttacatgtaagtggaaatatatatatttcaaaggagaaagtctagatgatttaaactttttgttttatttttaatttaccacttacatattccaactaattgagataattatgtgggaaacctcttgataataatagaaaacaatttttggacgtttgtaatattaaactattttttagtcttgtttttcttttttaaagataattatgacttggagcctgcatctgaattaggagaagatttattgaagctttatgtgaaaccttgttgcccagatattgatatttttgttgatggaaaacgttttaaagctcacaggtaaatagacacgactgatttgctgtcttggttgtggctgtagagtgtggaagggcagctgtctcttaccagcacggtggttttcaaactctggttttcacacaggccacaggggttccatgaaggccaaaggggttccactgtgattcctcagggggagtccaacaggggaagaggttgaccatcaggcaaggttttctgcaggttttcacacgtgcatacgttggcctacccagacatgtgcatgtatatgtttctgccagagcagatctcatctatgttctgcattgggcatgaacctaagattttattagaagaaaatgttctgttgcctaaaatagatttgaaagccactgtcatagaaaatgtagttaaatgcagtttttaattttataggcattatagtattgagaagtattatttctacatgaatgacatgtattttctctgaatgcattttggctcagattccgtgattcaaaatagttgatactcatgaatagcattgattaggaggtttaatatttcaatgtactttttaaaaaccattgttctgcttcagaattgggttgcttagacattccaggcgtttagatttcaaattaaagccggttgcctgttttagtcaggctctttgattgcaagtaactaaaatctgcttaaaagcagaaaaaaatttaataagaaatacatattatcttttggaactcaagggaaagaagtgcagctgggtctcactatggactagaatctgaaccagaaaacttaggaacccagccagttcttcctcctctttgtgtttcaaatagaaggttgataagaagttattctggcgctactgaacagaaagagccagagtatttgcagtggcaagtggtaatcttctaggttcaggggtgcacagcccttaatgaaattagcagtgggtttaggttactgtaatccaccaagccaaatagtagtaatatttgtactcttagaaatcacgctggttttgccagttgacagcaatacaacccaaggattgctagtctgaactagctatttactattcaaaatttgaacttttctctatgggactrtgtactttgtaaatatacatatacgtattttcctaatttttgtgaaatctgcattaaaggttgcaaaattcagaatataatstagattgawcattatattttccrtatcatgggtatatttcctaaatcatggtgtgggtgtaggtgtgtgtctctctgtcttgttttctttttttttttttttaaccaacacaattgtattttaaaaattaattttattttgtgtccacgtttttcatgagaccatgtgggcatcctaccaaagttatagagccctatagctattgctgtcatacagggaaggcaggaccctgtgaccatttccaatatgtcctcaaacagtgcctatatttggcctctccctgtgtgctgcctgacaatgaactaacaggactgtgttttaggagctggacctagaatattaggtttgtattctaggacagctcttgctcacatttctggtttattttgttcacctagcagtaaaaaagaaattcatattaactagaaagacaataagttttcctacttttttcttgcccttatgtaagttagaatagccaattttaaattataaggttaccttcctagtccagactcaaacatctttctgtttatagtacatattaattttattrtgtagtttaaggaatattgtgtcagtagttcagataatacatattcatctaaagcccaacattggaactttctcaattacttcttgttctagatgatcattgtcagcattcttctagtggtgtggctaaaaatccttttgtaatatggctactttaattttttaattatacatacttayatattaaaagatcaatacaagtacttacaaaggaccaggatttatgactggaattttattcagtttaggtatcaacatttttaaaaccttagtttgctagtttaatgtgcccaaattggtatggtcttctattaagctaatatttcatggtcaagttacttcctcagtaacacccctcataacacaggtcttccaaggtagtctctccagttgctctgtccattctttaccatgatcctcagcccaatccccggaacactttctatgctgaaagacagtctgatgccattcacttgcttgtggtggcacaactaagccaaagaaatcatttctaacagagtggttaagagtgtgtggactgtggggacaatctgcatgcgttttaattccatgtccaccattattagctgtgtgaatttgagtaagtcacttaaccattcattctgcgtttcagcatccttatcagagatggggattataacagtctccatctcataatgtgattgtgagaattaaattacagttgttactgagcactcattgggcttactacctgattagccttcatggattccattagttatgttactacttttctgaatattgtatcctgggatgctactgcacattaccccttgttgtggacctctgtaacattatcttcctgcctgaaatgctctcagttgccatatgaataccatctgggatctcggctcactgcaagctccgcctcccgggttcacaccattctcctgcctcagcctcccaagtacctgggactacaggcatctgccaccacgcctggctaattttttgtattttttagtagagacagggtttcactgtgtttgccaggatggtctcgatctcctgaccttgtgatccgcccacctcggcctcccaaagtgctgggattacagtcgtgagctaccgcacctggctgctgacttcccattttttaatgtaatttattattttaatgttttatgaaagaagttgaatgttatatttttaagataatttgttgcacttctatgttccataattaaaattctcttatgctgcctcgttgaaaaagcagagcagtcattcctttttttttttttcctaagacaaagtcttgctcttttgccgaggctggagtgcagtggcgtaatcttagctcactgcaacctctgccccccgggttcaagggattctcacgtctcaccctcccgagtagctgggtttacaggcgcacaccaccacgcttggctcatttttgtgctttttagtagagacagggtttcaccatgttggccaggctggtctcaaactcctgacctcgagtaatctgcccacctcagcctcccaaagtgctaggattacaggtgtgagccactgcacctggccccatcatttctaacttgagctttgtgacactcaaaatctggtatatcttccagaatacctttcttatcaatgcctgataatataccattagacattcattcatttggttaagatgtcaaatcttcctttaatatctctctgaatatttagtaaattggcactgtgtccgaagatcattgttttgtatgtccttgaaaaagctaaaagttttttcagaagtggtatgatttagtaattgagaagttggtctttttgygtttagattatgatcccaccgcttatttttaaaattccaccacttattaattgttgagaagttacttaatctctccaagtttcaatatttttatctgtaaaaggaatagtagtagaaattatagcatgggtggctgtgaagattgaatcagataatgcacatgaagcacttagcatagtacctggcayattgtaagctttcaaaagtaaatgttagttgctataagtgtgtgatagatatctgtaagactggcacatatgttgcctgttctagcttgtcttatatcagggggcaaactatggcctaaatgtggttaagtggcctgtttttgtatgaggcaacaaaaaagcagagacaagtaatgccacagggacctgcaagtctaaagtgcctttcaagagtcacttgggtttgttcccaaacctgcrtatgccatttgaatttattattttgatgacaatgaatataagtcaatgatacataaaatatgaaagagaaaagttattgttccagtgaaaactcggatgagtgctttggggggattaaataagggaaaggcacttaaaaaattgctgttgtgaacaggtgcagtgattcacacctgttatcccagcactctgggaggctgagacgagaggatcacttgaaccagggagtttgagaccagcctaagcaacaaagcaagaccccatctctacaaaaaaatttagctgggcatggtggtgtgcacctgtagtctcagctaatcgggaggctgaggtgggaggatcatttgagcctaggtgtttgaggttgcaatgagccagtgagtgccattgcattccagccttgggaacagaacaagaccctgtctcaaaaaaaattaaaatcaaactaggtatcatagtgtatatatgtattgtttttgtgaaaatgaggcttatatcagcaaacccatgttaaaaaaaagatgggccttatrataaaagatttgtgaattaaatgcatatttcttcttaagttagagtaaaattatagtatacaaaaatagcttttttaattcctcatttttttcaattaactaaacaactattagtccaaattttgtcggataatagagtatccatggcacttaacttcagaaagtccagtcctatgaaagctatagtcaatggatgtcacaaaattctcaagagaaggttaactttgcttttacaaagttatgttctctaaagtatttgataagaagtgacatggacaatagtgattactccaaaaatttagattcaccactctggatttaatccttactcagttatgtggaattaaagcaaataaataaataaatacattcttagagcaagaatactttaaaaattagtcctactaaaatttccttctctagagcttctctgcataatccaggccattattctgcctggagtagtgaatctagttcagctaacattaggaagtattgaatagcagtgtactaaagcagcagcaaggcggaaattagggcatcttgatagagccagaagcagcattaacagttgaaattaaacttaatcaaaaggagaaaatagtttttggcatgttggaaaataacaaatttggcaaagatttttaatacaccataccatctacagcattatttttaaacctgaggcatgtgtcctaattaagtaggaatgttttctaagtttctgttttaaggtcagagtaattgtttaagcctcagatgcttctaattttactaaaatggaaatggctgacatgctgtgttcaagtcttctgagaagtagacacaaagatgggattagactttcaagaaatgtattaggctaaatgtatgtgagagaacatagggagaaagccagagaaaacagagctgctagactgcaacgctgatttgactctgagtgaaggagaaagagaaggaagttagatagaagcatcttagactgcagtggagttccaagaaaagttgggcaaggccattattggaaagttcccatgccaaaggcacccatcagagaagcgcctgttttctagggctagacctgccttattgtccttgctggcctcagtcattgtcaggaagtagcttctggkgagatgrccttgtgacctaggtggaataaatttccgagtgctgtagctgaagctatcagtcattatgcagtcaaagattagaggggtaggcccggtgcggtggctcacgcctgtaatcccagcactttgggaggccgaggcgggcggatcatgaggtcaggagattgagaccatcctggctaactcggtgaaaccctgtctctactaaaaatacaaaaaattaaccaggcgcagtggcatgtgcctgtagtcccagttactcaggaggctaaggcaggagaatcgcttgaatccaggaggyggaggttgcagtgacccgagatcacgtcactgcactccagcctggacgacagagtgagactccgtctcaaaaaaaaaaaaaaaaaaagattagaggggtatattctcatgactgctacacatataaatcatgacatgctatgtattcatatacctttaccactaggcatagtcarataaagtaagaaataattgttaaaaaaaacacttattatttgctaagtattgtggtgctgagattgggattcataaagaaatgaatgaagcactgaggattaaatggattatctatcgatattcaacagtgtgaaagaaaagactgccatggaaaaaagtcctggcagatatccaataaactgctaaaagtggttatttctaggtcatggaattgaagtaaatgaagaagcagggtgagaacttaaaattttcactttatccaattctatattgaagtttattacaaacatattgtttttataatttaaaaaagtttttaaaatctggctttccatttttaaggaaagaattacagactaaaaattttttattctgtgcttgcttcggcagcacacataattttttttatctgttcaaataggctcaatcatactatgaggtcactatctttgtcctcttttatagaaaaataaaaactatatagcaaacttagtacattaaatattcatttgattgtcagggtccctgagatccctccttcttcagggggtctggtgtacaaactgtgaggaggggagattctcagtgtgtttggaggactgagtgtggcagggactccccaacaattgaacacttctctcttcctctcatgctcttgctggggctggtggtccaggggatcttactctttggaggccatgtggaccatgaaacccaccaccctgttgctgtagccaaattcattgtcatgctgggaaatgagcttgacaaagtggtcattagggcaatgccagccccagcactgaaggtggaagagttggtgtcactgttaaagttggaggagacaatctggtgctcattgtagccccagatgcccttgagggccccctctgatgctgctttaccaccttgatgtcatcatatttggctggtttctccagagagcaggtcaggttcatgactaacatgttggcagtggggacatgaaaggccacgccattgagcttcctgttcgacttggggatgaccttgcccacagccttggcagcaccagtagatagatgcagggatgatgttctggagagccccatagccatcacaccacagtttcccagaggggccatccacagtcttctagatggcagtgatggcatggactgtgatcctgattcctcccatgatgccagagttgttatggatgatcttgaccagggagctaagcagttggtggtacaggagacattgctgatgatcttgaggtttttatacttcttatggctcatgcccatcacgaacatgggggcatcagcagagggggcagaggtaatgacccttttggctccaccctctaagtgagccccagccttctccacggtagtgaagatgccagtggactccataacataatcagcaccagcgtcatcctgtttgattttggtgggatctcgctcctggaagatggtgatgggatttccattgatgtcaagcttcctgttttcagccttgacgatgccgtggaacttggccatgggtggaatcatactggaacatgtagaccatgtagttgaggtcagtgaaggggtcattgatggtaacagcatctactttgctagagttaaaagcagccctgattaccaggcacccaatatagccaattccatttactctgggcttcacttttaccatgatgtctcagggacatgactggtgctgcccaagaacggaaggagcagatggcaaggttctgtcactttttctcttccttttgcttactttaggtttaatttatgctgccatttatactttcttaagatggaattctagatcattaatatgaaacgtttttccttttctacaataagcatttaaaagctaaacatttcctaagcactgcttagctgtagcctacaaattttgatatattgtattttcactcaaataaatgtattttctaattttccttttgatttcttctttacccatgggttgtctagacgtatgtttaatttcaactgtttgggaattttccagataattctccattattgatttctagtttaattccatkgtggtcatagaacatattttatattattttagttttgtttaaatttattgagacttttcgatggcccagaatayggtctgtgttagtgaatgttccacatgtacttaaaaagaatatgtgttctgttgtcctgtggtggagtgttctataaatgaaaaaattggttgatagtgttgctcaagttttatgtatccttagctgaatttttgtctacctatcctattaattactgatggagtattgaagtctccaagtatcattataaatttatttctccttttagttctgtcagtttttgcttcatgtattttggagctctattatttgttacatacacatttgggattgttatttcttcataatgaattgagtcctttttattatgaaatgttgctttttaccccaggtaatgtcacttgttgtgaagtttactttggttaatatcaccactccagctttcttatgattagtgtttatgtggtattctttttatatcctttaacttctaaactttgtctttatatttaaaattaatttcttttagatagcaaatagttatgtcttgcttttgctatccagtctcataatctccttttaattggagtagactatttgactatttgtaataatgtagttattaatatgtttgagtgtaagtctaccattgtactttttttttttttattggatcactctctgttgcccaggctggagtgcagtgatacgatcatagcttctgtaaccttgaactgctgggctcaagtgatcctctggcctcagcctcctgagtagctgggactgcaggcatttgccatcatactcagctaatttaaaaaattttttgtagagatgggttctcgcattattgctcaggctggtcttgaactcctggcagaagggaatccttctgcctcagcctcccaaattgctgggattacaggtgtgacctaccatactcagccctaaaatgctttgtctgttaattccatcttctcttgtcatttctgggtctgataatattgactgattttttccctcttttaatgttcacattttgctgctgcttcacattacctaataagtttttaatcaaatgccagacattataaatattatgtttttgaatgtttgaactttattgtttttcttgaaaaagattattaaaggttttttttttagcaggcatttaagttattgtggatcagcttcatgtttatgaagcttctttttaaattttgttagggtgcatctaggatagcctttgctctaaatgttgtaaagcctttctactgaggcttctgggatcttttcttagtgccccaagtattcagttctggccggaaggaacttgaatatctgtcagccatatagcttcctggcttttattctttgccaggctttgtgtagttttaccttatgcacactcaaattatattcagccaaagctcaagggagggagtatctactctgatttctgcagttcttcatgactccctcttctatattactgcacctcacaaatttcagctgactcagcttcttgggtctcctatatcatctcctcagctcagctaagccacaaggctctgctcgtttgtccttcctgtgcattgactagaaactgcttctaggaagaaaagcattgtgattgtagagcttacttcatttgtttttcttctcttgtggatcagagtcctgtactgcctttttccatggtcatattttgttcaattttctaattattaaatggaaggtagggaagtcctatacttatgggtagaagcagaatcctaattttttcttagttggccttattttttagaacagttccagatttatggacaaattaaaagagtacagtattctcgtatacccccacacctagttcctcattattaacatcttatagtacatttgttacaattgagtcaatatcaatacattgttattaactaaagtctgtagtatattcagatttccttggtttttacctrgtgtccttttgtatttgaggaatcaatccccgatctcacattatgcttagttgtcctgtctccttaggctcctcttggctgtaacagtttttcagactttcttttttttttttttttttttgatgacattccagtttgaggagtactggtcaggtattttatagaaattcccttaaatggagtttatctgatgtttttctcacaatttcatggattatgggtttgggacaggaagaccacaaagataaagggccattttcattatatcatattaaaggtacatgtgatcaacatgacatcactgtttatgttaaccttgatgatgaccttgttttcatctggtttctccactataagttactcctctcctcacttcccatttccagactctgctctctggaaggaagtcactrtgtgtagcccatatttaagtgatagaaagtaatgttctacctccttgaaccaggggtattatccacataaattatttggaattcttctgcacaaaaaacttacctcttctcctctacatattaatttattcaatcacttacatatatcagtgtagactcatagatacttattttgtactttagcttataatttggcttttctttctttctttttttttttttttttttttgctctatttgttacaactttagctgtgggagctctttcaggtggctcttgtgtcccttttactccctcagtgtgtgtgtgtctgtgtgtgtgtgtgtgttgagcattttcttactttctggcactgaaagatatatctggtataaaagacaaacgatacacctatctacatggggcacttactgtgaatagaacttgcaggactggaagttgctttcggtgagtcattgagtgagtggtgggtgaatgtgaaggctcagttcattactgtacactactgtagactttataaatactaaggatacacacgaaatttattttaaaaaactatcttcaataattaaccttggcttattgtaacttttcattttataaactttttaattttttgaaactttttactcttttgtaatcacacttagcttaatcacaaacatgtatagctgtacaaatttttttctttttttcttttttttttttttttgagacagggtcttgctctgtcatccaggctggagtacagtgacgcgatcatgggtcactgcagccttgacctctctagctccagtgatcctcccacctcagcctcttgagtagctgggaccacaggtgcacgccaccacacccagctaatttttgtattttttgtagagacaagttcttcctgcgctggccaggccagtttcacacgcctgggctcaaacagtcctcctgcctcaatctccccaagtgctaggattgcaggtgtgagctgccacatctggctttttactttgtatccttattctataagctcttttcttttcttttttcttttttttttttgagacggagtctcgctctgttgcccaggctggagtgcagtggcgcgatctcggctcactgcaagctccgccttccgggttcacgccgttctcctgcctcagcatcccgagtagctgggactacaggtgcccgtcaccgaattttttttgtatttttagtagagatggggtttcaccgtgatctcgatttcccgacttcatgatctgcccgagggattacaggcgtgagccactgcacccggcccttttctttttttttttttttttttttttgagacggagtctcactctattgcccaggctggagtgcaatggcgctatcttggctcgctgcaacctctacctcctgggttcaagcaattcgcctgcctcagcctctcgagtagctgggattgcaggcatgcaccaccacgcccggctaattttttgtattttagtggagatggggtttcaccatctctaacttgaactcctgatctcaagtgatccacccgcctcggccttcaaaagtgctrggattacaggtgtgagccaccgcgcctggcctatacgcttttttctgttaaaaaatatttttaagtttttaaacttttgttaaaaattgagacagaagcaaacacattacttastaggcctacacagagccaggattatcagtatcaatcccttccgcctccacatcatgtcccactggaaggtcttcggggcagtaacggacatggagctgttatctcctaacatgccttcttctggaatacctcctgaaagacctgcctgaggctatttaacagttaactttttttttatatgtaagtaggagtactctaaaataacaatataaaatgtagtacaataaaataataagccagtaacgtagttgtttattatcaagtatgtactgtasataattgtatatgctagacttytatacagctggcagcacagtaggtttatttataccagcacctccacaaacatgtgagtaatgctttgcacttgaccttctgtcagctatgacatccctaggttgcaggatttttcascttcattataatcttatgggaccatcttcatatgtgagtggtctcttgacccaaacattgttatgtagcacatgactgtaaattttggaatcaccttgtcagtatttacaaaatagctttctgagatttagtggcaggatctcagctcactcctacctgcacctcccaggttcaagcgattcttatgcctcagcctcccaagtaactgggattatagacgtgcaccaccaagcatggctaatttttgtatttttagtagagacagggttttgccacattggccaggctggtctcaaactcctggcctcatgtgatctgcccgcctcagcctcccccagagtgctgggattacaggtatgagccactgcgcctggccaaaattgcctaaatttttaaaatcctaaattggtgttgaattttgtcaaatgctttcctgcattgattttgatgatcacttgatttttctccattcttttgttaatgtgctaaattatgttgcttaatttttgaatgaaaaaataatcttacattcctgaaataatttcggtttggttgtgatgttttattcattctatttcgtgctgaattcagtttgctaatattttgtttaggaattttgcrtctatgttcatgagacagatcggcctgtaattttacttttttgtaatgtccttgtcaggtttaggcctcaaagttatgttgactttataaaatgaactgtgaagtatttcctcttttttatgctttagtttgagtaagattgattttttttaaaacttatgtcgtccttaaatatttattagaattcactagggaagttatcttggcctgttactttctttcttgagtaaattttgttttcattctttttttatagttaagtatattgagttagaatgcatacacaaacaaatgcacacaacttaaagtccagttckatgaattttgactaatgtataaacctgtttaacttccactgtaagcaaartatagtgaattttcgtcaactaaaaagtccccttgtrcccatttaccttcagtacctatccctaccccagccacaggcaacaaatgattttcatgtgcttatttgccatctgtatacctctttggttagttttctgtttatatcttttgcccatttatttttttatttttttttttttgagacagagtcttgctatgttacccaggcaggtcttgagctcctgggcttaagggatcctcccgcctcagcctcccaagtagttgggactacaggcacacactactactcttggtttgcctatttttaaatcaggttgtttgttttcttattattgtgttctctacactgtaggatattctacctttcctagaatttcatgtaaatggactcagacatactgttgtgtctggcctcttttgttcagtgtaatgtttttgagcttcatccttgcatrttatgtgtatcagtgattgattcaatttttattgctgcatagtattggattgtatagctataccacaatttgtttattcattctcctgttgatggaatattggttgtttccagtatttagctattattattattatttttttttttgagacggagtcttgctctgtcaccaggctggagtgcagtggtgcaatctcggctcactgcaacctccgcttcccaggttcaaacgattctcctgcctcagcctcctgagtagctgggactacaggtttgtgccaccacgcccagctaatttttatatttttagtagagacgggatttcaccatgttggccaggatggtcttgatctcttgacctcgtgatctgcccaccttggcctcccaaagtgctgggattacaggcstgagccaccgcgcctggtcttttttgtttgttttgttctttttttagacagagtctcactctgtagcccaggctggagtgcagtggcatgatctcggctcactacaagcctgcgcccctcaggttcaagagattcttgtgccccagcctcctgagtagctggggttacaggcgtgtgccaccatgcctggctaatttttgtacttgtagtagagactgggttttgccatgttggccaggctggtcttgaactcttgacctcaagtgatcttcctgccttggcctcccaaagtgttgggattacaagcgtgagccaccacacccggccagggatgtcattttttataactagccataaactttagctttgaagtaaaactatttctagcaagtgattcttacctgatattttttgttgttcttgcccatattttaattgggttgtgttattatggttctctatgtattctagatttaagtttttgtatatggtgtgaggcaagtgtcaagtttaattttttttctacaaacatcctgttgttccagtaccttttgatgataagactgtcttttcccccattgaattatcttaacgccctcatgaaaagcaattggccatatgtatgtggatctacttttggactctcaattctgttccagtgatttatatgtccacccttatgtcaataccacattattttgattattgctgctttatagtaagtgacatcatgttgcctgaaatcacgttttccacctttattcttctgttgatggttgctttggcaattaggggtcctttgcattttcgtagacattttagaatcaacttatctattgctactaaaaatgcttgattgggattgtggtaaatctagaaactaatttaggaagaatggtcatattaacagtttcaagtttcagatccatgagcatattttcactctccattaggtcttttaaaatttatcctagcagtgttttatggtttttactgtagaggtcttacacattttgttacatttgttgctatgtgtttgaccttttttgatactagtgtaaatggaaattttttcttttatgttctagttgttcattattacactaaatcatctttgggtgactactaaacattctattgaaaatttgtgaatggcgtgaacccgggaggtggagcttgcagtgagccaagatcgcgccactgcactccagcctgggcgacagagcaagactccgtctcaaaaaaaaaaaaaaaaaaaaagaaaatttgtagaaataatttgacactcaaggtgatattttaatgcagacaggatttccttttgcttttgtctggctggcagactagatgctgatcactttgttccagtcaggaaccgagataattcaaaactggctttcaagtctaataagggcttrtctatttcctgttcactcttctgtttagaatgtggccgttcgggatccaactgaaatcctgggttatctactaaaacccctcctctttgatggtccccaagttccaatttgtgtgaagattgccagaagctatactcagcttctcagccttccagctgttgcttttgctttcagatttggcaattgcctcaatggaaaaagttacctcaaatacttgggtggcttcttttgtcttctgtctcataacttgtgtaacttttctaatcactgtggcagtgttctgatgccttgaaagcatgctttccttttttttgcttcttttcttaaatatatatattttgtccatctttcctaagctgctttcagcaggagggttgatctgagacaacctaggaagccattccagaagtgtctttctcttctgcctgtcctccacccttcattggaatataatattgttccgtgtatctcatttactgctgtactcccagcacttagaatagtgcggagcacagaatagaatatctgttggattaaagatgaggctagccaggagtttgaggctgcagtgggctatgattgtgctactgcactccaggctgggtgaaagagcaagagactctgtctgtagtaaaagaaaaagaaagagtgagggtgagcgcagtgatttaacacctgtaatctcagcactttgagaggctgggacaggagggtcactggagcccaggtgtttgagattagctagagcaacatagtaagactctgtctctctatatatgttttaaatttatttttaaagaatgaattaattagcattttatttgagaagatagaatggtaattcaaaagaaaatatctttcttgtcattttttcaaacctaagatatatcctttcttgaacataattatggtgagttttgaactagaactccggacctttagaattgtaagctctttttttaaaatttaaaaatatttttaatttagagttgtccctatttttatttttattttctaagatattgtggaatgtattttttatttaaaaatgtttaattgacaaacagtaattatagtctcttattgatatttccttaagatttaaagtaacatctttggtctttgtttctccatttgtaaatgatttattcctcttactcatggacatagtttccattgttgttaattaaagagcctttgagaggcattgagggaggttggaggcagagtagggtggacagaggagcagaggagagaagagggaagctcatgaaagccacgtggagagggagtgaagagcagaagaaagaatagrggggacctgagacactcagagagagacagaaccatggcgtctggtgacactgctgccagagaggaggagcatagcctttgagaatgtgagctctacctccagaagcacaacattcaggcactgctcaaagattctattgtgcagttatgtactgctcaacccgagggactaatggcattcctcagggaacactttgagaggctggagaaggaggaggcaaaacaaattcacaatctgcaggaagcaggcacttgtacagaattcaggagaatgaaatctctcctcctccacccaacccagtggttaaagatcagaggtgacaaggtaccgtcagcactgaagtctacatggaggaagatgccacatcatatgttagaaagattataccaaaagattataagattataccaaaagccattataaggcaatgtctttagccaaagccattgaaaagaatgtgctgatttcacatcttgatgataatgagagaagtgatatatttgatgccatatttccatgtctcctttatcactggagagagacagtgattctgcaaggtgatgaargggataacttctaggtgattgagcaaggagagagggatgtctgtgtcaatgatgaatgagcaaccagtgttgaagaaggagggagctttggagaatttgttttgatttatggaacacctagagtagccactgtcaaagcaaaggcaaatgtgaaatggtagtgtatcaaccgaggcagctgtagaagaatccatatgggaagcacactgagaatgtggaagatgtatgaggaattccttagtaaagtgtctattttagagtctctggataagtgaaagcatcttacggtagctgatacatgggaaccagtcaagtttgaagattggcagaagattgtggtgcagggagaaccaggggatgagttccttattattctagaggggccagctgctatgctgcaacgttgataagaaaatgaagagtttgttgaagtgggaagattggggccttctgattattttggtgaatttgcattcctgatgaatcaccctcctgctgccacagtggttgtacatggccccttraagtacattaagctggaccagcctagatttgaatgtgctcttgcccaggctcagacctcctcaaacgaaacatccagcagtacaacagttttgtgtcactgtctgaaatctgcctcttgggcctcccttttctcctctcctcaatccgtacttcactcatgcagaccgctttattttcgctatttgcagtgccaaatggacactggcatcacagcttcttgtctgtttatatattaaaagttgcacttattgtacggtttttaatttggagcagtaattaaatgcttgtacacaattaaatagagttytatggagtctttgctgttactgcttcattttgggcaatgttagcattcaacctctgagcagtgagtgccatgcttttgggtgaaggcagatcccagcatcagttgaattaccatagagtaatgatgtaacagtgtaagatttttttttaactgacataactttccggttttaagcatatttagactgtggctatatatgctgtatttctttacagaataaatgatttctcattaagctttaaggattaggaaaaatggatacagaaaaatcttaatatagtagaaaaacatctgcctgtaattaaactagtttaacagtggaaaaatgctcatttttccactcttaaattatcagtgggtatgataagtttagtttctttttttaaccagaatttttgtttgccaagctaatttgcctggttttgtttatatcttgttattaacgttttccctccagttctgaaatatttttagatgtggctatctatacctgccttttaagtttggaaccaaatcatagactgcgaatattggttatgatttaactacatctgcctctgctcacaaattctgattagacctttatccagctagtgccaaatattgatcatatgctgaattgaggatcagaattcgaggtctacactcctggttgttaatttagagcttttggttaatgtacmtccttcagttgactctagtatgatctcctatgcttatcaagctgattccaggagattgaatttgctacaactagattcagttggaacgaaagtcataacagaaatggaggtgatattgctaaagggagaagtgtcaagctgacaaagttcagtgtctggagtttttccccactaaattcactgggacatgagattttggaagtttttgtttgtttgtttgtttgtttgtttgttttgagacagagtcttgctctgtcacccaggctggagtgcagtggtgtgatctctgctcactgcaacctcggcctcctgggttcaagtgactctcccgagtagcagggactacaggcacagccaccacgcccagctaatttttgtatttttagtagaggtgggcttttaccatgttggccaggctagtcatgaactgctgacttcaagtgatccgcccgccatggcctcccaaagtgttgggattacaggtgtgagccaccgtgcccgaccgaagctttttactttagcctttgttccttcctttttatttcaactagaatttctggtgggttgtgggtagggtatggtgtgtctgtgtttttcaaattggtataaaaggccatcctgctacaagtcctactttcctatctggcatttatttctctagcaaactttttaaaaagtgaacttatgttttgagtctgaactgtatttcaatattttctagccttacgagttacattattccaatgatacccaacagtttatttttattttttttttgaggcggagtttcgctcttgttgcccaggctggagtgyrgtggtgcgatctcggctcactgcaacctccacctcctgggttcaagccattctcctgcctcagcctcccgagtagttgggattacaggcacccgccaccacacctgaataatttttttttttttgagacacagtcttgctctgtcgcccaggctggagtgcagtggtgcaatctcggctcactgcaagctccgcctcctgggttcacgccattctcttgacttagtctcccgagtagctgggacaacaggcgcctgtcaccacgcccggctaattttttgtgtttttggtagagacagggtttcaccatgttagccaggatggtctcgatctcctgacctcgtgatctgcctgccttagcctcccaaagtgctgggattacaggcgtgagccaccgcgcccggccatttttttgtatttttttttttagcacagacagggtttcatcatattggccaggctggtcttgaactcccgacctcaggtgatccacccgcctcggcctcccaaagtgctgagatgacaggcgtgagtcaccgtgcctggcctattattttttaaatagaatttcatagttctgtaatgtaggcatttatttccattatgatttacatgtaatgtagggatatatttgggagtgacagcaagcatttttccatctgcgtgcaactggctctgattattggtcacctctcctaccctttcccaggtcgtttaaattggtcatggtaggttttttgttttttggtttttttttcattgatttgaaaaggttttagattgttactaagtatgaagtgtaaatctgggaaagagccttgatttacactttagtatgagatagaaggccaccttgttaaaaatttttaaatttccaaaataatccatattaaattagggtttgctgatcagtactttgtctttagctacctttttatatttaaaaaattaaatatcaattatgtttttataagcttaaaaaattaaagaaccttcaaagaaaaaaaaagacagcaagggcattggaattaatgttttaaacaatcaaaatgcttagttataaatcccagcacttyaggaatagggggattgcttgaggtctagagtttgagaccagtctggacaacatagtgagaccccatttctacaaaaaatttaaaaatcaagttgartgtgatactgcatgcctgtagtgttagcttcttgggaggctgaggtgggaggatcatacgtgagtctaggagttcagggctgtagtaagctatgatcaygccactgcattccagccagggtgacagaggaagatcctgtctcttaaaacaaaaaacaaaaaaaaaacccttaggtataaatataagcttataagttttattatgtagtaatcctgcctatgaatacaaacaaaacaaatagattattgtgttttaatacataaagatgaaaattttcataaaaaattacattttgaataatatgtaaatgtttacctgtgtttctcccccctcttccctttagggccattttgagtgccagatctagttattttgctgcaatgctgagtggctgttgggctgaaagctcccaagagtacgttactcttcaagggtaagcatatttttacagggccatttgactgcaaatgattgtaaattgtatttcatacaaagcactttttatgaatctgatttccctggatgttcaaggaaatatttctcatgtagaattcaacaaagtacattttctgaaacgggaagtaatagagagcatttattaatagaggtattgtgttaatctgcttatgcttctgtaacagaatatccaaactgggtgatttaaacaacaggtatttattttctcacggttctggaaactggaagttcaagataaacatgccagcagttttggtgtctgatgagggctctgcccctgggttgcattctgccgccttcttgctgtacactcatgtggcctttccttggtgcgtgcacttggagagagagttttatggtatttcttcttataaggaaacgaatcctatcagatcaaggacccatgtgacctcatttaaccttaattactttctcagaggccccatctctaaatatgaccacactgggggttagggctttaccatatgaatttggagggaacacagacatttcagttcataacaggtagtttttaaatttttcttttatttttatttttttgagatgggatcttgctgtgttgcccaggctggagtgcagtgacacaatcatggctcaggagtttgaggctgcagtgggccatgattataccactacattccagcctgggtaacagagccaaaccctgtctcaaaaaaaaawatatatatatatatttacacacacacacacacacacacacacamatatacgcacacacacatatatatacacacagtatatattttatataacttaaagtatctccagttatctcaaaaggatcttaattgtttaaactgttaatatgcaaagcaaatatttacattcaatttcttttttttgtttgttttttgagatggagtctcattcggtcacccaggctggagtcaagtggtgggatctcagctcactgcaacctccagctgcctcccaggttcaagtgattttcctgcctcagcctcctgagtagctgggattacaggcatgcgccaccacgcctggctaatttttgtatttttagtagaaatggggttttgccatgttggccaggctggccttgaactcctgacctcaagtaattcaccttgccttggcatcccaaagtgttgggattacaggcgtgagctactgcgcttggcctacgttcaagtttttaaatactaatataacacttttaggaagggatattacaaaatcaaattaatagcagttcataaataaagaggtagaaatcactgaccttgccagaaggactatgctggagacatttccaaagaaggttttcctctttgagagaggagatcttcagaaatatacatttagagactagatatacaaattggctgttcaatggtctttattaagtgtataaagagaaattaaactcttcaacctaactgagaaataagtgtgcttagaaacgtccaaaacacaaaacatgaaaatacatggcgtgggcaatacatagcaaagatatgtaacaacaagagaagtgagttgttttcactacttgtatctaccttttatttgttttcatttattattctatatatgtgcttttaaaaaatacattatgtagggcgggcacggtggctcccacctgtaatcccagcatttcaggaggccagggcgagtggatcaccagaggtcaggagttcaggaccagcctgaccaacatggtgaaaccacgtctctactaaaaatacaaaaattagctgggcatgatggcacgtgcctgtaatcccagctactcaggaggctgaggcaggagaatcgcttgaactggggaggcagaggttgcagtgagctgagatcgtgccactgcactccagcctgggcgacagagcgagactctgtctcaaaaaaaaaaaaaaaaccacacacattatgtaatgatgatctaattaaattctctctttttatgtgaggtcaacatagggcctcaagtgatcctcctgcctcagcctcccaagtagctgggactatagatgtgtactcccacaccttgctagtttttataatttttagtagaggtgaggtctcatcgtgttgcccaggccagtctcaaactcttgatctcaagtgatcctcccaccttggcctcccaaagtactgggattatagatgttagccaccgsacccagcttaaatcacatttgtcaaatcataattcagagttcattctaccacagtcattgaagaaatttaaaagttttccgattggtatgtgttcttgagctagctcagactgctcttcttctccactgtgtaaatctttgtcccacagaaccctaaagttcctagtaggcacattaggagaaacacatggcataggattgggatcttaggggaaggccatttggaaagggatgcctcttcaacttctatctgttttatatagttcaaggtgacctctgagtttagctatatgaataaaggcaagggggtgtccttttttttttttcagtcttccttaatcacccctcatgagctgatgagattaaacattcaaacactcaggcttttaaagatgaggtctatttattaatagaccagtgggcagaggtcagtgggcaagaaagaaatagtgacatcaattactcgtctctactctttcacctgtaattttctgtctttaatttataatggaagtaatggataaataaccccttttgcagtgtggctagactcctgttgaccaactttagtagcttgttcaagggaaagccaaatagaagtagcccagttagtttcaaaatgtcatctgaataagtagaccatacactgtattagtgccaggcatgaccaggctcacccctcttacagtattttcccttmacttttactgtaagcaaggctttgcttctcactggttcattttacctagagctgctttattaacagtggaggctcacctctaattggcttattgactcctaatgttaatgcattgaaaatgaagatacttttgttgttgttgttcaaatgctttatcttgcttgataaagcaaggttctgtaacactaaaagaagaatcacctggtggatgcatggtttcatctataccctttattattattatcacacagtgctatgatatattttgcctttccctgttgtatcatgtatcaaaytgattgtctcaaattattagcattgtggcatataaagctgttggaaggctaaaggggattaaggaattttactttaaaaaattacatcttttaggaatttgtatattgaaacaatacacaaaacaaattccagtttcccattaacttacaytgtaaacctgggcagatgtttccatgagaagtgtggtgtcatagaaggatcataaaccttggtgtccttacaggcagtagtatatccagtcctaacttgttwtatgactttggggacattccttaactttcctgagcttyctgaggtggttgaaagtattaaatgagatacagtaaggaaagaaactggcatagtatgtagtgctcattaatattgactgttctttctttctctaaattagattgttgtcattttctagagagaaaagggttcaagtgagggcctttcccaataccaggacagcaatgcttactttgcataaccagcagcttcttttggaactgtgccactgttgcatgtctgcaggatgttttccatcaatagattcgaagacaatcctgtctgtccttacagaaggaaccaccatatttttagtgagttagtaattcaccagatactgagaacataatgcacatagtatttttcaagaggaactgccttcaataatttgagtgtggggacagcagaattctataatctggccgggcacagtggctcacgcctgtaatcccagcactttgggaggctgaggcgggcggatcacaaggtcaggagatckagaccatcctggctaacacggtgaaaccccatctctactaaaaatacaaaaaattagccgggcgtggtggcgggcgcctgtagtcccaggtacttgggaggctgaggcagcagaatggcgtgaacccaggaggcggagcttgcagcgagccgagatcgtgccactgcactccatcctgggtgacagagtgagactctgtctcaaaaaaaaaaaaagaattctatgatcctagttccatccatgccccagagttggggagtggaaggatatagttggaaggaaattttcctgctctagcagacagaaagggaaaattttccacatactataatgtaaattgaaccacagccaacacttctgtgaaggawytccacttgtttcattttattaattaaaagtcttccagtggtgcctgggctttggagcataratttggattttcctatctcccttgagagattcctgggattgccctggccttcaatataagttttgaaatataaatgagatgtattttctgtcctgactaaaatccttcagtgtcttctcattataattataattaaacccaaactcttgaccatgacctgcaagaccctccatgatctggcccctggcctcactctagttttgtaccattcttacctgcatttgtggatctttcctccaataagttcattcctgcatcagggcctttgtttttttggcttcctctgcctaagagtttttcacctagtattttgcatggctggcttcttctcatgcrtgaaatctcagatcaagcatcaccttcccagactgtcacctaatatagctacagaccaactcctcagttactctctcttatataatcctattstgttgtcttcatggcactttgactatcaaaattatctttttaatattgcccatgtccttccactagaatgttaaacttcttrtatctacaaagtttagaatgagcctgtcattcaaaaatattaattatgaatgaacaaagaatgagtgaatgaatggagtctctgtgtccccttagcccacacacagggctccacataggagcctgaaactttagaaaggacacaatgaagcagagattttattttatttaattaattaattaattaatttttttttttttttagacagaattttactcttgttgcccaggctggagtgcagtggcgtgatctcggctcactgcaacctccacctcccgggttcaagcgattctcctgcctcagcctcctgagtagctgggattacaggcatgtgccaccatgcctggctaattttatatttttagtagagacggggtttctccatgttgatcaggctggtctcgacctcctgacctcaggtgatccacctcagccttccaaagtgctgggattataggcgtgagccactgtgcccggccttattttatttatttttttgagacagtcttgctctgtcgcctgggctggagtgcagttgcgcgaacttggctcactgcaatctccacttcccaggttcaagcagttcccctgcctcagcctcctgagtagctgggattacaggcgtgtgccacctcacccagataattttttatttttagtagagacaggttttcaccatgttggccaggctggtaacacagagattttagtaatctacgttcatgtttagtctctgatcttagatctttgtcctaaaatcggtttttcttttttctgaatacatgtaatgttttcatctcctgtaagcttttattctgattacattttaatgggaatagtgctttaaatctttccatttaaactatgggctattggaacaatttattgcttttctaggtcagttgatcatgtcttataaacacttttagtaaaaaatacaatacaaatgacttaaaatataatgagaatgcagcttagtaaaacatctctcaagacagcaggaaaactatttcttaccctttttatagtatcatatatattgatatataggttcaaatgtctagattttgctgtttattttaatatgacttatttttatttagtcattatsttttgcttaacatatcaagtattttttaagaaactattatttcaacataaatagccaattcttattaatgttgataagaatcgttctggaaattctgaggaaaagtatagagagtattacacattcaagtaattatgctagggttttagcaaactacagataatatgcttaattattctgagattaaatcttgtcatatctgtagtacataaatgagaacatttagatatttgactttatttcctaagtattaaagatgcagaattttgaatcagcagaaactagtacttagccatggtagggatcagtaaatatttatttaattaatggaaaagtgtttctgtattttcaatttagtctccctctgaaggtttgagaagatgctgtaagtgccctaataagccatttgttaaacatttatcaaacatttattgaacatatattatttaaggccatagaatcaaagcaaacacctttctgattccttctgattcctgctttctgggactccacttattttcttcttttttttttttttctttttatgaacctgccattgagaacatagccatttgttttcttcttgccttcctcattttgtttctttagcagatattaggtactatgcttaacaaactgtagggatcttgccagcactgtccagatcatgattctactgcagaggcccagtattacgtggggaaaggaaattcttctgatcctgggggtattgaatcattgctgacattctgctgttatcagagatacaaggataaatggcacgaccctgcccttgcagaacacagttcagaaggaaagacagatgtgttaacaaaaatactgcaaatcagtttgataaatgtgataatggaagtgtgtgtagtatactgcttcagagcccaggctttggattcagtctgcctggatttaaattccagtgcattttgatcttgggcaatttacttaatttcagtttcttcatgtataaaatgagactaatagtggtatctgctgtagagttggtatggtgattaaatgagccaatagcattcagaatacttattagctcagggactggctcataagtgctcaataggtgataattgttgtttttaacattcagtaattttttttcaccttgggtacattaggaaacaatcagggataaaaagccacatgtcttgtgtctgaaagataaaataagtggagaggggaaagcattttaagcacagtgaacggtatgtgctaagacatggatgtataaggaagtgtaagtagctcaggtatagaaaatgagtaagtttagttatcttggaacagctgctagagagggagaactggaggtcagatgataaaggaatttggactttcttttatgggctttggagaataattaagagttttattagagtttaaaatagaataattgaagagtttaagcaggatactatatcgtatattcattttagcaaagtcaccctaatagtaatttgggaaatgggatgcaagtggaagattccaggccagaaacctgtatgagaggatacggtcatagtacagatgggagaaaataagaggctgaaccagggcaatgaaagaggaaatagagagcagaggctgaactcaagaaattctggaaggtacaaatgattgacaggacatagtgagggagaggactaagatgaacctcaggttctgacttaggcatatagatgaataatgtctgttggagtcttcaagggggcccaataaatagcatacttccttcctgttcagaataagacaaaataatcagtaagtgaagtaagaaaatatttcctttattacagataaaaactgttaaagcagtacagattgagtatcccttatctgaaatgcttgggatcagagtgtttcagattttttcagatcttagaatctttgcatatgtagtaatgagaaatcttgggacttggggatggggatgatgcctaagtctaaacacaaaatttatttatgtttcgtrtacacygtcaaattcaaaataaaatatagagacaaatctctaaattaaatgttttatttgagaatcatagaattacaattcagagcctacacacagactgttgtgatcttccatatgtctgaagagcaatgagaggttgggggttttacttgagaaacatgtattgtttggaaaggaagctcattggcactagagaagcttttgggagctgcaaactctgatttgagtgaaggcggtaggtaagactagtcaaggcaggttgtttcagcagctactaggtaaaacagttcttagggttacagcaggctgtttctgcagctggcgatgtggaaaattcaattcttgaagcagatgctatgtgccccaagtgcttttgccccccacaacttgactctgatttagttgggtatgaaaagaatgatccaatttktataatcaacttacacaacaccttatagcctgaaggcaattttataaagtattttaaatagttttgtgaatgaaacaaattttgtgtatattgaaccatcggaaagcaaaggtgtcactatctctcataaaatgctaaaattttgtagcattttagatttccgattttcagattagcaatgctcaacctgtagaatgtgctctaatgcaagagccaaagttggcttgcttactgtatccctctaaaacagctcacctgagagaaagtttgaatctgcatggcagatatacttcttctccatcayctcttcccactggttcagcagagaagaaaggagaacatatatcagattacctcttatctggagttcctcccaactgataaccagttgttgtccaccaaccacatgattcactccctttagtatagaggaatagaggctggggtaagatgcaagacgctatgtagcagtgctctcaacaagatgggaataacagaaagaggactaaktttggtgtggggagtaagaagaaggtcatgaatttagagtttgagatatggcactcaattggatataaaggttatcattccaaactacctcttaagtcatgccttttctttttcatttgtgtaatgagtacgttggccaatcttagagccactgacaggtgttacaaattaagaaatctgtgcagcataacaagaatcttcctagtgaatagatttgtacatttgagtctttaagcaagaccagagggcgtttgttgaaaatgctgagaagaggatttcttaatgagccagaggttagacagtgagtagaagtgttttctaactttaaaagtgtatggtagaagacgctcaataaataatgatttgataacatactaataaccttgtataacttatataaaaatccattgttgtagttctgtttaaattaatggtatacctgcatggatgttatttgaagagtatattcttcaggtaaaaggaagattagaacatcatcttggctcgaagtttatgggaaaatagaatgaatcattgatatcagttaaaccttaattctggatttgagttttcttttatttttcagtataagccatgtagaactgaatgttatgatgcattttatatatggaggaactctggacattccagacaaaactaatgttgggtatgtattcctttttaataatttaaaatataaaagagttaggttctgctttgttgagctgtgttgcaaagtgttaatgaagtagaaactttgctttttatagtctattatactatatcttcagtaggttttgagaacatctaaaaacaataagcaaatcatcttatttagaagaaaaggtgacttatcaactcacagtaataagattgagaacagtctttattagacaaatttagaagaagctataaattatggtttatagatcaataaattgattaaacttttatcaaactttaaaaattactactttttaaattttaggatatcttttctaaacagcaaaagaaaagaaaaaacatakttaagaatataggggctgggtgcggtggctctcgcctgtaatcccagcactttgtgaggctgaggcggacggatcacaagatcaagagatcgagaccatcctggctaacatggtgaaacctcgtctctactaaaaatmcaaaaaaaaaaaaaaaaaagctgggcatggtggtgtgcacctgtagtcccagctactcgggaggttgaggcaggagaatcgcttgaacctgggaggtgaaggttgcagtgagccaagatcatgccactgcactccagcctggtgatagagcgagactctgtctcaaaaaaaaaaaaaaaagaatatagggcatttgccaggcgcgatggctcacacctgtaatcccagcacttagggaggcagaggcgggaggatagcttgagcccagtagatcgagatctgcctgggactgtagcgagacccggttcttgggggaaaaaaaaaaccaaaaagaatatagggcatcctaaagaccaacaactgtgatttttaaatgcgctatagtgaaataccatctaagcctctgaaatcctacttgggagtgaaatttcaccttgctcttttaattttctagatgtcttccattttcttgctattctaacatcagacaaatgaaagctacttttttaattttaaaaattacttggttcctttaattttaaactgaataaacatgtttttcaggagaacataccatgagtcccaggatttactactaaggttttgtcccctggcaacctatacaaaattttgtcattctttcaaagcttgtaggcttcttaagtacctaaagtatgtgtaggtgttcagaaatacttgccaaatgaaagaagcaaaagaaactctggtcattggatgctatctccaatcttagggttatttgtagacattttcaatatgatcagacattagtgaattgcctccccgcccctgccaagaaacttttattatacaaatttgttgcagagagttttgtaacttttacagcctttaaagcaatttcttggattttgttctgtatgtcacttagtatatgaagggaatttgagacatctccaaatttatttcttgttctctactaatcaaatcatgtgtcagtgctttcaacttttggcctatgccctgtttataatccataaagggtgtatgttatgtaaggcagaaaattagaattaaaatatttcagattattcttttttaaaaacagactatrtattatcaataaattagtatgtgttgtgccttgatttttaaattggagaattaacagtgcatctatttttattttagtcagatactcaatatggctgatatgtatggactagaaggattaaaagaagtagcaatctatattttaagaagagattactgtaatttctttcagaaggtaattattgagcctcagaaatcttttatccagtgcattgtcacccattattacctgctagatttttaactctgatagtaatagtgctttaaatatttaaaatattaagtaaatttaactaatgagaactccagttgagaaataattcatatgatctgcttgtaaaaatcagaaactaattcaaataattttaagtaaaacaaaattgatgggagggtaggtattgagtaggagtatcctgtataattcaaaggtgctcagagtttggaactaggagaaaggaagttaagaactaaggttactttccccatttatcaaagggctacacagtgctttatttgttcttattcctgaaagtgtaatccttctttctaccacttctctttatagcagggacttggggtggaatgtagttctcttatgccagtctcttcaggtgacctatggatactaactaattttaattttagttactgcaaaggtaagttaaacatctaaagaaagatctcatactatgcattttgaagccattcatacattattcttagattacccatggttttaatacattctgcgactgtaggttatttttattttcttatttatgcttttctatgtttttaaaattttctacaaagaatgtgtattacttttataatcaataaaaacaaatctaactttttacatcatatttctctcttactggtgtttgaagcaataatatgcattgtatgaattctaattaggtggttttaataacgcttaaatttagatttttgttttgggtaggtctttttctacctccctacaagttgtagctgcagaagcagcccatgtgctaaacgaaagccataaacaactgggtctagtaccacgaacactaccaaccccataaggtttactgagaaatagttaacccctcggcttcctttaacgaaccattcacttcagcctctgtaaataagggccttggaagaaggagggcagctggtggtgtcctcagctttgtagaaagtgaggaattctggtcaaaggttcttccttcttcatatgtctccctcatatttccagccaagtgaaagttagggggatccaagtaaatcacaaagattaaagctagagaatatctgcaatgaggagatgatgtcttctcatcccctagatgaacattaactatatctgtaaaaccatcccaccctggagcttctatcagagacgaagagaaagtgataagaaatttcttaggagagcttggagtatrtctgagaagccagtgagaatatacttgagtgaggagatttctaaagagagaaggcttgctggagaagccaaaaccagccttggtgtaaggaactacagttattgtcatacagagaaaagaagtatgaggagtccactctgcaccccggttacacatggtccacagcgaaggaggaggaccttaatggtttcatgaaagttagaggagactgatacagggctagatgacaccrtgtcccacttggggaggtattgtgcatcgtgagccacttgaagagttcttatctacagagagrccaggttgaagcttgatctgccactaaaggagccattacatcaataaaggcctccagtatctgaattagaacaaagctaaggacatctccctactaccatcttggtctctgcttaattaagtaaggtgaccagagccatttatagtcttccatatgaatttgacccagaaaatggaggagcaggagatcagaccatgctctactctctatttcacatctcaaccataaatctagtcagcaatggggagggaaagatttaaatcagatacaatgaaaagataggtgttaaaatagtactgtgctgaatttcaataacaatagtatccagaaagtactagaatctgcctatagtttcattaagggatgggaaaaaggggagatttgacatagtgtggttgaaagcattcgttsggaaaataaaaagtctcatgttagtgtcttctctgagctgagattcttcagtaagccagttaaagcttatttaagagccttaaaagctgtaaaaatagtcttttatgagtagtcttkggaccattgcctctattttttttttaatatgtggatgagtatatgtgggttttatgcagcttcttgtattttattttcaataattcactttattttaaaaacacaaaagacattttttatattattaataaaaacagaaaatgaagtttatttttaattatcagtacggtattttgttgaaaactttttttgcttttatttatttatttacgtatgtatttatttatttattgagacagagttttgctcttgttgcctaggctggagtgcagtggtacgatctctgctcactgcaacctctgcctcccaggttcaagcgattttcttgcctcagcttcctgagtagctgggagtacaggagcgtgccaccatgcccagctaattttttgtatttttagtagagacggggtttcaccatgttggtcaggctggtcttgaactcctgacctcaggtgatccacccaccttgccctcccaaagtgctgggattacaggcatgagccactgtgcctagccacttattttaatattgtctattttgctgtggtaacagatatttgagagaacaatttctggttttgttgacctaatccttaaaatttttgctttatatttcttaatgtatatttttataaatatacttttgaatatatataattttgaacttttagttctttttttttttttttttttttgagttggaggctccctctgtcacccgggctagagtgcaagtggtgcgatctcagctcactgtaacctctgcctcccaggttcaagcgattctcctgcctcagcctccccagtagctgggactacagacgcgtgccaccatgcctggctaatttttgtatttttagtagagacggggttttatcatgttggtcaggctggtctctaactcctgacctcaggtgatgcacccgccttggcctcccaaagtgctgagattacaggagtgagccactgtgcccagccttagttcttaattatgcaattttttggctgtgacttaaatatcataaacttataataatgttatacagtaatacaaatatgggtataatgtgatgggcagtcggccccagaactcctagcaagctaacttcaataatttcattagcttcacaatcctgccttttacacaattaaacattttggacttcatttataggattttggtaggctttacattttttttttttgtcaccaattaaaagtatactttaggcctggtgtggaggctcatgtctgtaatcccagcactttgggaggccaaggtaggaggattgcttgagcccaagagtttataactggcatgggtaacagagggagatcctgtctctacaaaaaatttaaaaaaaattagccaggcatagtgggatgtgcctgtggtcccagctactcaggaggctgaggtgggaggatcacttgagcccaggaatttgaggctgcagcgagccatggtcacaccactgcattccagcctgggtgacagagccaaaaaaaaaactacacacacacacacacacacacacacacacacgtatacacacacgtatatattttatataacttaaagtatctccagttatctcaaagggatcttaattgtttaagttgttaatatgcaaagcaaaatatttacattcaatttcttttttgttgttgtttttttgagatgagtctcactcattcagtcacccaggctggagtcaagtggcgggatctcagctcactgcaacctccagctgcctcccaggttcaagtgattttcctgcctcagcctcctgagtagctgggattacaggcatgtgccaccaygcctggctaatttttgtatttttagtagaaatggggttttgccatgttggccaggctggccttgaactcttgacctcatgtaatccaccttgcctcgacatcccaaagtgttgggattacaggtatgagccactgcacctggcctacattcaatttttttaatactaatataacacttttaggagaggggtattagaaaatcaaatcaatagcaattcataaataaagagttggaaatcactgaccttaccagaaggactatgctggagacatttccaaagaaggttttgctcttctctgagagaggagatcttcagaaatacacatttagagactagatatacaaattggctgtttgatggtctttatttaaagtgtataaagagaaattaaactcttcaacctaattgagaaataaatgtgcttagaaacgtccaaaacatgaaaatacatggcatgggcaatacatagcaaggatatgtaacaagagaagtgagttgttttcactacttgtatctaccttttatttgttttcatttattatttctgtgtatgtgcttttaaaaaataccttacgtaggccgggtgtggtggctcacgcctgtaatcccagcactttgggaggccaaggcgggtggatcacgagaccaggagttcaagaccagcctgaccaacatggtgaaaccccatctctactaaaaatacaaaaagttagccaggcgtggtggcaggcgcctgtaatcccagctactcaggaggctgaggcaggagagtcgcttgaacccaggaggcggagattgcagtgagctgagatcgcaccactgcactccagcctgggtgacagagtgaraatctgtctcaaaaaaaaaaaaatacatcatgtaattatgatctaattaaattcttcttatctgagatcaatatagggcctctcattgcacaattactttaatttatatttatacgttaggaagcagattagaccatgttgtattgcaatgtgatgtgctagaaattattatactacttttgctttaaaaaagatatttaacctaaaataaattagaataaaaatcgtgtgcattcttgacagccaaaagagttcaaatgatatgccataaaattaaaagttgttagtgacacttggttttaaaagaataacagactttaaaaaaaaacaaaacttagagcatttttagtttcacagcaaaattgagaggaaggtacagagatatcctacatacccactttcttccacacatgcatagcttcccccattatcaacgtcccacactggagtggtacctttgttacaaccaatgagcatacarttacacattatcatccaaaattcatggtttacaatagagtttgctgttggtgttgtacattttatgggtttatacacatgtataatgacatgtatctaccattatagtatcatacggagtgttttcagtgccataaaatcctctatgctctgactgctcatctttccctccccattaacccccagcaaccactgacctttttactgtctctgtagttttgtttttttccgggrtgtaatatagttgcaatcatacagtatatagccttttcagattggcttcttccacttagtgatatgcatttaagatccccccatgtcttttcatggcttgatagcacatttctttttagagctgaatatttcattgcacggatgtactacagtttatttatccattcatctagtaaaggacaacatggttgcttccaagtttgggcagttatgaagaaagctgctaaaaacgttcatgtttaggtttttgtgtagaaaggtgtttttaaggaaaaaaattaagagtctgactagagcatgtttgtagcctcagtaccagcagaagttaattccagataaagagttaaatatagaaaataaattttgaatttatcaaattttgagttgtatgtgttctgcagtttaggtatataaattggattatctttatgaaccaaatatttttaggctttgtaaattgaaaaggaataaatatggtgttttccatcaattttagcctgttcccagaacattgacgtctatactagaatgcctgattattgctcattcagttggagtggaaagtctttttgctgactgcatgaagtaagttatgttaagtagtgctgatactattaatttagggattttgtttttctgttcttctaattttgtggggaactttagagttggcctgttttcttggacacaatgtaagtaagtagcttagtgctaaactagtttcaccactaagtagaatattaatttagatattactcaagttacttgggatcattttatcttagctgaaccatggttaattatgttaaaatctgtgcacatggatttaaaatacatgtttacaggaaagagaatataaagtccattttagggttcataaaattaatagtattagtcaggtcatatatatgtacagttatgtaattgaaaaccaaaatattgactattataatgaaaaacatcttaatttctttaacgtggtattcttttattttaacaggtggattgtaaagcattttgcaaggttttggtctgagagaagctttgcaaatatacctcctgagattcagaaaagttgtcttaatatgttgattcagtccttagtaagtataacctgaatactcttttgtgtgtttgccattaaaaagtttattcaattttgtatagtactttcagtggttgaaatataaatgtaaaatattgtaaaagcaagaggcgtgaaccaattcagataacctaatcctaagattcagttcctttgaaaccactctgcatacccagctcatcagtcagggttgaaacagagaagcagaaccactaggatgtgtatattgattcatgaacaaagcagacatggtgccacagagaaaggcttatgcgttggctcagcagtattgacccactcacccaggtggatctgggtacaacactgaacttctcaatggtaccattcttcaagggaatcagccatctacctggtggcaggttgattacattggatcacttccatcctgtaaaaggccgtgctttgttctcactgaaaaaaacatttgctctggatagtgatttgcctcccttgctcataatgtttctgccgaaaccaccatccatgaacttacagaatgccttatccattatcatgatattccacacagcatcacttctgaataaggtactcacttaccagctaataaagtatagaaattgggccttgctcatggaattcactggtcttagaaagattccaatcatcctgaagcagctggcttgatagtattgaggaaaggcctttgaagactcagttacagtgccaactaggtggcagtgccctgtggggctgggggcagtatcctccaggatgcaatacatgctgtaaatcagattttgatttatgctatttctcctctagccaggatttatgggcctaaaaaccaaagtttggaaataggtgtggcaccacacacaattactcctagtgattcagtagcaaaatttttgcttcctttcctcacaactttaggctctgctgatttataagtcttaatccccaaaagaagaatgtttccatgtggggacacaagtattgattctgttgaactggaagttgagactgccttcctgtagccactgtaaacccactggcaaagaaggggaattattgatagattgagcctatcaagaggaaattgagttgctactatacaatgtggataatgtagagaccatctggaatgcagtactcccaggctctatgagtaaaatcaatagaaagctataagaacccaatttgggcagtgctgatgatttttcaggaataaagtttgggctacccttccagataagaaactatgaacagtgaaatacttgctgagggcaaagggaatatggagtggttagtagaaaaaggtatgtaaaaataacagctacagctacatgaggagttatagaagtgaacactgcagtagttctgatataaacgttcatattccttcttaatatgtttgtctatatattaatcaaatatttttgttttcctcctactgtctcattccccgtcatctaatataagacatgttaataatagttaactttgtatctacgtatttaaggtacagatatcaaagaaaactgaatcagattgaagaatgaacatctcctaaaaacaaaaaaaggaactcatatcccctcttttagaaggaaagggttagcatatttgttgtgtggagggatagttgtatcatgttagatggaagcatgactgttactttctccatttgggaactaagtatggttttaagagatgtatatagttgccaggttgacaagatgttgactctgtaacatgtcagtttgactagggtcaactacacttcgcagaatttccttcttgtatgtttctagttagagtggccaaaagagacaattttgtgtgaaatttggaggatgggagtgaaacagcagctatttttggcttttacactaggaaggctggaacactactgcaatgttcatttacactaggaaagttatttactggctcactgcagccagatctgtaactgttcttccttgccctgtatcctccttcagcttctcttactccgggccaggtatatgtctagctccacaatgaaaggcaccagcatctcctgcaggatacccatagcgtccagactggaggcagtaagactgacatgagcccatccttgtcaattccagctgattctcttggtgtcagtttgttctcactctccccaacattacgtccatctttcctcttctcatctgcctgccctgtggaattcaaactacaccatcagatacaaaggctgtttaagcagcccctacagttgtgtaaggtcaactccctgtaacaaatttctttatacaataagtctgcaccgatgtcattgatgggtccttggaatcttagaatcttggaatctaatttgacgttaagcaaaacaatgtatagcaaaactaattttactataractaatggatatgaacaagagttaagttcctatggcatatttctggtcacaaaaagatcatcagccttctagtagagacccaagacacttcttatattgaatattgaaataattgtgagctatacatacatttcagaaatattaataaaaacaagataagtacccagtttttggtgaatctgtgagtggcagtaatagcaatggtgggttaaatcaaggaataaatgtttgcaaagcaaaaattgtaaaaagcacctcctgccacatgcagttccaaagcaatcacaaatgtggcaggttcatggaatgtttttatactgcatcgcttattgtcatatatttgtatggtcaccatatactttatgaatttttactttacaataatttctgtattcattcattttccaacatgctttttctggtttcagttgtgggtggctggagcctgtctgcagctaaggacccaaggttggaaccaaccctggacaggataccattccagcgcagggtgcactcacagcacagaacactcacttrtactgggacattgtagagatgccagttcactaaatgtgcacatcttkgggatgtgggaggaaactggagtgtccagagaaaacccatgcagacatggggaaaacatgcaaactctacacagacaatggcctggccaggaatccttttttcccttatcaacattataataaaacaacggtaatcaaaatgacattattcacgaacctcctatgtatatataaatacctcctagtggtcccatgaaccctgaaggataacatcagactgggttacatagaagatatgtcaaaatctaactgagaaaataagtgtaagatatcagctggtgagataccactacaaaaagtaaatgtaaggctaggcatggtggctcgcgcctgtaatcccagcactttgggaggacgaggtgtgtggatcacctgaggtctggagttcgagaccaccttggtcaacatggtgaaaccccgaatctactaaaaatacaaaaaattagctgggcctggtggtgcatgcctgtaatcccagctactcgggaggctgaggcaggagaatcacttgaacccaggaggcagaggttgcagtaagctgggattgtgccattccacctcagcctaggcaacaagaacgaaactgtctcaaaaaaaaaaaaaaaaaagtaaatgtaaatctgtgttttagctaatgaaggactgtgttgtattgttgcttactgttttacattagtttgttggtcagtgaatagttaacaaattattggcccagctatagttctgttcaatagaagagtcaggttcatttcctaatgtagtagtagtaccagtattttttttaaattattttttttcaatagcttttgggatacatgcagtttttggttacatgggtgagttctttagtggtgaagtctgagattttagtgtacccatcacctgaacaatgtacactgcacccaatatatagtcttctatccttcacacattttccaaccttctcccctccctaaatccccaaagttcattttttcactgtgtatgtttttgcattctcatggcttagctcccacttataagtgaatggaatatatacagtatttggttttccattcctgaattatttagaataatagcctccagctccatccaagttgctgcaaaagacatttcattcctttttatggctcagtagtattacatggtgtatatgtaccacattttctttatccactcagtaccaatatttagtggatttttttagacttatagagctccacaaaatactttttttgtgaaatttagcataagacaggtactgttgtctctacttcacatatgagaaaagagaatcaaagagttaagtgccctgttcaagttcccaagacagtaaaaggcaaaacctagtcttaaaaccaattgctactattctaaatataatatgataagtgctccatgtgagcaaagatttttttttttaatgcgtgggacttgacttcaagaaactcacaaattggtggaaaaataggcatttaaacagctaagtaaaatacaggttagactatgatgagtacaagcattaagttacatgtcaaatctttaccattgtagcctcagccttagaacagtgcctagcacatgttagcactcagtatgtattgtcaaataggtaggtaagtgaattgtataacttagaattcaggtgtatacatagaatcacacaggttaaatctgactggaataataagagaattaatttgaaatgaacctggttagaggacaattttaaaataagtaggttagggcattcctgaaagactaaaaatgtaaccagggatatggagactaggcagtgtcagtattctgctgtaactggaatgagagaagatgagtctggggacaggctaaagatagattgggagggattttagctgagtatcttgttaacgagtttgatttttttttttaagcaagtggtaggtatgtgattttaattgaagaataagcccatcaaactatgcctctcccaatgctatactcttttattttgattttatagctctaattaggtccttgtaagctttgtggtgaatacttgacattttctttcaagacagataaaaagataaacatcagaacagccaaacatccagtctgatcaatagcctctggcatcatggggattagtctcaaaatttgtctttgtggataatcaggttttaagaaacactaatttaacatatttgtcatattttattgtataagtaaaatatgtttagctttattgatggaaaacagagtattttaattttctcaaaattcgaagtatgttacccagaaagagcaagcagtcttttttttagcaataaccccagattggccttttagaaaatcttataataggtacatgcaatattaatagtgtttttttaaatagttcaaaattgttacatttttacacatttgacactaacttaaaaaatgaatttcattttaaaaaaatttcttgtgtgtttgcatatctcacaaagcactacttatgaccatttcttcttaatgtgacttttacctgtgggaagtagtttattttatatatgaattctatctggcaattctagttcattagtattactttctatatattattcatcctttacttattttattttattttggaaagaatatttaacatggtatctatgctcttaacaaatttttaagtgtacaatacagtattgtcaattacaggcacacagttgaacagctgatctctcatctttcgtaactgaaacttaatgcccaatgatagcaactccccattttccccttccccagctcctggcaaccaccattccattctctgattctatgagtttgacttgtaatggaagcatacagtatttgccttttctgtgactggcctatttcacttaggataatgtcctcaacattcatccatgtggtcacatcttacagaatttccttctttttaaagaatgaataatgttctgctatatgtatacaccacattttctttatccatttgtctattggtggacatttaggttgcttccacatgttggctattgtaaatagtgctgcagtgaacatggtagtgctaatatttctttgggatcctgatttcagttcttttgaatgaatgctgatgtgctttggatgtttgtcctctccaagtctcatgttgaaatgtaatctccagtgttggaggtggggcctggtgggagggatttgggtcatgggggcagatcccttatgaatggtttggtgccatccccatggtgatgagtgagttctcactctagtagttcacatgagatctggttgtttgagaaggagcctggaatctccccactctgtctcttgctccctctctcaccatgtgatgtgcctgctcctccgttaccttccactatgattgtaagcttcctgaggccctcaccagaagctgaacagatgtgggtgccatgcttgtacagcctgcaggaccatgagctaataaacctcttttccttataaattacttagcctgcagtagtcctttcatagcagtgcaaacaggttaacacaaatacccagaagtaggtttttggatcatatggtagttctatttttaattttttgaggaacctgcatactgttctacatagcagctgcaccattttgcattcctgccagcagtgtacaagtactacctattctccacatcctcaccaaaacttgttatcttttatttttttgatcatagccatccaaacagatgtgcggtgacatcctattgtggttttaatttgcatttccctgatgattaatgacatagaacatcttttcatatacctgttggccatttgtatgtcatctttggtgaaatgtgtattcaagtcttcagccaatttttaacagtgttatcagatttttgctattaaattgtaggagtttcttatatattttggaattagccccttatgacatgtatggtttgcagtatttttccccattctgtagattttttcaatgtcttgttttctttgctgtatggaggctttttaatttgatgtagtttcactcgtttatgtttgcttttattgcttgtccttttggtatcatatctgtgaaatcattaccaagaccaatgtcatgaagctttcttctaggagttttagagtttcaggtcttaggtagaagtcttaaatccattttgagttgatatttgggtatgttgtacgataagggtgaaattgtattcttttgcttatggatatccagttttcccagcactgtttgttgaagagactttcctgacccattgtgtattcttggcacctttactaaagagcagttttatgtatgtggatgtatttctgggctctctgttctgttccattgatctctatgtctgtctttaggccagtaccacactgttttagttactacagctttgttatatattttgaaatcagaaaatcaaagtcactccaactttttccttcttaagattaatttggctattcagggtattttgtggttccgtatgaattttagaattgtgttttctatttctataaaaaatgcaatcaagattttgatagagattgcattgtatccatagatcactttgtgtagtatggactttttagcaacattaagtcttccaatccatgagtactgcatgtctttctgtttgtcttctttcatttctttttaaaatttctatctgtctagctgtttatttatgagacagggtcttgctctgttgcccaggctggaatgcagtggcatgatcatagctcactgcaactttgaactcctggtctcaagtgatcctcctgcctcagcctcccaagtagctgggattacaggcataagccactgtgcccagctgtgccttctttaatttctttcaatgttttgtagtttttagccaagtctttcaccttcttagataagtttattcttaagtattttactctttggtgctattgtaaatgggattgtttttctaatttccttttcagtcattaatgttgttagttgaaatgcaactgattattgtatgttcattttgtagctttcatctttactgaatttgttttaacagttttttggtgaagtgtttagagtttgctatatataagattatgttatctgcaagcagggacaattttacttcttcctttacagtttggatgccttattatttcttcttcatacctgattgttctggttagggcttccaggactatgttgaatggaagtggagagaatgagcatccttgtcttgttcctgatattaacttaaaagttttcagggtaaaccttgagtatgattctagcagtgggcttgtggcctctattatgttgagataatttacttctattcctaacttgttgagagttttcagtcatgaaaagtaattgaatcttgtcaaatactgtttctgcatttactgagataatcatttgacttctgtctatgctgttaatgatgtgggttgcattaattgatttacatatgttaaatcatccttgtatcctaggaataaataccactagttgatggtgaattatctttataatgtactgttgaattcagtgtgccagtgctttgttgaggattttaacatctatgttcatcagggatattggcctataatttttcttttcttgtggtattcttatgtggctttggtgtcagagtagtgctggccttgtaaaatgagggaaatattccctcctcttcagttttttggaagggtgtgagaaggattggtattaggtctttcctttaactagcagaattcagtaatgaagccatcagtagaattcagtaatgaagctatcagtcctggacttttctttgatgggagactttttattacagctcaatctcctacacattatcagtctgttcagattttctatttcttcatgattcaaccttaataggttgtatgtgtctaggaatttatccatttcttctagtttaccttgtttattggcttgtaattgtttataacagtcccttatgatcattttaatttgtgtcatctattgtaatgcctcctctttcattttggattgtataatatttatttgcatcttctctgctttttttcttagtataaaggattgtcaattttgtttatcttttcaaaaaa

SEQ ID NO: 96376 - DNA, 17504 bp, Homo sapiens
cattcctgtagaggttccccaaatcccacttccttctccttcagtaatccttcatttttcatgaccatgtaagtaggtcctccaggtaagtgtcagtctcctcttgtttgaaggaaaagagctcgttaagatactgctatcaatttcttgggagtcctcttgttctccttattcacagtcattcttccgtgggtaaggtagccctgagagtgtgagtagatgtggggccacaattcctcactgccatagctaatgaccataaaaaccatctcacatatctgatgctttcttttctcaaggtggctgaaagttctaaaccgatggaaaaattattccaagaaaccactttgtctttctattaccatgtccaaacgagactgacaacaatctccaactgttgaaagtcacaggggcagtttgtagtgaaaattgtctccagtgaccttgtaacttacagtagcccctgtgagaaactagggtgcttttcagttatttctccccaaccaaaatatttaagaaacttttgtcaatatgtccttctgtcccacatccctggcttgtcctctgagcagctggacctttgcaataaaacagtttcccaagaattgatggccaaaccttctccaatactgttatccacttaccccaattatctacctaccctgacgaaaaaattcactaaccaagagaatccccaattgcttttggatgattgggaaggcttctaatcatctagaaccctctcttaggtgtcacaagaaatccagctgctcagaaattcccaaacaagcaattcagactctgaagtcacctcctaagctaatagaaacacaggattctggaggtatggatgaagatatggtgctactaatacatttaatgtggctcctggtgctgcctccatggacttgccgttaggcctaagaaacacttcctgtttgaaacagggatgtcagggtgttctgactcagtgtgtcacaccacgtgtccctagagttgacatagctaatcaggcagtcctgtttcttccttattgcccagtgaatgcccctcccaaggctacacaggatagattaagaaccttcccaggtaacaaaggaatgctctttggtaaaggagtaaagggtacaagtagctaaagcacctgtgctagaaactcaatgtgagctcactcctctggggggctgtctacttgaccgagatgttgagtaaggtctccccatagggtaaaagtaactcaaacaagaacatggtgggataaccactctgtcacgaagcacatcttggcatattgcttctttaagaaagactctggctgggtgtggtggctcatgcctgtaatcccagcactttgggaggccgaggcaggcagatcacctgaggtcaaagttcgagaccagactggccaacatggtgaaacccggtctctactaaaatacaaaaattagccaggcgtggtggcaggtgctcagaatcccagctacttgggaggctgaggcaggagaatcgcttgaacctgggaagcagaggttgcagcaagccaaggtcacaccaccgcactctagcctgggcgacagggcaaaattctgtctcaaaaaaaaaaaaagaaaagaaaaaccctgatcccattaacaggattccaaggtaaagtccctcacacagtggccacctgaaacatgaaatgagttcctaaactcacccaattagtttagtgaaatgctaataatagctgttacatttaacacactcatactcccagtaaaagaatgtgtctatcaacagagacagaatctaatattataattctcagttacagacttctgaaaactacattctaagacaagctggcttcacttaagaacactaattgaaagatcagacggaatcacagcataaatgaaaggtgtacagatagacaatctgaaaaagatgaactatccttgttcttagagaactgaggaaaagcttgtgagagagaactggagacatggaaatcttatctaaacctgcccagagtttaaaattattaacacaccaacaactaattaatcttaatgttttgtttttcttagaccaaatgtttaaaagcactcttgcctatcactgaagctgaatccgcccaacacagcagctttatgttaaggttactgtgtgttgtcaaactatattcccagctctatgagcccacagggcaagggaaaggattttcatttgcaaaacgagaagcaaaggatgaatagccttctttggaatttgatgggattaactcctacaatgccgtcctccaggagagatatagaatatttggtccttcccacacactttataagatcatctggttgcttagcatttctacgttgagacttttttttaattataaaacaaataaaaatatacaagtaacttttaaaacaattcccctaattaccagaagaaacattctgcacacattctccccctatttcattgtttataatgcccagaaaggtgaccataaggcttatctctggagtccgctccaactataaatgttaagtaagagtttgacactgtaatattggtctggttcttgccacaggggtgggaactagcaggagctgagatgttcatcatttggtgttcttacatcacaggtgaatggaaaaaggcagacagaagcagctggctttgagctatccatatgggtgtgcaaatctatgtggcactaccagttaatagcaagcaaagaggcacttgagccaagtcaaaaatacactgacctatgtggaagaatgatatagtattcaagttaaatagaacggtgacatcaatcaaaagctataaataaatcattttacacagcaaagttgggatgatctattgtactgagttcacagtgaaatatgcttactcatacagctcagcaagattctgagtccttttaattccatcacgagccttacctgcaagcaggtgaacagagttgaagctcttctccagtttacccagaagtacagtgagaaaacagtctgaagagagagaggcaacatcttgggagctttgatcgtaaactacaaccttctgactgcaatcaatgtcaacctgaaatgcaaacatgaggcttgttaggaagaaggtgagaaaagtaatctcaaactactgcttaagatctcacatttaccagtgctggggcgaataattgcttcctgttttcaattaataatttgaataaaaatgagatgtagtcaatttacgagacagacacatacaaaactcttaaaaaccaaaatgatgctatttctgtgtaggtgatctcacgattccctggttttaaatcctttatactataaaatggtaaagttcataataaaccaaacaatatgcaaaataaacataaccctggacctaaacaaactttttttaaaatgacttttacaccttaacaaagaaatcagttgtttatttaaattaaaacatgagctcatttgtatttgtgaagaaaaaaaccaacttcctcaccacacagacaacattttagtatcccaggaataacttcccttgaagatatcattaagtcttgaccaatgttaccacatgtgttatgacacataaaaagcacccctaataattagttcctactttctttccaaagaacttgaaaagaatgactttcctttcagtaaatttgcagataatatagaatagtgtttaataaaataattttagcaagccacaagaaaatatagcacttgtccaaactaaagcaagttaatccttcatagtttagaaatattattaaatgtggcaatatggacaataaattattttgaggtaccacaaggcaccaaaatttaaaaagcaaccaaaacttcctcaaattactttctctacttaaagaggaggcttcaattaaaattattcctcattcagtgtgtccatttattttgaaaaggcaaaaaggaaagcgtttaccttatgtttcgctgaatgctggatgagctctgtaattaacactttgtcctgttgcaaccttcgcttcataagcttggagcagttgatattaatggcttccaaaatgtgggatgtattgtattccacaaatggccggctatcaattagcagcactttttccgttccactttccagcagagccaccaacctctcagtaacaatttgagttccaatcatctcatgggccatgacaacaataagtcctcttttcccacctccttctttaatttgccacgatgatgtaatggtggtgtgctcaaaggctcagccactccattgtactaaaagtgtatgaggtcaggctggtggtgactggcaaaaggagagttaaacccattttcagcaagagccctccaagtgaatgtctctttctctttcccgttgatgtgctcttgcaaaggactccgtccacaaagcagcccctcacatttgattcataaagagatgactggaataaccattccacaacaaaagatgctttggagcagccagcgcattacatcattctttacctttgctcccgcgctccaacagctttacactggactgaaagcctacgcggagagagaaagacagaaaacaaaacgtgaggtcaaaaaaagaagaaagagtgtcagattagagagagtgtatgattcataatatttactccattaatctaattccatacttgatgcactgcttcatttgaacaaacaaataaaaaggacaaattggtatggcttcagaaaaatgtgctagtgataattccattttacctcaaaatgtaaaaactcaaagaaaacaaaacaagacatatcatgaattataatcacctagggctcagaactaaatgacctgtagtattgaattaaaagggctacaaaaagctgcttgaagtattattattccaaatagttttcctatattttatttgcttatttattgaaatcccacaaagaatggcagctgaggacaaagttagcaatcctgtgttaccaggacaaaaaaaaaaatattttctgaaatggcttgagaattcctgcgatgaatgggtaggtgtatatgtgtgtatgtgtgtgcacatgtgagctcacgcgagtaccagggcgcaaacagcagccttttaaaattgccctcacggaggagagaagatgcaggaaaactggagtttctataaatttcagctatcttttaaggaagaggaaggacaaaaacaactgatatgtttgtcacagcagctgctgagctaggcctgtgaagtgctgaagctcacagccatggccctgtcatgtctccttccggaggccatctccctaccaccaagttgcttaaggccctgtaagcttatccttcactttttcctgcttcattcttcagagaatcactaactcctagtcttaaaaaaatctcaccccttaacctggaactctaagttggcaacccagacatagagagcccttaaagctgaacccagtgcttccctttcttgccaaactcctttaatcaatcactttctaattaacactagttgaagttttgcgcttattgcttggacttcaccttgaccttcaatactctcggattcctatctcccctggtccatctctgcttatatgaaatcctctactacataaaactacatgtctacttctggcactgaacttctagagggtaaattttttttttttttgagacagggtcttgctctgtcacccaggctgcagtgcagtagcacaatctcagctcactgcaacccctgcctctcaggctcaagtgattctcctgcctcagcctcccaagttgctgggactacaggcgcgcaccaccacacccagctaatttttgtactttttgtagagacagggtttcgccatgttgcccaggctggtctcaaactcctgggctcaagcaatccacctgtctcagcctcccaaagtgctgggactacaggtatgagccaccgcacccagcctagagggtaaatatttgattgcaaaagtttattatatttcttacttctacagtactttggacataacatactcaatatattattatagtaggtaaattcttccttgttccaaaaacagtttaagattctaaataaatatttgattagctgatttcaggtcaggatgtcagagcctttaaaaacctttagatcatgtttcctaattttgtacttacaaattagaagctaaagcatggagacagaaggtggagcatgatataaagagatgtagctttgccatttacttatgcaaccttggacaaatcacataacctctctaaaccacagtttcttcacctacaaaatggagacattatagtggcctcatctcttcaaatttggtctgagaacaaaattatctaatttattgaaagctggtaaataaaaaagcaactatgcatcatagacaggaggaaaaataccctacagatgccaatggcaaacaaagctggcttgcatctggcatctgaaagacatcactcacagataaaaacagatgtaattccatcctcctatagtacagctgcaaccaaactgtgccctttctcacagaggctgacacacagggagwtagaagrcacctgagatactgtctcaaccacaccatattttacaaaccagctccatttaatacattatatttccatytcttattttccaagaaacaactttcattaatgtattatttttrgcatagctttatggtaatgaagtacaaaagtcatctctattttcaactgaaggaactatargagagaatttgtcctagtcaatccactaataaacttctgcaaagcgcctaccaaagccataccactcaatcagrttctgcctgctcagtgacagagttcacggcaatgtaaggtcctgtattcagattgtctgattcccaaaccagggyttctactactgggttgccctgttttccctaagtacttgttcccataatggaactggactgggaaagaatgatgccaattgtccatgagggtacccaggtggcacagaaagtggaaatccgagaacaagagcaagttgattccaacaatggcactgggtctctgagtctgattggctcctctcaaagagataaaatccggatgggacaaagcagttatctgggttagcagatcaagggacaaaaggagggagaagtcagcaaacatgcaaaagttgaattagaaagttctcatctttgcttcccctcagccarttctcataaacccaaagacaggttacaacaaacagttctacagagcagagaatgtcattcttgcccagagaatcagagcttagttacagatataaaaagaccctttccctgaccaagaaaggctctggtcaaagtgactctaagctgaggatgtaagtgaagcataggggtaaaagtgaagtgagggtgaagttccattctttcagtgctgtactgaggccagctggagtcctcctggtaggacttcatgcccaaggtctaattctctgtagtgctaaatgggtgaggtgagaggcagagccctgccaagggatcatggagggtaaagtaacaatggccttaatctctttcatttacagttagagaattttggttaaatctccatcactggctatgagtctaattttaaaaatttctctgtagttactgttttgttttcaaaatcctttgcattaggtaagatttgaaagatgacaagagaatattttgcttgcaacatcaccaagctaatcttacccagaatttctataagtcaaggggaataaaaatttttacaatgaaccrcaaaggctcaagtccatagaacaaaatccagagcagaccagctttgctatttatctatttatttagccagctgctaaagttgaaatactttctttaratttttaaataggtaatatattcatatggttcaaaaaaagtctaaaaatgtatacatagtatgaacgtgtacagtttattgtgtcacttatacatcaataaaggtgtttaaaattgccacgatattgaaacttcagcaaatacatttaaataaaaaaaaactaaatatattcataatccttcttctaccattatcctccatctgcctgggtcccaaccctgccctctaactggtaacaacttttagtagtctcatctaatttattccaaagatttttttaaattaatatagaatgaagcacaaatatacacacttttccttctctttgttcaaatggttacaaagtatagacactgtcttgcatcttgctttttctttcacttacagtacttgaatctcatttttttcaacatttaattagaaaatgaatcaatctatatttccatgggccttgcatatatgcatgtctggaaatctaaataaaacatgtagaaattcttttttttttttgagacagagtttcactcttattgcccaggctggagtgcaatggcgcatctcggctcaccgcaacctccacctcccaggttcaagcgattctcctgcctcagcctctccagtagctgggattacaggcatgygccaccacacccggctaattttgtatttctagtagagatggggtttctccatgtcaggctggtctcgaactcccgacctcaggtaatccacctgccttggcctcccaaagtgctgggattacaggtgtgagccactgcatccggcgaaattcttaaacttaaaagataactccagctgggcatagtagctcatgactgtaatccaagcactttggaaggccaaggcaggaggatcacttgagtccaagagttcaagaccagcctgagcaacacagtgagaccctatctctacaaaaaattaaaaatatatgtatacacacacacacacacacacacacacacacaattttcccccctagaattacatactagagtacctaagaagctgacaagtaactcataatagtgtgctcaaaaggttagcaaattaaatgctgggggtcaccacagctggcctgttttatgacatactagttagagagtaccctctataactactctggcttaaaagaaagttaaaatgtgatggtgaacattcatgaagttatggaaattatcttttaaaggataacctaaagtcagcaaggcagtatttatcaaactgaagactggtaaccttaatcagggctactacacaaaaaactgcaaagtatcccaagttcaaaataaaggttttaaaagactatctaggaataaagataaactgagtcaacatcttagtataacaaaatgactacagatcatggaagaaaatcagcaaatctcctaaagarataccatttctggtatatttttacctttcagcaaatgatttatgttttatattttataatatttaacacaagttgtataacaactttccccctttaatatacaattttgtctgtgtttttatatgtaatttatttttatttagattccatttggttacttatggaaatgtatttatgactataacagaaatcactggagttttatttcttgaaattcactctatatccaactctgcacaaatacggtgtatcaatgaagtatgctactgaataagttatgtttaagaactgtaagtctatttttatgttaaagtgaacaggtagggcctgtttcaactaagagaacaacataaagtctgtataaaaccagtatttgccattaattacttaaaaggaaaatgttttgtttcgatttttattacttgtacacttcaaaatttgtgcctagccagagaatcctttttttaagattatttttacgtgattatattaaggatcttcttctgcttcccagatgatttttctcttcaacttcccaaacatgatcctgggttctaggtcagtcatactgacactgactatatcccactcagaaaaaaagtgataatcgctcacacacacaatttttttctttctacccatgggttattttctgctggcagcaatagtttcatctgctactgctactgctgccctaaaacacccactcccaaggcctgcatcaaggcccacagcaggggatggggctccaggaggaagcggggggtcccactcagagaggcacaactccattttaaacattttcttttacaaagagaaattatcagggaaaggaaaaggatcccatagctatggggtgcttaacaggcctgttgagtgaggagagggatttagttttatttggttgggctagagctcaagttcaaattctcagtttatggaaaggatataatcaggtgagaagtttacttttattaaactacaagcctgacttaaattttttccctccaayaaaactgaagaaacaggcaacaagatataccgaaatgcctttcaatagagccctaaacacaggctttcaataacaggaaaaaaaccaatcaaaagggaaaaaaggagactatcatatctgcaagcaaacaagaactccttagactttgactgcctcaatgctacacagattaaagcaactttatctcataagctgtgggttaagataaacttgatagaaattctgagctctggtatttggcaaatatattcaattaaaaaaataaaaacaaacacaaaaaaccaccctcaccaaaatcaagaaagctaagaacttggtgcggcaaaccaccatggcatgtgtatacctatgaaacaaacctgcatgttctgcacatgtaccccagaacttaaaagtataatatatactttataatatgtacttttatttataaaagtataaaacaaagtaaaactacaaacttaatgtgctttttagctgcctattaatgtctgatcatatttccttacccaaaaattgaggacacatattctgacaagtgatggcaataatgagactgcttgaagcaaaactatttagatgatactagacctggagacagcagttatccgcaccgtagaacccagttgcctcgcactgacataccacactgttgaaagccgcccctccaatcagaggttcaggttgtttacatacatctcaaggacccacagataaaggctggaatagcagtcagccttcaaagactacctataatgcctgcgcttttaggcacaggccagcccaggcagaggccaaatctgtgagaagccttcaccaaagtttctgttcagggcaaggagcactcccctcctggtattggctcaatcagagctcttgtctttttcttagtactgcttcctgtttatgatcacctgtttcacccgcttccccttccctgacccacctgagctctcctcctccttccccctcccaaccttcctctttccctctgccacccatgtatgtatcctagacacactcctcctggcccacaggctccttcacctacccctctacrcttaatgcttcctccagacacgctgcctgaaaactcaggaccctacctactgggagaggggccggtgtatggaggtggtcttgggagggtagaaatggaaggatccctggatgaagttactgggcaagaggaaatacggccagggattggcttaatctgagaattgaggagaaaatgttttagaagggtattttcagtaaaggtaggctggaggcaggagaagaaagatttagaacaagccaaacagaggtcagatggggattaattcgtgcatcctggttttcttgaacatctgccaaatcactataattcatcaggcctactgtaactaattcagtcaactaacaagtacttatttggcacctaatatgtgccaggcactgtgaaaatgtagcaataaatgaaaaaagtattcattataatttataagttattaatgtactgcctggttataaattaacaaggcaaaaattactgcctttctggagcttctaatttagtgatgggggacacgatcaacaacaaaaacaaaacatttcctatgatagacgccgataagaactagggagaaaaaatagagcaagagcaaagggtgtgcgggggtggctgttaaattgtaaacagagtagtcacagaaggccttaccttgagaacatgagagaggagagtggtaagagactgagctatgtggatacctggaagattgtagctttctggggccaatgaatatactagccaagataatgctgaattgggcaaataccaataaaagatgtggcaggtgttcatgctttgttcagaactatggttatatctattggaaatgatgcatttccaggaaactgaacttttgtttttgttgttttttgagacagggtcttgctctgtcacccaaggctggaatgcagtgctatgatctcagtttactgcaaccttcaactcctgggctcaagtgatcctcccacttcagtctcccaagtaactgggaccacaggcatgtgccaccacacctggctaatttttatttcttgtagagacggggtctcactgtgttgcttagtctggtctcaaactcctgggctcaaacaattctcatacattggcctccaaaagtgctgggattacaggcgtgagccactgtgcccggccaaactttttaaattaatggataaaactgtatgtatttatcatgtacaacacgatattctgaagtagatatacactgtggaatggttaattctactaacaagtgcattaccacacatagccatcattgttgtgatgagaacacttaacatccactccttgaatttttcaggaatactatatatcctcgttaactgtggtcaccatgctgtacaatagatccttgaacgtatttctcctaaataattatttactttcaccaacatctccccaggcttcccctccccattaaacatcccagcctttggtaaccattctactctctacttccatgagatcaactttttcagctcccatatatgagtgaaattacacagtatttgtcttcctgtgtcttgtttatttcacttaacacaatgtcctccaggttcatccatgttgtagaaaatgacaggatttccttattttttaaggctgaatagaatttcattgtgtacatatataccacgttttctttattcattcatattttgatagacgcttaggttgattccttatcttggctattgtaaatagcactgcaataaacatgggtatgcaaacatctcattttctttactcagtaatgggattgctggattatatggtggttctatttttaattttttttgaggaacctccatagtgttttccataatggctataaatagttcatatttccactaacagtgtataagggttttcctttctccacatccttaccaacactgatcttctgtcttttgaaaacagccatactaccaggagtgggatactatcttactgtggttttaatttgcatttctctgatgatgagtgatgctgagcattttttcatagacctgttggccatttgcatgttttctttgaaaaatgtcaggtctttcacccatttttcaaccaagttacttgctttcttgccattgagttgttggagttcctgatgtttttgaggtattaactatttatcagatgtatagtttacaaatattttctcccattctgtaggttgtctcttcactctgttgactgtttcccttgcagtgcagaagctttttagcttgacataatcccatttgtctatttttgcttttgttgtccatgcttttgaggcaggcaattgaacttttagcttcagtgtgaaaaaacatatatataagaaaatttagtacaatttcttccttaaaactacaaagagagaaactgtggttcctatacagtgcatttcttggcaaagaaatgaaaagaaatcctgtaacaagaaagattactattaatgttaatattatacattttttccaaccccacaagtgtgttgtatctactaagagaatcttagttttacaacatggaatgtagtaaaatatcaaagacacattaagcaagatatatgtgtgaaaaaagtctatacaaggaggtagtttaaaggatctttacattaaaaattttttaaatgctttcaaggttctctccttgtcagaaggatcaaatacttaacacaaggcctttacaagttagattactatattgaaggggttgataacactaaaataagtttataatctttatctattaatatatgcaccccctcctttagtccacaccagccccagaacaacaaaattccaatacatgaaagatatagtatactttgttgacaaagaactaattgactaaaggtattaagaccagagtaaacatctgaacaatttggaacacagtctaaggggagaggggttataatttaatttttccaaacaggactggaaggctctaggagcaagcaatggaatgcaacaccgacaccaaacttctcacccacctgcactcaagctcaagctcacaatagtaatattccataatttaatctattttaaatctcttagtactaaaataaataaaattagaatgctgaactacattctcctgaagataatttcaaaatggctcacagaataaattcaaagtgacttatggctgggcatggtgactcatgcctgtaatcccagcactttttcccagaatttttccaatgccaaaagtgtgttgtatctactaagagaatcttagttttacaatatggaacgtagtaaaatatcaaatacatgttaagcaagacatatgcatgaaaaaagtctacacaacaaggaggtagtttcaagaatctcctttaaactacttttgggaggccgaggtgggtggatcacttgaggtcaggagttcaagaccagtctggccaacagggcgaaaccccgtctctactaaaaatacaaaaattcaccagatgtggtggcatgggcctgtaatcccggctactcgggaggctgaggcaggagaatcgcttgaacttgggaggtggacactgcagtgagccgagatcacaccactgcactccaacctggatgacagcgtgagactcatcttaaaacaaggccgggcgcggtggctcacgcctgtaatcccagcactttgggaggccgaggcgggtggatcatgaggtcaggagatcgagaccatcctggctaacaaggtgaaaccccgtctctactaaaaatacagaaaattagccgggcgcggtggcgggcgcctgtggtcccagctactcgggaggctgaggcaggagaatggcgtgaacccgggaagcggagcttgcagtgagccgagattgcgccactgcagtccgcagtccggcctgggcgacagagcgagactccgtctcaaaaaaaaaacaaaacaaagtgacttacaagaaagtgctttatctttcagttaaaatacacatgaaaaaatactggaaaaggcctacatgtataagaaagggacagactggcttaagtaacttataaattatgataaatcctgcaacatggtatgcaacatttaaaaacgatggtgtaaaaatatacttattgacagccaaggatggtcatgatatattgagaataaagtcaagtctcagaacagctaggtaaaatagaacctcaaacacccacaggcatacaaacacatacgatggatatgtataaaacatagtaatagttttacttaggtaattaaacgtaattgtcatactcttttccataaccttggaaattatgaaaaatattaatataaggtcatgacatacattcagacccaggaactattaccaggtcctactgtactccttcttctcaggaccattataaaagtttgggtgggcaaaggttaagaagatgagaactgggcacagtggctcatgcctgttatcctagcactttgggaggccaaggcgggcagatcacctgaggtcaagaattcgagaactacttggccaacatggtgaaaccccatctctactaaaaatacaaaacttagctgggcgtggtggtgcatgcctgtaatcccagctattcgggaggctgaggcagcagaatcgcttgaacctgggaggcggaggttgcagtgagccgggatcgctccattgcactccagcctgggggacgagagcgaaactctgtctcaaaaaaaaaaaaaaacaaagaagatgaacaaatgtaatgtatggaaattaatgtttaccctcaaggtaaaagctgaaatggatttataaagaattattttaaacagcaataatgtttgaggggtgggggaagtgagaaaaatgaaattttaaatcacatgtttatgactatgaagctagactttaaaaataggtcagttagggtatgactcttataatacaaaagtttatttggtatacaaaggatttatagctaatgtattttttaattatattcactaatacttgtaaaagatcattcaatttataaagtttccaaaataaacctgtttaaagtgtcacaaatgcaacgcaagatgactttcattgctctcacttggaaaagtgcaaattcctctaacaaagtatatgcaatggcttcgtcactattctcagctcctaagcagacatgcacaacaaggtttgaacacattccaggcgtggccttcaagcccggaccacacctgcttccaaggccctgcggctaaaaataactctggggcctcaaaaatgggacaccagccaggcccaggggtagctgcaggccccttgctcagcttcaacagcaaaagcaggagctacaaaaactctaaaatcacagaacactccaccacaggcttccttctctcagtctctttgtgccagtcacctacaacctaggcctgctcagtttctttgctccatgagggcaaaactaaccctaggaatttagagacaagtgaggttattgtttttaaaagatactgtggactaggactcaggagaccttgttcctaatttcaactcatctactaaaatgctaaaatggcgtatacagtgtcacttgacattccccaagcctgtgtttttcctacttgtataatgaggaattcagtgatcactaatatctaaagattatttcacttagaacaaaaagatattgctgtaagtgtgcctcagttctcagcaaagtctcctaacagggacagggctgacttatcattaagcagtcatattatggtgtgagagtttataccctacaacacacaaactaaaacgggtaactctggggtaactgttccaggtaattcctttgtgacaggggattttcaaggcttgctctgagcaactatttccacttctcttccaatcccacagtatgcaggagacccctttggggattttgttactctaccaggtaaggaaaaaagaaagggcggccaggtagcagagaaagatgcagcaacagcatcgctgttcattcactgcaggatcctagtctgtgctaatttaagtcattgcatctgtccgcacacttccccctgctggggccctggaagttaatgatatcaggaagctgtatcaggagcaaagtaccacaaagtgacaggccaagacctaggctgaagaatcacagcaccacaggaaagcaaggacactaaaggctagcggagta

SEQ ID NO: 96377 - DNA, 88240 bp, Homo sapiens
  misc_feature (1)...(88240): n = A,T,C or G
atatacaataacaaatgcaccatatatttttcagtgggaagtacccaaagtagacttttatgtatttgcatacaaacctgtagtacttctataaacagttgcagttttacgtcccaactattaatactaaaagtcaatgttgattgatcatcctagtggaggaattgtgttacctgtcttctctcccacaaatcaggatattacaaaatcattggcaaatgaagaggcattcaaagtgtatgtttcaaaaaaaacagaaaaaacagtattacaggtatatgttatccacataataaaatattaatttaccttttgggattttttgatatctgtggtatataatagttttctaaaagtctgcaaatttgttttaattccttttcatattctaaataaatattcacttccatatctacttttttttttttttttagacaaagtctcactctgtcccctaggctggagtgcagtggcgcaattttggctcactgcaacctctacatccctggttcaagcgattctcatgcctcagcctcctgagtagctgagattacaggtgcatgccaccacgcctggttaatttttgtatttttactagagacagggttttgccatattggccaagttggtctcgaattcctgacctcaagtgatccacccacctgggcctcccaaactgctgggattacaggcatgagccactgctcccagccccatattatattttgtagttggaatttcatttttgtttctgaaggagggctccttaaaagcatgaacttcaggttcacaaattctagggctgcctctgctcctaacccagtcttagcatgggaagattttcaggcttgactcttttccatcctccctgtttcaaatactctctctgcttgctctttggcctcatacacagcaggcatctttctttccagtctctttgccagtggtaaatggcctccttttctcaaaactcaccttggctgctgcttgctttgctccacccagcagtcaccccacctcccacctcctcatcaaccccagctccattactagtccagctcctgaaacctcagccctgatcagagccctggccttcctccttgcctgggagggagttgaggctggcaatggacacaattcaatatagtttaaccagtgagaagttggcaatgccatcaggtgccacttgtctcccgggggaagaatgggggccaagagcctgcagtgtcatgtcagtcaggcacatgcagtggcttagcatcagaatgcgtggttcagaccgtggccacagtagggaaaatggactcttcatagttgccaagcaatgctaaaggtcagacaaaatctaatttgagaattcaaatttgagaatttaaaagccagagtggtcagaggcaagggaggaaaacaaaggagcttgctgttcaaaagcactttctccaggcctcctgtttgaatatcccctgcaactactagggtaaggcagatttgggaaagataggggactgattacactaatgctgttttgctttgcaaatgaaggttgagaagagcagtttaggggctgctccacaggaaaacttgtagggagtaatcctagactatctctttcataatcatctttgggattctttccctatccagggaagatgaataggtttcatcctttaaataatatttttaacctacctccaagcataacatctcccaggaacttgtgaaaacagcaagaacttgtgataaagttacaaatgctcaaaaatgtccctgtgattaagttttacccatgcttctacaagaaattaatccctctccctgtctcccttctccccttcctctcttttcttttttcatttctagcagataggaatagttgactgatataggagacaatgaaagtacccaaccattgaggggaatttaaacgccctcagtattaagcagagtatcacatagttaaaaatacaggctttggagaccaacagacccaggtatgagtccccatttcaatatagccttcagatccaggcaagagcagtcaacctggctgtgggaataggcagaactaacataaacaagaaacaaaacattgggttgggtaaattaactcagggacaaaaacagatatgtcatatagactacaattttcacttctttgccatcagcttttgacaggctatgtaaatagcctcaggcagaaagctcgagacatagcaattccaatgtttggtaagttatagttaattgtttccaaaatgggaaatgctgagttaaacaagattcaaggttttttgactgacgtctctgctccttttataagctaatgtgtactgtgaatctgcaagaggagaattagggactgtttctcaagtttctttagccatttttttgtgtggagtatctcaaggaatgtgtgctctgtgggatatatgttcagaaataagctctggccttaggaggtcccatcacaccaattgccaatatatctcctcagcagcaaaccattttaaagcccaatggatgtcactgggctgtttattcacttgtccattgatccttctccatgtttctctgtgtccctgtaagtgcctggaccacatccctatgcagagcaaccaaagttaatctgttcagttgaaagtaactgtacctgcagctgtggacagattcctgcacgtagtacacccagtctctgacgctgttgatgccctgcactctggttctgcttatttggttaaattgagttttctaacataaataaaaaggggaggcttttataaggaccttttaagaaatgaaaaccaacacaatataccatttgtccaagcacaaagtaaacttggcatcctgagatgttcaaccacatcatttcattattactgctactaatgggagacagtgcttgctagttgccaagtttgaatcatcccatcttagggcagagttactaacagatgccaaaccaatttgctgctctataaactttagaaattaaaacactaaaagatgcactggccttccaaacacagggatgttatttgaatactaaataaaagttgttgccagggaaatgggtgctttgtcttctttgccacaaaagaatcatgggctctgagacacttttgagatggcttaggtggtagcaaatacttttcaggtataatggactctactggtcctctttttttcttggagattttaaggtcaagaaactacccttgagatttatggcaggttgtatttaaggtataaagtgtgtgtgtatgtgtgtgtgtgtgtgtgtgtgtgcattcctccccatggaatctttgaggtgaaaggacagaatttctcaaacttctagcctcaagaaatcctcctgcctcagcctccagagtagctgggactatgggcatgagccactgtgtgtgagtcaaaagttctgaaaatggagaataccaactacaaaaagatttttctgtctgccttagtcatcaacagtggcccccatctctgaactcttagaacataactgaacaacccagtcttaaattatcagcccttctctagtgtttactgtcactctttcctctcttgcacttgtaagctccttcaggatagaaattgaggctcccacttgtgtatgccctggcccttggggcaatggtactccactctccataaacatttgttgagttgagttatgttggccaggaacttggagacctgcttgctagcacaattatctcagtgtgatggggggcaaattacttaacctctctgggccagtttctatgcatctaaaacaagtaagttggttcaaatgacatctaaggtcctttccagataaagattgctgagtctcttgtttctctagctcaagtcttcacttgtaaagtgaggataaagtcttgatttagctctacgtgcaatccataagacggttagggtttctctccttttttttctgtgtttttccctgtgattctgcagttggggcaatctctaagtttaggatgactgggcaaccagccacatgatatggttagagaatgctcaaatgtcttttccctttcacgttctaactgctgtgacatggcaactgagtttcacaataataataattccttgtatttgtttagtgctttacattttataaaataccatctcatatattttatcttttgatgctcaaaactacctcataaaataaaaaaagcagatattattcccatatcacagatatggaaattggggctcaaataattcaatttgcctaatggcacccagctattatgttagtctgaattcagcctgggtgttctttccactgcactgactatctgagataaaccatcatctccacaaagtaaatctgttacttgggtgtgagtggtatttaggacccattgactcagcctccttttgcacctgcattcagcaaacattgttaatgtctactgttttgcactcccagggctagcatgacactgataaattagtctagtattttccatagtatatttcttggaacacaaaaatgatgagatttccctgaaaaaaaaaaaagaagaaattcttgtggtcaaataattgagaaatgcttcataccacaccccctctttgagatttgcaggacctattcttgtttgcaaattgaagtgctgaaaagccttgcagtaaagggtcctgtttacacacttcacattcaccagctcccaagctgtatttagaaccctttgctcatgcacaatgattgaaatattactgtctgcagattatcctgagatcctgctgaaataagagtagagaagtaggaaaaggaacaatcttacaacagttaagaaaataagacagtgtcaccaatgacaagggttgttgacaaacttctggaagagagaagataggtaggaaaatgttgagagataatagagtacagaaaatattatagctcagaataaaccctaaggtaggtacagaggaggtgggggccctgttcttttccaggaccctagagaagctgtcagcttggagttggcccatcccacagtgggtgggaggtatgatatgggactccattggagggagtcagtgaaattctatcctagaacaactttgccagacagcagccaactcccacatcccagctctgtgcagtgcactgggagccttttacctgtggcctctacatggaaagttccctccacaggcagccatttgagggtgtggggagagcttgtgcttccagtctcggtgtggaggtgccagggtaaagactttctctttctggcatctggagatccattccctgatcaccccaaaggaatgatgattgacttggcctcccctgccactcggcccttatgatgtagtacaggacactttggaaaaggaacaatcagagaataagatcagagttattaaaaattaagaacataactgctaaaaatgaaaaatttaatagaagagctagaaataaggaaagcctctgaaatcattgagcaaaaaagcaaataaaaatatgagagaaatgactagagacagaggccaaatacagaagggtcaacctccaactaataggagttgcagagagagagagaggagagacactggagggcagggcctgatacacatatgcattcagtataatcattccgtgacagaccgcaaacaggcaaagtcctgcccctggagctgggtgacaggctggtagggcagatggacaaccaataaataaagcacaatgccagtgatataaagaaaacaggagaataaggaaacagaaattcagaggtgctatattagatggtgaggaggatgtttgagcagaacggagtgaggaattgagccgtgcccagttaacacttgctaaatgaataaaaggatgaaagtatgtaggtggaagagtgatgtgcacaacctcatattgctcaggcctatactgaacagtgctgctagatgatctctgaagttgcttataatttagaaagtggccttccctcccacccagtaaatgtactttaatcgttgaggtcggtattaatgatttctgggaactcatcacgtcccatgatgtgttggaaaacaccaggcaatgctttatcacagtctgtgcttcttagcaaactatttcctctcagctttcctggaagctggggttttatactatggctatttttagttgttgtcgcagtggctgctgggaccaattgcctaaggagtttgacgagaactttaccctggggagaggcattcctctctgcagtgttgccctgaagagccctgtaattgagatttgaccatttacaacctctgagaactagataccatatcatgaaatgcaagatcaggtagctttgctgtgtgctcagcagtcagcaagaaactgtccaaagttattttgaccagtggatcattcatttggtcagttcctattcaaaacctttgactgagataaagaagcctgttttgctttggaattgatgcttgggaagctccaggtgggggtaggctgggggatgtttgccctcaaaatgatttttcacaagagtaccccagacttgtgtgttccttcacagccagtcaaacgagggaccgactggcattcaggaaagcaacctgaaagatctagttgggatattctggcaggtatctaatctgccagcacttgcccttccttctctgctccaaggcaatgagaacaagactggctataaaacccaccactgccaaaaccatcttcccaaagcacacttctgaccttgcaacgtccctgtttaaaaccctcagattctccctgccacagaccaaacacactctaaaagtcttagctgctactcaaaggcctcctgtgatccaagctaatccctgggtataatttcatttctccagctcctccactttcaacccccttatgcatcatccaaatattattgaatgttccctataaacgagtgatgatttcccacctcgatgccttttatagactatttgtgtctcccccacacccctgacaacaaattcatatgttgaatccctaaccactattatggctatatttggagttggggcctctaaggaagtaattaaggctgaatgaggccatagggcgggggcctgatccaataggtttactatccttttaagaagagaaccagagagctttctctttcatttccatgtggagatacagcaagacggtggctgtctgcaagccaggaggaaagtcttcaccagaaactgatcatgctggcacattgatggtgaacttttatccagaaccgtgaaaaaataagtttctgttgcttcagccatgcagtctgtgtggttttgtcatggcagcctgagatgaccagtgcaatgttttggtgtatgcagtctgtcttcacaaagggtccttttttgctattaccatttgggccaaacctttcaaagagatgttcccttttctgtaaacttttctctgattttcttagccattgacaatctcatcttctaaattcccgaagaacattgtcagttcttttctttctttctttctttctttttttgagacagagtctcgctcttgtcacccaggctggagtgcagtggcgccatctcagctcactgaaacctccgccttccaggttcaagtaattctcacacctcagcctcctgagtagctggaattacaggtgcccaccaacatgcctggctaatttttctatttttagtagagacggtgtttcaccacgttggccaggctggcttggaactccagacctcaggtgatctgcccacttcagcctcccaaagtgctgggaaaacaggcgtgaaccaccaagcccggctaatttttgtacttttagtagagatggggttttgccatgttggccaggctggtgtggaactcctgacctcaggtgatctgcccgcctcggcctcccaaagtgctgggattacaggcgtgagccaccgcgccaggccatcagtacttttcttttgaaaaatttcactttttgatttaataatagttacttgtaaatacaaaatctttctgagctgaagacctgtgaaggcaagaacagtgtctttttccccctcatgtctcccataagcatcttgcaccgcatctctcacacatgggagctggtggctgtcctttactgagtgcctctctgtgctaggcatgtgtgagatgtgaagtgttcagctggaatcctcacagtccatctgaggattacaactcttacaaggaaggtgttgtcttctcatttaaaacatggtgaaacttactgtatgatgccctttgtatgaggtacctagagtagccaaacacagagacagaaagtaaagtggttattggctggggctatgggaagaggtgaatggggagtgactgtttaataggtacagcctttgaattgtgcaaaacaaaagttctctgggtgtatggtagtgattgtagcacaacagtctgagtacatttgatgccactgaactgtacacttaaaaatggtgcagatgttaaattttacgttatgtatatttttacctcaatgtaaaaaatagtaaaaactgaggcacagagaaggaaagtaatttgactaagatcatcaaactagaaaggggtagtgcttagatatgagccctgtctgcccacccctcttgtatggtgttttttgaggggtcttctttccctgttgcttaaatgttggtgttcctcagggctccatacttagccctcttgaattctgggctcagaattgggaaaaagttccccttctggacaaataatgtagaataaatttcccctccttgcagaggcagccctgcaggcaactggcttcttgggttgactgggctggatgccagaaccatctccaccactgcacccccgacaaactagccaggtaccctcatatgtggtacaacctacacaattagtggtgtgttgagcagctcgtcccagctcatgacagccagctgtgcccatctctttccgactccctgttcagtgatgccatattggtagcttgaaatcagctatggtgggagaacttacactacagaaatcagtaaatgctaaagataggagtccccctacaccacagagaccaatgttaattatttactgggataccactatgcacaatgtacatgaaagccttattgggggactctacttcttttggggcaactctgtttacatcagtgactatagctattatctctacaagtcaatgagatctctgtatctgatcttgtttctcttttaaacttcatactcatatgccttcctgcctactgcacaaatcagtttatataattcaagggaagaataaaatgttgaaaaccctcctcaccccccaaaaagaccaatctgctcctccctaatttctgctgtcacaatccacatggtcttccacatccagctgggtaccatgcatatctcagaagttctaccttctaaatggttttcaaaatgatcctcattgcattttcttactgctactcatgttgattcagacgcttatcatctctccccagtggtatgatgttgcattctattcatctgagcctgctaattggtctgcctgtgatatggtttggctgtgtcctcacacaaatctcaactttaattgtatcccccagaattcccatgtgttgtgggagggacccagggggaggtaattcaatcatgaggactggtctttcccatgctattttcatgacagtgaataagtctcacaaaatctgatgggtttatcaggaatttctgcttttgcttcttcctcattttctctggccaccgccatgtaagaagtgcttttctcctcttgccgtgactctgagtcctccccagccatgtggaactgtaagtccaattaaacctctttttcttcccagtctcaggtttgtgtttatcagcagcgtgaaaatagactaatacagcttgcttctatccttctcattgaaccagagttgcttttgtgggcaaatgtacttaagtctattctgcttaacttttgatgactccccattacctacaaggtaaatttcagactccttaatttggcacacaaaacctttcacagcagggtgccaatttgatttcaagcgacagccctgcaggcaactgtctttttgggctgacttggctggataccagaaccatccccacccctacaaactagccaggtgccctcatatgtggtacaacctacacaattagtggtgtttagagcagtttgtcccagttcatgacagccagctgtgcccatctctttccaactccctgctctactgactctattttatgaactacttgttgatctcaaataccctcacattactgctactgcctggtcagcttccccttcccttgttccacctaaattcctacatgacctttacaacccaactcacacattgagttgtgaaatctttctgggctttctccctgcccctgaaagatcaatcactccttctccacacattatcactttgtataaccattgtgtatgtgtgtgtgtgtgtgtgtgtttgtctggatatgtctcttcccacctatattaagaacacttgcaagacttttgttcatttttatcatttcaatacctagcagaaaatctggcatatagcagacatgaattttaactacccagagagatacaaagttgaaattaaaattatttttgctcttaatgataagaagatttagagggaattttccatctcctgaacacatgtaatgcatcagtgattcagttaagcacttcactcttcatggcaagtgtctgtggtgggtatcataccacattctataaatagagatgtcaataatcagagatattaaggaatttcctccaaggctaaagagttagtaaacggcaaatttgagatttgaattcaattgtacttccaaagcttgtgcctttcctactcctccatgattcattttaacaaagaaaacctttgtgtgaacaaataactgattcaatgtaatggagacaatgtctggaatatgtgcaaagtgccatgggcacaatctggagggacctgctgaatctgggtggctggggaccagagaagtctttcatagtggaggtgaacttgtgttctttgacagatactgcagagggactcactacaacctttacaaacctacctggtatggcttcttgtactataaaggctcaacggtggaagaaaaaaatcccagattcccttgcagctagagtctaggtgttccagattccacaaaaaaaaaggtataatgtgcgataacaggttggcagaaggagccacactcagcagcagttgcatgtgatcttacaggagaacaccatggcagaggcatttggttctgcaggttgcatctgtgttggaagttctggtgcacagtccctagtaccatagatgccaacagcaggaagctgtggggttttttctagaacaatctcagagtgtggttgagtgtttctccaggctcaacctggatgtgcagtacttaagcttggttggtgtctacccctaagtagaaatcctgtgagcttctcaaatctgtaataaatccctctctgcttaagcttactagagtggattttcttgtctgcctctaaatccacttaccaatgcaaacactgttgtggagaatgatccacttgcctctatccttctggagagataatcacacaagggtgtagcctgtcttagcactgtcaagaccaaggccacattgcatacggttgtacacaaattagaaatataagtgtatgtgttagggtttgcaacagatatgtattcatgctattcctattatttgctttaattttgtatttaaatttatttgggaaacttgctattgttgctgtaggcagagccagtttggactgcaggaagttttgcctctttcatgtacaaatagcctgaagaattgagtggcagtgatatggctgcttctcagaaacagtgatagtaaattcaactgttgggacattcgagggagctccctccacatgccaagacacatgccaggtattgtgttggaaattctatttcagtgttccaaacaagcctgtgaagtgggcattaatgtcccatattttagatgaggaaaagaaggctccataaggttaagacactgcctaggtttgcccggattgcaagtagccactgagactaaagtcagtttgcactcagagctgcatgcccttcccatgctgccagtctgcctcccagagggagtgaggaagtggaagtataataatcacccctctcacataagaacaggattgcctgagtttgtggggtattgctcaataaatgtttggtcagaccaatgtcctagagattttcctcaatgttttcttgtagtagtttcatagtttgaagtcttagatttaagtctttaatccaattttgatttgatttttgtatatggtgagagataggggtctagtttcattcttctgcatatgaatatgtagttttcccagcaaatattaaaaataaaaaaattaaaaaacaagaggagaacactgatactacagagacatctttctaaaccaaatagtttctgtggtataatttaggaggcatagtcagtctctttgagtctcaaatatggtgaagcagatcctgtccagggccctgctgacatgagtattttggtaagaagagctgaggcatccatcaggatgattatgcaagttggtttgccctaaatacggtgtatttacttattaaaaatttttttaattaaagaaatcaaactgacaattatggaaattacttgtaaaattattgaggttacttttaagagattctcaatgtaaatacaagtaaaaacaatctctgtgaaaaaagagggtggggtgggagtgggggtgctaacagttgtatggtgcttattttgtgcctagaattttacatatataaactcatttaatcctcacagcaatctagtgaaaggttaagtagattgcccaagatcacagacttaataaatgacaaaatcagaatttgaacccacacgctcttgcttgagagtgtatgctttgatccactatgctaaacctcctcttaaagcagcacaggattgggtaggacaatgtaattgctgaggcctggaatctcttccctgatcctacctgccaccctggtgcctgcattttttttcagagcttaaagcctgcttccttcatgaaagcttccttgaaaaatccagtcctgttccatctctgcgtgccttcagtggttattcagtactgagcattatatgctctagaacctgattccaccagaactctagcattaattcctaagtccttcatgttgtgaatccttcttcctgaaccaactggtcacagccccacagaaagaacgaacccccaacttggactgttttcttatctcttgcagtatctgcacattaggtacagagtgcgggttctataaagatttatcaacctgttgatttgacatattaaagagagacataggaaggaataggcaatagacgagaggctcattcttgcagctataaaatttttattatggaataagaactcaccacactcacaagagaattgcttaaccatcacctttatagatttttgtttttgtttttgtttgtttgtttgtttgtttgttttagacggagtcttgctctgtcaccaggctggagtgcagtagtgcaatcatagctgactgcaacctctgtctcccgggttcaagcaattcccctgcctcagccacccaagtagctgggactacaggcatgcaccaccatgcctggctgatgtttttgtgtgttttattagagactgggtttcaccatgttggccaggatggtctcgatctcctgaccttgtgagctgcccgccttggcctgccaaagtgttgggaatacaggcgtgagccaccacgcccagccaacaagttgttttgactgagaagggtggtcaagtgcactgtcctgatgtctgtgtcttggttccaggcttaatgttgcatttggccttagagactagaggggcaacatcctcagtcctcaaagtttctgcagctttgatggttcctcttggccaaagagagacacttaatgggcctggacgtggccattggattttgacagctttatggagatttgtaagggctgtttgctttgcctaatagttatcatttcaaaccaatagattcataccaagttgtatcacagatgttctttttcagtgtgaatacttttctccaatggtttctttattttgtggacatgaaaactcatctgtctcactaaatcccatcactccaccttttatattcagacaagaataaagacccagggaagagcctgtgaccacagaactgattggtcttcaagccagatctgaacccagatctccctgtaatagcactgtcctacagaatgttctgtgatgacagaagctgccttttccaacacagtggccattagccacttgtagctgtagagcacttgagatgtggctggtgtgactgaggagctgcatttctaattttatttcactgtaattcatttaaatttaaacagccacatgcgctaatggctaccattttgaatagtgcagttctagaagaaccaagccagtttatagagagctgctattgtaaatataaaagattactcaccatattctttcctttcttgccaccaaagaagaatataacaaaaatacttcagtagagtgtaaaaaaaaatgcacttgtggttcaacttttaacaaaaggcattcatgccaggtatttcttaccaccttgcatgtttactttgtggttgttatcactgaaacctcagaacattagttgtttcttaaacaatgtactgtcttatttatttaagctgttgccatgttactgttgtccatggtgccctgtgcatggaggctgacagcctctgacaggccctgcccttctgctgacccccaggctcgtgaagggaggcagaagggcactgcttataaagcataaaagtgggacatgccttcgagcccagttttctaacctttgtcctcacaagattgcacaaatcacttggttccatgcctgaaacacatgcttcatgcacagggagagtctgtcatacttttgagggagtgttacccatctaggagcagagctgctgatcagcgcattttcctaggtacgcatcacaattcatgcacaaatagattctcaacacttggggctgagtattggaaggtagctggagaatgggacttcattttggcaacaataaattccattttttctagagttttctaaagaaattcatagaatcatcagaggcttgaatggtaagaggttaaaagatgaagtgacattgcacttaggctgtgtcagtgaatgactggctgaggcatctgtttccctgttttctcattgctgaaaaatggtatgctgccttttgcaaagtctttattttgtatctttatcttaaagtggaagataaagactttgaaaaagacagcatatctttaaagagaatggaaacaagggtcagaaaggagttttttgtcagaaggccaaaatatgttgctatagctgtcatctcacaatgtcactttaatgattattatcactggattttagtccagttgaactttatgactacatgccaaactccaactcattcttgaacccaaaagggcaatattccagaagaacagagaagcaactcaagataaatggagatcttagagtcaattgcaacaacctccacttctggcctgacagagtaaaagaaaccagatttacccttaacaaatacaacagtaccaacagacaaagtatatgaaatgatggttttcagacattaggaataggatacacgggacccaaacacagcctgacagtctctctgagttgagcagacaatggagtttggagttcgggaaggtcaaggcagatagaatttacagatctaaataccagaggagatgcagttcctaacagagagagagagcttagagagcactcttgagatgtgcagaggagtccccttgaatctttgactaagtcctgatctgcatgtgcatgggagaaaactatcaagtatggggaaagaactagagatgcataaaagaagcaatcccaggatcttacacagggctggtaataatttgtgttcccagtaggaagagtggaaagacctcctagtacacagggcattgggcagagtcctcggaaggccattgcttcggtaatgaagccacatgagctgtagactagggcgtttctggacccacttctacaaagcttaaaagcaaggctcaaaaggattaaattcattctatgtcacttaactatatcccagaatgaggcctgacactttttaaaggaacacaacaaaatccagtatacaacaacataaaattcagtatgtctggcagccaaaagatattactagtgtatgcaaataactaagaaaatgcaactcataaccaagcatgaaaaatatcaatataaacccatatatggttaaaatgatcaaaattagtatataaggacattaaaactgctatataaacatacatcttatgtttaagaagatagaagaaaatatgaagagagaattgacaataaattcaacaatttaaacagcaaataatttgaaggaaacaaattatcaaactcagtgacaaagaaagcaataacctgaatatccctatatctattaaattcactgaatttgcaaggggaaaaaccttcccaccaagaaatctctagtaaagatagttttactagtgaattctaccaaactattagggaagaaatagtatcacttccacaaaaactctttcagaaaatagaagaggaaacacattcccatctcattctaggtgggcattatcctaatattaaatccagacaaatacacctgaatatttctcatgaatatgcaaaaatatttaacaaaattgtagcaaatcaaatctagaaacatatctacaacattctacatatcaacaacatatcaacaacattgttgtaaattcaacaacaaaattgtaccaagtcaaatttagaagtctataaaataataataaatcattactaagtggggtttagcccaaaaatgcaagatttgtttaacatttgaaaattaatcgatgtatttgacattaaagggaatgaaggaagagaagaagggagggaggaaagggaagaaaataaatccatatgttgtaccatatacaaaataaacttgaagtggatgatagaaccagatctataaaagttctggaagaaaacaaaaaatctttgtgaccttgggttagacaaacatttcctagatagcacacaaaaaacacaaaccgtagcattaaagaattgataaatgggtttcaccgaaacaaaaaagatctgctcttcaaaagacactgtcatgaaaatgaaaagtcaggccatacttataaactatttgcaaaacatgtataaagaaattgtcttgactatataaagaggttttaaaatttaatagtaataagatcaaatgctaaaataataagcaaaatatttgaataggtgcttcaccaaagaagacagaaggatgactaataagtacatgaaaagatgctcagcctaattagtcactagaaaaataaaaattaaagctacaatttagtgaaatgccgtgatatatttatcagtatgcttcaaacttaaaaaactggcaatgctgaatcctggaaaggcagtagctagaaatctcatacaaattttgacagccactttgaaaacaattttcaaggtttttttttttttttaaaaaaaaggttaaacattcactaaccatataactaaatagttccacttctaaatatttacccaaatgaaatataaaacataatcaacacaaaagcttacacataaatctttatagcagcctcatttttaacagccaaaaactggaaaagaatccaagtgccctcaactgctgaatgcataaaaagttgtagcacaatacattcacacaatggaatacaactcagtaataaaaagggaccaactgctgatttacgtaccaacatggtgagttcaaaagcattatgaaagaaaccacacacaaaagattacacagagtttaagcctatttatacaatatgttttaaaagcaaaaactgtaataatagaaagatccttctaggaggcaggaggtgtctgggaagggactcacagcaaaggaggtaagacagagccttttgaggtgatgggaatgtgccacatcatgattatggtgatggttagatgactgtatacatttgtcaaaactccctcaaatgcacacttaaaattgtggacttttaatgtatgtaaattatatcccaatactgttggccccataaagcaacatacatactagggcatatggtataatgcatttgtgtcaaataaaattaaaaaaggagagaattccaaatatacgaacttgtacacatatttgctggaatgcacataaaatgtctcaaggggcatattaatgaaatgtgtagaagggactgcctctgaaaatggaaatgaggtgtctgaaggagtatggttgggaagcaactctatcttttgtacttttcaaacttagaaccaggcaaacaatcaacctattcaaagcgggggcagggggcaatgtcagctgggttccaaaacctgctgctgctcaacaggacttgtcaaaatcctgtttctatgtgggagcacctctattttttactcactatatcccctttttcccatttacaaaatcacaggatgcctgagtatgaattttccttctctgttttctccctgactagctggtttgtcaccaggacttgccatagaccccactctaccctaaagtcaaatatcaatagctgcaggtactcaaggatctttgcttgaatactgaccaaatttcccagaacacaccaagaagctttccttccaaaagcaaactgaactatcccccgccccccataaccaatttggtttaaatcaacacatatttatgagccctgactatggaccagactttgtgctaactgtggggggtacatgggtgaataagatgtagctggaaagtgctttccttgtggagctttcagtcttgtaatagactgggggagctacacacttaaccagataattttaaaatgaggtaagaggtgctaaaatgaaggcagtcactgagggagaatacctagaatgatctgaaggttcagaaactgcttcccagggaaaatgagttcagaaagatgaggatttaaccagatgaaggagaggagaaggtgttgtaggcagaggtatcagcatgggcaaagctggatggagcagaacagcatcctatttgtggagagctcagtactcctgggacacggtgagtgaggtagagcatggtgggagatggaattagagaagccattaggttgctaggggcagaacatgcaaaggctttgtaatgggacgctcaaaggtgaacttgatcatgttggcaatagggaaggtttacagcaggggaattgagtatccaatttgcaatttcgttccaagggatggtctttactccactggttgaatgaaggctagctgagggtctcagggataactgtttagttcactttgaccaaatttaccgagtccccactacaacaagctcagtgcccccacaggacacggagctaccgagataagaaacaagattcgttccccaaggagctgatagtctggtaaattgccctttaaaaaatgggagttcaaaaaatgacccccaccgactagtctaacactatctcccccttgatattctgattggaagccacatcctggccagctgatattctctcccgcagggttgacactgaaccttttctcctgatcaccacgtctagtttggcttctgtgtctgttgacaaaacagtgttcagtaaatcatattaatgcagaaatacaaaggcaggcccaggaacaaggatgcactgaattagttctagccacatggcttccacaggctgctccttgcagtgtctaaccccagttgctgtgcaaatcctcaagccctttgactccaatgtccctttagagctcaaaagatcaaataagcactcagcgtactggctttctgtccaacttcaggatgatgctaggaatgtgccaggcattctaatgagtgcctgagaactaaagagatgaagatacaaacagtccactaaattcttacatagtcccttgcatcaagggggaaatatggattctggaactggctgcccatgtctgggggttcccattcaatccaactcattcttccttcagacagtagtgggttgaagagtggccttaaaaaagttatgtccacctggaacctgaaaatatgaccttatttggaaaaagcgtatttgtagatataatttaagctaaggatcttgagatgaaatcatcctgagttaaggtggccctatatccaatcccaagtgtttatcagagaagataaggggaaacagatacaggaacaccagggagaaggccatgtgatgaaggaggcagagactggcgtgatgcaaccacaagccaaagattgccagaagccaacagaagctaaaaagtacaagaaagaactctcccctagagccttcagaaggagtgtggccctgacaataccctatctttagactctggcctcaataactgtaagagaataagtttctgttgttttaaaacaccatgttttcagtaatttgttacagcaaccctacaaagctgatacagagggcttggactaccactcttactactgctgccagccactggcccaaggcttcctcctccctcattaccctggagattcctgggggtaacttatttcctccctccttccttcattcaaccatcattttaagtatgccaatggaccaagtatatgagaatggaggcagatcttccttcaggagttcacagctagggagatataaagatataaacaagtaatcatagcatttaatgttatggcccgaattgtatacataccccccaagtttgtatgttgaaatcctaaacccttggaatgtggctgcatttaagatagggtctttaaagaggtgattaagttaaaatgaggtcattagggtgagccctaatccaaaatgactggtgttcttataagaagagaagattaggacacaaacatgcacagggggaagaccatgtgaagacacagagagaaagaagatggtgatctacaagccttggagagatgactcagaagaaaccaaccctgccaacaccttgatcttgctcttctagcctccagtattgtgagaaagtaaagttctgttgtttaagccacccagtttgagatactttattgcagaagtcctggcaaactaatacattaaggtaagaacaatgaaggagtgcagagccaacacagcccagccttttagggagggacgaggaaagccctcctgaaaaggtgacttctaggctgcatttgaaaggacaggaaggaaaagcattgaaagagggcaactggagcaaaggcccagaaccatgaagtgtgcagggaagtacaggctagtgaatgtttttaagacacagggtgaatgaggagtgacaagtaatgaagtcttagctaaaagtctgagtatcatgaaaaacttttatgcattcgctccatcctggcctttttcctggagcaatagggagctactgcataactaaaatcaggggaatggcatggtctgatgtgctctaaagaagcacatgtgaaagagagaagatccaaataaacacaattagaaacaacaaaagggatattatcactgactccacaggaatacaaataactatcagagaatacgatgaacacccctatgcacacaaatgagaaaatctagaagaaaattgataaattcctggacacatacaccctcccaagactgaaccaggaagaaactgaatccctgaacagaccaataatgcgttccaaaattgaatcggtaataaatagcctgccaaaaaaacaaaaaaagaaaaaaaagcccatgaccagaaagattcacagctgaatcctaccagatgtacaaagaagagctggtaccattcctactaaaacttccaaaaaatggaagaggaaggactcctccctaactcattctatgaggccaacatcatcctaatagcaaaacctggcagagatacagcaaaaaaagaaaacttcaggccaatatctatgatgaacattaatgcaaaaatcttccacaaaatactggcaaactgaattcagcagcacatcaaaaagcttatccaccatgatcaagtaagctttatccctgggatgcaaggttggttcaacatatgcaaatcaataaatgtgactcatcacatacacagaactaaagacaaaaaaacgtgattaactcaatagatgcagaaaaggctttctgataaaattcaacatcccttcatgttaaaagctctcaataaactaggtatcaaaggaacatgcctcaaaataataagagccatctgtgacaaggcaagatccaacatcatactgaatgaacaaaagctggaactataccttttgaaaaccagcacaagacaagaaggccctctctcaccactcctattcaacatagtattggaagttcttgccagaacaatcaggtaagagaaagaaataaaaggcatccaaataggtacagagaaagtcaaactatccctgtttgtagatgacatgattttatatctagaaaaccccatagtcttggcccaaaagctccttaagctagtaagcaacttcagtgaagtttcaggatataaaatcaatgtacaaaaatcactagtattcctatacaccaacaacagtcaagctgagagccaaatcaggaatgcaatcccatttatgattgccacaaaagaataaaatacctaggaatacagctaaccagacaggtgaaaaatctttacaatgagaattataaaacactactcaaagaaatcagagaggacacaaacaaatggaaaaacattccatgcttgtgtacaaggagaatcaatatcattaaaatggccatattgcccaaagcaatttatagattcaatgctattcctatcaaactaccagtgacattctacacagaactaaaaaaaaagaactatttaaaaattcatatgaagccaaaaaagaacccaaatagccaaggcaaccctaagcaaaaagaacaaagctggaggcatcatgctacccaacttcaaaatatacacaaggctacagtaacccaaacagcatggtattgatacaaaaacagacacattcaccaatggaacagaatagacagccccaaaatacggccgcacacctataaccatcagatcttcgacaaagctgacaaaaacaagcaatggggagaggactccctattcaataaattgtgctgggataactgtctagccatatgcagaagattgaaactggaccccttctttatttcatatacaaaaatcaactcaagatagattaaagatttaaatgtaaagcccagaactataaaaaccttggaagacaacctaagcaataccattctgggcatagaaacaggcaaagatttcatgacaaagatgccaaaatcagttgaaacaaaagcaaaaattcacaaatgggatctaattaaactaaagagcttctgaacagcaaaagaaactatcaacagagtaaacaacctacagaacaggagaaaaattttgcaagctatgtatctgacaaagatgtaatatccagcatctaaaaggaacttaaattttttttcatataaatttaacaaatttacaagaaaaaaacaatcccattaaaaagtgggcaaaggacatgaatacttttcaaaagaagacatacatggggccaacaaccatatgaaaaaaagcttatcgctaattattagagaaatacaaatcaaaatcataatgaaataccatctcataccagtcagaatggctattattaaaaagtcaaaaaataacaggtgctggcaaagttgcagagattaatgaccacttatacactgttgattagagtgtaagttagttcagcctttgtggaaagcagtgtggtggtgattcctcagagacctaaaaacagaatgacccttctacccagcaatctcattactgggtatatacctaaaggaatataaattgttctatcataaagacacatggatgcataagttctttgcagcactattcgcaatagcaaagacatggaatcaacctgaatgcctataaatggtagactggataaagaaaatgtggtacatatataccatggaatactatgcaaccataaaagaacgagatcatgttctttgcaggaacatgggtagagctggaggccattatccttagcaaactaatgcaggaacagaaaaccaaacaccgcatgctctcacccataagtgggagctaaatgatgagaacacacagacaaatagaggggaacaacacacactggggcctatcggagggtagagggtgggaggagggagaggatcagggaaaataactaatgggaataggcttaatacctgagtgatgaaataatctgtacaacaaacccccataacacaaatttacctatataacaaatctgctaatgtacccctgaacttaaaagaaaaaaaaaaaaaaagaaacacatgtggatcattcctgtggctaggtggggggaggggggatccttgggagatggatgactctagaggcagagtgaccagttaaacagctgtggtcaagatgacactgatcagtagtggccaagatgaagaggagagaatattttcagaggtgaaatcgattgcactattgaaagtaaaggagaaatgcaaatccaagttattcagaagttttagtttgtacaattagtgatgctgtccaggatgatgggattagtagtgcatgcattgacattgagtttgtagtctcttgggggaaaaattgcaaaacattctttagaaaaaaatatgggccctaatttggggatatgtatttcagagtatcacatcactttcattttcagagttaacataactctcacatgattatttggtgatgcttctttattattctttcatgaaggtttcttcccatggttcctaaaggtgctaaaaggcttagaaaaggatttgtttcaccccatagcttattctacccctcccacatgggcacacaaggtgtgagtacccaggcagggaaagtggaaagcatcacagtgatagttaacatttctgagagttcatggaccctcctgaaatcatctggcacaaatatttttgcatagggttctagaatgttcctcaaccttctgaagcatattcatgaacatatgaatatattcccaggctaggaatgccgatataaagaaaaatcccctggatggacagcccaatgtactagcttgccagtgatttgcaggcagccttaggaaggttggttcactcctctgactttccacattcttggcacagtgctaagattctgagagtctttgattaatggcattgattcacaaagcaaaccagttcatatgggcacctagaaaataattttgaataaaactgggccttgattgtgttcccagcactctaattaagtgagtccagccaggctatctcaccccatgcaaacacactttttaaactggaaactatactaaaataacaatcaaaaccttgtgctgaatccatatatctcccccttaccctcacaaaatataaagtagctggatacacagatagataatatataaatcagcatcacaccagctagctttttccacgaaaattggtttatatgaagccacagatttaaatacgtggacacatccagatgatcagttgaagagatacagtgttaatgatatatgatatatttatatctaaatacttgaactaatctttgaaacaaagcatgatgtctgtttggttctgttctagctggtaggtggaaattctttttaatttgcttgctgtcctaaacattgttttgctcatggtatcctcctcagaacattctattactcttggttgctctcaggataagatccaagccccttagtttgcagtgaaaggcagcactcttagttattcaacttcgtcatctgctcttcacctatgtgggccttctgacccactcaaccaaatggaccttgccatacacatgtgagtgttggctgtgactctgcttctgctgagcccactgcctgggacgtcctttgagccacatctcaacatcccaatccagcttcatttatctcatttcctcaaggggattttataagtttctcacctgcaatgataaaactttgtttgcctccaaggtaaatgcactaaatgtgttgcttatgaaagcatccaggaagaacctaggaagtaaggggatctgttctcatcagctcttggccaaggaaagaggtccaggcccacagatcatagcagaaaaggaaggaaagcctacaaatcagtaatgtttttttaaaattgcatatccctatcaatataaaacatttacccacaatatatgtatatttactcacttacaaattatatatgtatatactactgtaagagtacactgtgctcattgtaaaatatataaaatattaacatttaaggtggttagataaaagttcaatagaaatgttgcttattatttttcattctaattatagtattctaacaccacatggattatgttgagtgccccattttgaataccatgacccctataaccacatcaggcacctctgctatggcaataatagtaattacgacaattctggagcactttactatgctgagccaaattatagtgaataattcctttagaataattatgggctatgagtctaaaaagtattaaccagtgttgttctgttgcctgacttcaacaggacatttacattttctgtgaatagtgccccctaaacttgttcagtgcacaacctgtgcatccccgcatgagggccctataagtgttctatcagagataggctctgaagctgcagatactttccaagggacaggcttcacgtgagctgagtgtggacaggagtgttgttcttatgtcaacttttccaaccacagccaaatctagaaaccatagtcagtgttgagcagtatcttagagtggataataggtggtgccatatacacatgtacacactgaccaggagttggagccatacaccttggaatctaagactgtaagatctaggaaagattcctttcaaggatgaagaaatttgggtccagggacattttatgcaaaagtattgacaaagttgtgttagaattccctgaccactgctctttccacaatattgtattgctcatgtttgaaaaacccagtaggatatttactgaatgcttgctgcaaagcactatgcttaaaataaaacgtcatttcctgaatggttccaatttatcacaataagtaataatttaggctcctatatattgacatttaccatatgtcagatactatattaagcaacttataagcattatcttatttaatctttataataaccctatgaggaaggtatcataatgtccattttatcaatgaggaaattgaggctgagagaagctcaataatttaacagaaattaatctgctaaagtaggtttcaaatccatgcaaccagacttcaaaacctgctctaggggctgggcacagtggcttctgcttgtaatcctagcattttgggaggctgaggtgggagaatcacttgagcccaggagtttaagaacagccctggcaacggggcaagaccctgtctctacaaacaaacaaacaaacaaacaaaaaatttaattagatgggtatggtggtgcacacctgtggtcccagctattctagaggctgaggcgggagaatggcttgagcccaggagattgaggctgcaatgagctgtgtttgcaccattgccctccagcttgggcaacagagtgagaccctgtctcaagacaaaaacgaaaacaaaaacctgctctaagacatattccgcttccataataaatgacataaattatgtataggacaaatggtgtttatttgtaccattttcttttgcaataaccattatcagaatactttcttcctttgcattaaacaaaatactagaatgcttttttctctctccatctctctcaccacccatcccctctctttaacatacatacatacagacacattagcgaatatcagctttctcattcgcacattttctgagaaggggtccatagctcactataatctctagagtcaaccatggctctttatttttcttttcacccacatcaaattcttcagcaaaatgcttgggctttcccttcaaaacaatcccaatgctccactgctgtcacagtaacgcaccctcatctcttgcctgaagtttgtcagttgcctctaaactgtttttccctgttactgtgtctacccgtcccagctacagcctgttataaaaaggtggccatactgttccttccaaaatcgcccaatgcctcccgctgtcactcagagtgagtgaggttcccctagtggcccctaaggactgctgtgatcatggtctgtgcctctgcacctctccagcctcatctcctaccaccttgcctccctggctcacccactgcagccacactactgcctcgcgcctacttaccgtcactctccatccgccaaatatggccatgtccgaattcccagaagctgcagattactttatgtgacaaacggacttgcaaatgtgattcaactaagaattttaaaatgaggagattatcccggattatccttgtgggtccaatctaatcgcaaagttccttacaagagaaatgcaaggagagtcggaagaaggcaatgggatgatggaaacagggcgagaagaggtgatgtgatgtgggccatgcgcgaggaatgagatctgcttctagaagatggaaaagagaaagaaacaaattctccccagagcctccagaaggaaaacagctctgctgacaccttgagtttagccccataagactcatttcagacttctgacccccagaactgtaagagaatatttgtattcttttaatccactaagttttaggtaatttgttagagcagaaataagaaattaatacacccatatcctgttttatagcattttcaccattagccctattttatatttatttgtttatttgtttatcagttgtctctcccactacaatgcaaagtgcctgggagacatggctgggcgcggtggctcatgcctgtaatcccagaactttgggaggccgaggtgggtggatcactgaagtcaagaaatcgagaccatcctgaacaacatagtgaaaacccgtctctactaaaaatacaaaaattacctgggcatggtggcgcatgcctgtaatctaagctactcgggaggcagaggttgcagtgagctgccctccagcctgggtggcagagtgaaactccgtcccaaaaaaaaaaaagtgcatgggagacgagactttttttttcttcattggtgtaaacccagcacctgacataagatctgttgaatgaataaatgaatgacatatgttacttaattaaataattggtcaacactctgaaatgattaagcctcaataaaatgttggttaaacatatacttacaaacctgcatgacattctcaccaacatgtctagaacaggtgaaaacatacacaaatgaatacaagtatcaatgcagcccagtggtccacactaaaacagcccaggagaagaacatccagaactgaaaagccgtaagccctactaggaagacagtgagccacagagctccctccagtgtgggggaccaacatcccttccacagagcagggaagaggaaaaggcctgagaggtcacactcacaccctacagtttcactcaagcagagaaggccctgttttactcgattttatatattctacttccattcaacattgggtaaggaacttcagtgaagatagggccgagtgtggagctaggaagcagggattataactgccgctctttttattactgaatatccttaaaaaggagtttatgcatagaagctgaggtcagtgggacactctatggcctttcagttcacacaattatgctaaaaagaatgtaaacttaaagagttaaatctaatatttgctttaggaaattttaagtaatttaggaattacatgttatagtcaatcaattttccctgttgctggtactgccaggaagtaccaacacttctttttcctactacttctgtttttgctcaataccagccataggctaatttctagtgagataaacacttagccaaatttagaaataatgtcagatgggtccatgatgatgatcatggtgatgacccactttgcctgtcacaggttgcatggatgcttctgccatgagaaaaaaaaaatacatctagtcctcactttaaaaaagtctgtggccaggagctgtggctcacgtctgtaatcccagcactctgggaggttgaggcgggtggatcacttgaggttaggagtttgagaccagcctggccaacatggcaaaaccccatctctactaaaaattcaaaaattagccagaccaggtggcacatgcctgtaatcccagctactcgggaggctgaagcaggagaatcatttgaatctgggaggtgaaagttgcagtgagctgagatcatgccattgcactccagcctgggtgacacagtgagactctgtctcaaaaaagaaaaaaaaaaaagtttgtttgcacagtgtgacagtgatgatgtggatatggaggtcagaaaactgcgtgaatgcacctgttctaacatcacctcctccgtggagctgctccaaactcagtacacatctcagcactccttctctgaacacccacacactccacccactcctctgtttcatctcttactatattgtattagaatacattgagtgcaagtctgtctctgtcaccatattattcattacttaagagcaagggccttgtcttgcacagccctttccccccaaatgctcagcagagtacaaggcaatgtgtgtctggtatgtatgtgtgaaccaagcactatactagattatttttaaaaggaccttgtagtagaataagtgatccatgatttacacacaaaacaattagagaaaagaacaaattacaagacaacaaagggcaaaattagtaaagtgtgtttcatcagaaatgttactgggaactggggaagagagaaatgagtatgaactatggtttctgtaggtttataatcatttttattggcargaaagagcagcatttacaaatatatttatataataaatgtgaaaacatttctaaaaatcacataaatatgaatattgtgggggagatgttggggaaaaagggcctgccatcttgattaataaagatgatttgtttaggtctgaaacactttacattttgataatatttataaccataactttattactttatcatctaatacaragatcaccaaggttctgtttagatatcgtaagcattaaacattaacactggtagtgtcttactactactgaaatcatttgacttcatcaaatttttagttatattggtgccaaaggggcaagctagtgacagagatagcctttattgaccacctatctgacaaatctgtgaccttagaagcacaagaaggtctttctttcacaagctttggtttcacttttaaacatgttgacaaaggaaatttaaccagacagaaaaatgtacttaatgtcagccacaatggcaaggayttgggcagcagttatggctcacttatgtgaaccgttttgaaaaatactttgcccatggtatgtaaaagtcagtgattaaatacgtgctttaaatgcaccttccaattcctctaattttgtgaagagctgagtacactctaatgactgatttagtccctccgactcctgaatatgtattgagatccaaggaccatggcattatgaatctttccctggtcattcagagcaaaataaaacaccagccataatatctgcatgaacagggtatgcctgtcagaggcagaccttaccttcacaaagaggtaaatytcagggttcatgtgagctccctccttttcttccaaaccttcagcatcagaatagcaggaatacttggtggtagagaaggccttactgtgctgaatggtgaagcttgaaggagaaggcagatcttccttcatcacactcccattctcctggagttctgctgcgcagagttgctggtcctgggntgatgaatataacccttccattgagatgcccctgtcctcctggggctcacctggatgagcctcctggagttcagagtatatctcatcaggcaggaggtagccwctgtcttctgactggacagaggccaagctggtctcttcacccttaatggtatagactgacacaaaatcatactcatgggtattcagctgagtggcatataaatcattttctggccttaagtactcatggacatcatcataatggggactttcattttcttctggctggtctggaacctcatacgtcctctcattttggattgtgtcatagatggtgctgtagtcttcgtcattcatgcttattgatccgagagatcygtttacagggagacctgagtagatctgaaatgaatgaagggacagaggatgctgcaccaccttgcagaggaatcaacgagctcttaaaaggcagcaactagcaactgctatcaatgacakgtctctaacaattatttactggagagttttataagcaaaccacaagtccattggacagaagataaagcttacacactcagttaactccttcactcctaaagatatttttattagaccctggggatttcctcattggcagtaactccaagattctttgggtaagccagagattgaattgaattatcttcctggtatacactgaaattttgaatatgtagccatttttcatcaatagagctccctcctccaactgcctccaaatgttgacaacattcaagaacccctgcaattcagtggagagctacaattcttcacaatggcctctcatctatttactgctgaatttatcacatagaacaattatttgcctattgataccctgtgataaatgaattacatgccctggttaggtaatgaattccatttacatttcttatctggaaacaccactaggtgattaaacagcagaaggaaaagaagataaatgctctggcctatagacacatcagtatagaccacccaaattagggactcaaagacttatggctttaatttttatttttcccccttaaatctgcatgatcatcaccatcaacaaacattcactaaaatcctatcatatacagaatgctgaattgagcacaacaaaagcgttagaagacacattctctgtcttcaaaggggcttttaaatgtagctggagggcccagaagagaaaaataaaaccgaggaaaaactatttaaagttttcttagtgcaataagcccaggtctggataagcaataaaaaattgtatgcacaaggctgttcagtcaatgccatccacagatgctgtgaatatgtgtgccccccaaattctttttaatctggtactctatcctgctaattcctgcttccctttgccacaccacatacatctttctccttgaagtgacaacccagctaggttgtaaagggactttaatgtctagaaatcatgtgaaaactgtgaagcaatgcaactcctgttgacaagcttcagaacatttgatgggcatcttggcaaaacttcgttgtactcttagacttcaatattgtatccaggaatcttctactgggaattagagcagcatttctagaattctagcttaaagaatgggtaaggaaaaagaggtcagagacttcaaaggctattgacactggacatttatcttattgaaaagtgacattcaatgggtccaaataccttacacattttgataggttctataatcaggtgtttttaattgaatggattccagttcaaatcttcctcctagttttacagctggtgaaaacctaagagatcattcaaacattttattttacatttgaaaaaaatttaaacctagaaagtggaagtgaatggtccaagtttacacaaaaacttaatggcggagctgactttagctgtggtttttgaacctccagctcagtaatatttctgctactaaatctcttccttaactcagtattttccaatctttttttcatgatcacacactgtcccttccctgctcccaaaggagccttttcagatatttctctatgaaataaaaatgctgcagatatactacatatctgtttgcatattgtatatacatatgcattttgtacattaaaagagtaacttttttttctttttgcttcccaagaaccaattttcaccccttggggggtgacactactcctttccacaatgcaactcatgcttttactactaatgcagtgtgtagctcataatctaacactggattctgtttcattctgcattattacaaagaatagtatacagcatgtgcatatggatacagcatgttgtcaagtcctcaccacaatgacccagtgaggcagggctgaggttggctaagcttagggcccaagatcaaacagatatttcaaattaggtccctctcttatcccattttagaacacatctatcatgatctacagttacaggttgtaatatgaaacaagtccttccgttaaaatgtaagtcaggtcatattgctctgtgctcaaacccctacaatggctccccatttatcttagtgaaagccaaagtccttacaacggcccacatggccctgcataatccacaaccactctcctatacctgttttttcaccccttgccgacccagctccagacaattgagccttgtttctatacctggaacactcctggatattcccatattagaccttttacattggctattctctctaasagaacacacattccctggatatttgcatagtcaattcccccaactcctataaatttttgctttaatgtccccttctcaatgagactacactgactgtcctgtttaaaatgacaacccatcccaaatcctatcttaatccctgttccattactaaaaacccttaccctactttcccccccttttccataatatttatcaccctctaataagatatatacataacttatttwttatgtctagaggttttattttctgtcttatcctactagaatgtaaaccctatatggcggcgaatctctgtctactttttcatcattatctcaagtacctagaacagtgtctggtacatattatatatatgttgaatgaatacgtatttgttgaatgaatttttawgattgytgacatatttatccttcattgggtacttacrtttcacgagaacaaggcccatgcctattttttcrcgttgctatatagctaaagtctagcagatatctgatatgtaatagctgcctattaaatatttgttggataaataaattaaaggaagaagatgtatctagcattcatrtccttttactcctggctcagttttctgagccattaattttttgaagggttttttctgtctctatttccttcagttctgctctgattttagttatttcttgccttctgctaacttttgaatgtgtttgctcttgcttttctagttcttttaattgtgatgttagggtgccaattttggatctttcctgctttctcttgtgggcatttagtggtataaatttccctctacacactgctttgaatgtgtcccagagattctggtatgttgtgtctttgttcttgttggtttcaaagaacatctttatttctgccttcatttcrttatgtacccagtagtcattcaggagcaggttgttcagtttccatgtagttgagcagttttgagtgagtttcttaatcctgagttctattttgattgcactgtggtctgagagacagtttgttataatttctgttcttttacttttgccgaggagagctttacttccaactatgtggtcaattttggaataggtgtggtgtggtgctgaaaaaaatgtatattctgttgatttggggtggagagttctgtagatgtctattaggtctgcttggtgcagagctgagttcaattcctgggtatccttgttaactttctgtctcgttgatctgtctaatgttgacagtggggtgttaaagtctcccattattattgtgtgggagtctaagtctctttgtaggtcactcagggcttgctttatgaatctgggtgctcctgtattgggtgcatatatatttaggttagttagctcttgttgttgaattgatccgtttgccattatgtaatggccttctttgtctcttttgatctttgttggtttaaagtctgttttatcagagactaggattgcaacccctgcctttttttgttttccatttgcttggtagatcttcctccatccttttatttkgagcctatgtatgtctctgcatgtgagatgggtttcctgaatacagcacmctgatgggtcttgactytttatccaatttgccagtctgtgtcttttaattggagcatttagtccatttacatttaaagttaatattgttatgtgtgaatttgatcctgtcattatgatgttagctggttattttgctcrttagttgatgcartttcttcctagcatcagtggtctacattttggcatgattttgcagtggctggtagcagttgttcctttccatgtttagtgcttccttcaggagctcttttaaggcaggcctggtggtgacaaaatctctcagcatttgcttgtctgtaaagtattttatttctccttcacttgtgaagcttagtttggctggatatgaaattctgggttgaaaattctttcctttaagaatgttgaatattggcccccactctcttctggcttgtagagtttctgccgagagatccgctgttagtctgatgggcttccctttgtgggtaacccgacctttctctctagctgcccttaacattttttccttcatttcaactttggtgaatctgacaattatgtgtcttggagatgcttttctcgaggagaatctttgtgacgttctctgtatttcctgaatctgaatgttggcttgccttgctagattggggaagttctcctggataatatcctgcagagtgttttccaacttggttccattctccccgtcactttcaggtacaccaatcagatgcagatttggtcttttcacatagtccaatatttcttggaggctttgttcgtttctttttattcttttttctctaaacttcccttctcacttcatttcattcatttcatcttccatcactgatatcctttcttccagttgatcgcattggctcctgaggcttctgcattcttcacgtagttctggagccttggctttcagctccatcagctcctttaagcacttctctgtattggttattctagttatacattcttctaaatttttttcaaagtttttaacttctttgcctttggtttgaatttcctcctatagctcggagtagtttgatcgtctgaagccttcttctctcaactcgtcaaagtcattctccgtccagcttttttccattgctgctgaggaactgcrttcctttggaggaggagaggckctctgctttttagagtttccagtttttctgctccgttttttccccatctttgtggttttatctacttttggtctttgatgatggtgacgtacagatgggtttttggtgtggatgtcctttctgtttgttagttttccttctaacagacaggaccctcagctgcaggtctgttggagtttgctagaggtccactccagaccctgtttgcctgggtatcagcagtggtggctgcagaacagcagattttcgtgaaccacaaatgctgctgtctgatcgttcctctggaagttttgtctcagaggagtacctggccatgtgaggtgtcagtctgcccctactggggggtgcctcccagttaggctgcccacttgaggaggcagtctgcccgttctcagatctccagctgcgtgctgggagaaccactgctctcttcaaagggacatttaagtctgcagaggttactgcagtctttttgtttgtctgtgccctgcccccagaggtggagcctacagaggcaggcaggactccttgagctgtggtgggctccacccagttcaagtttccmggctgctttgtttacctaagcaagcctgggcaatggcgggtgcccctcccccagcctcgctgctgccttccagtttgatctcagactgctgtgctagcaatcagtgagactccgtgggcgtaggaccctccgagccatgtgtgggatataacctcctggtgygccgttttttaagcccgttggaaaagygcagtattagggtgggagtgacccgattttccaggtgccatctgttacccctttctttgactaggaaagggaactccctgaccctttgcrcttcctgagtgaggcaatgcctcgccctgcttcggctcgygcacggtgcactgcacccagtgtcctgtgcccactgtctggcactcyctagtgagatgaacccggtacctcagatggaaatgcagaaatcacccgtcttctgcgtcrctcacgctgggagctgtagaccggagctgttgctattcggccatcttggctgcccttcgtgaatgtcttaagtgatagataagtggacaattagagtggaagagggaagttaagttgtgaagtatgatgcrgagttgagaattcttaatgatggagagtaatcctgattggatggagtgtgtggattgtgggaaaagtagagaagaggayagtactgggctagactgtggatggccttgaatgctaagatcagaaatctgaattttatgctcataggatgatactgaaaatgagcagccacataacacagatagcagttcaatccacaaccatttaaattccagctggattccagacaaagacagatgctcacagaaaaccatttctagtagctggtattgcttattggagcaacttggtccactggcacatcgtagcatgatatcccccattttgatatgggcacagggagggaactgtgtgtaagccacctgataatgtcagatggtttggcagagtcatttcagtcactgtgcacatgccactctcccatctacctctcctggcattctctcttccttagagttccatcaaatgccattcacagccartcattgagtggccttggttttcataaccctcatctcacaaccttctgaattttattcttcacaatgctgtctctgccatcctagctcaccatacacatctcttcataaatgcttacttgcatatgatccccaaatttcaccatactttcttgcttctcaaattgaacatggtcatccatattttgcctcatgattacattggttggcccacctcagtgctgtctattttagattatacaatctggaagaggtcctagaggagcttgggtaaaattcatctatgttgttttattacttagaggagatgaggaaggaaaacacaaaaggggacattaaatattgcaaaactgagacagatggaatcttcytcactgaaaccatcttgtttgataggtttatttaaataaacttaataaagaaattgagcacccaaacaccaccattacaccaaaacaatatgataggatgaactaaataccctcaarctttgaggcagggcttcccctgcttcatcctctccctgcccctactgctctgccctggcactgtcatcttacttaggttgggacccaaccccagcacctgactctcagaaatgaccttcacctggcccaagtccttccttattcacggtgggtctagtttcttcccttctcatcccctctctgcggactccatcatgaccaaatcctccttgtctgaccactttagtagctctctaacacttctctagaacctccagtatagaagagaaacatctcaaagcagatgaacctgctgatacctgatatccaaatactgaggagcccagatagccaacttcaaagagggaaagagagagtgggcatcctctgagtcagggtgttgcagataaagacaatgctacattttgatgagtttcgaaggaactggtgttaatgctaagtgtactaaataactaatgaagaataaacgagctgcatatttgtcatcactatcattctgcctaaaggaaatgtgctttctgctatggccaatttgagtccattgagctttctcaccccaggttctttttaattatgtttctctacctttgacagttttattttgtgatttgaagggttttgggattttatcatttagggattttcttctccaaagacatctgggaagtttggtcttatattataaaaccaaagcaaactctatcagcgtactctctcgctctctttctgtgtgtgtgtgtgtgtgtgtgtgtgtgtgtgtgacactgtataatatatacttctcaatatagtatatattataaaaattgttactctgaaccatccaggaaagataaagaaagtrcttaaggctttggaaataccacttgactcctataatttcactggtatggggacacatgccccaaattatctgtcccttcatacttcagttttatagtactccacaagaaacacacatttagcttgaaatatatacacagctgtcattttgaatttcttggattcctgtgtagtgtcaaagatgtatgtattttatatcaagaagatttctttctgattatgaagatagtttatgtttactatagaaaaagataagaaaaataatctgcatttccactacccaaagataattatgttaacattctctaactccttttctacccataagtatctatatttttaaaattgaaatcatgtacatttttattcttttttaaaaagaaagaagacattatataatgtgtatacattaaatttaagcatttatacaagaccagcaaatattttcaaatggtaaatactcaaatactagctaatctcatttgttgatttagaagattcaaagatatctttctttatttttgagccaaatgactttttaaaaggcagaggattttgcttgaacaagtgatcgtcccaacaaatcaggtaataaataagaacatcttctctcattcttgtccctatgcacttcccaggctgtgatatggtgactttacaaagcacaaagggtaattaatgcttgcagcagggaagggctcacttaatgttttgcatggtgccttaagattttgtctaattttcctttaaatttacctattaatagatactgtactcaattgatctatgcatatttaaattctattttggtgttggtttacatttgggtaaggagtgggtagaagtaggggacaaagaaggcaaattacagaattgtggcactagaaaaagcaaccatcaaggttttagtgaagtatttattgtttaacagaagtcatgaagatgaagggagaatgaactgcatattgttttagcaaaatgcaacatggagtaagaaaaactttggtgccaaacagatctcagtgtaaatgctgcctctactgcttgcttatgcaggtgaccttgggcacaatcatctaaattttcccagtcttcattttcttatttgtaaaaatgaaggtaacatgcttcaggaggttaaggaacattctagaaccctatgcaataatgtttgtggccagacgatttcaggagggtccatgaactctcagaaatgttaactatcactgtgattcattccactttccctgcctggatactcacacctcgcatgcccatgtgggaggggtagaatttgctatcgggtgacacaaatccttttctttattgtgggtagaaagattaaatgacatacaatatgtaaaatcttgaagcctggcagattacacaggtgtgttcagtgactgtttcctccccttctcccacaactaagccacatcaactttcttatgagttcacaatgaagattctggaggggaaaaaataatgtacgggtaacatgagtaatttcaacatgtgagcatattaatggaacttagttctgctttgtattccatttattattatacattttgggacatattttcttttaacgacgctgatagttactctaaatcttgatgattacattttgcagtaattgccaccttcaaaagacattaacagacagtatttttcgtgatttgcacaggaatgcagtaagccaggctgctttctgctgtttgtaataagattagggtgcaygtcccccaacagctgacactaaacttctagcactaaaatttgcttccattacttaaaaacgacaacaaaaaacgaaatatatgctctataaaaaagtaggtctgtagagttagaaaaataccagatgtctataattgaagctgatggcagataatacaataaaaatgaacacgttttatatcaaaggtaaaaacttgaaatatccaagaagggatcaggtgtgaaatcaccttcaggatttgaaaactctgaatgtttttctgcatgtataatccaccaggtggcactgttgcctgctttcggctccgaccccaacgcctcctccagagctgagtttgtttaggtctaggtcagagctagttcatagattcgtcaacttgatgggttttttttttttttccacttcccaattattttgctttgaagataaaatgcctcaaattctaaacttatgttaaaaatatttgatctatgtgtcactttagtttggagctcaattcgccttttacttattttttacagttcatttaacaacccacatttaatttttaaaaaatgtttagattgacaagtaaaaattgtatatacttatgatgcacaacaygatgccttaatatgtgtatacattgtggaatagtcaaatcaagccacttaacatacgtattaactcacatacttattttttgcctgtgcaatgagaacacttaaaatctattcttttagaaattttcaaatatacaatgcattaaattaagtttaacctaaagctgacttcttacatgttttaggttcagcctaaaggtttctctgtacatagtgaaatgtaacctaatgtggtgtgtaaacagactgtaacctactcttgcaacaatcagcaagttttggccaaagatgggcaactcttcaaacttgtgatcaaataaggcaaacaacaagctgttatcaatccagctgtttaggtacctcacctccattttctggaggtcactttcctttttctgtctgtaaatcctctccaaccacatggcagcgcgaagttgctctgaacctattctggttggggatgctgcctgattcacacatcttctttgagcgattaagctctactgaatttaatttgtttaaggtattttaacacatgtattgtagtactagatgggtacaatatgtctcttgaacttatccctcctgtctaactcaaattttgcatctttgaccaacatctcccaagtcccctaacccaccaacctcttgccaccaccatgttactctcagtttctatgagtttcactgttttacactccacatataagtgagatcatgtggtagtatttgtttttctgtcctggcttatttcacttaacataatgtcctccagtttcatccatgtggttgcaaatgacaggatttccttttttttaaaggctaaacagggcttagcatggtggctcatgcctgtaatcccagcactttgggagtctaaggcaggaggattacctgagctcagttgaagaccaccctgggcaacagggaaagaccccatctctgcaaagattaaaaaataaaaattaactggatatggcagtgcatgcctgtggtcccagctacttgggaggttgaggagggaggattgcttgagcccaggaggtcgaggctgcagtgagccatgttcataccaaaaaatgccaaatataattccattgtgtatatatgtcacattttctttatccattcatctgttgttggacagaggttaattccatatcttaggtattgtgaataatgcctcaataagcatgagagtgcagatatatttttgacatactgattttatatcctttagatatatagccagtagaggaattactggaccttatggtagttctatttttaatatttttaggaacctccatactgttctcaatatggctgtactaattgacattcctaccaacagtgggcaagcgtccccttttctcctcatcctcaccaacacttgttatctttcctctttttgatgatagccattctagccggtgtgaggtgataacaactcttaggagcttgtgaagaacattcaatcttcacaactactctatacgcaattcatttttctattgtacacctgaggaaattgagttttgggtaaattgatttgtccaaggtcaggcagacaataagcagagaagccagacctgaatccaagagtatttgaatccaaaacccacgttttcacactataataactcagtttcctacaggaaatgattattaaattctaatggtgtcttctgagacttgctagagaaacaagaacaagataagcatttttaaacaatgccaattacaaaagtattttgcaggttttctcaagtcttcctcatgattattatttttttctctttaatgtttatttttctagagtcaatctacagactaacctaaaatgtgttttattcctgccctgattctacctaagtaataaagtatccataaaactttaactcaagtcttggctcctaccattcataacattcaaactaaacagaaaataagtagtggcgtatctctaaattccagataatccacaccaaaatcagaattattcccttttgtgtgtgtgtgtgtgtgtatacatatctgtatttatacacgtgaaattatatttgcaatcaatttccctgctagtatttgttgcacctttggtgactttactatatcttgttgttctcagtttctttattattgataaggaaaatctactctgtcattgttaataatcatagcacattgtttctgccctattacttccatgtcctgaagtcccaaccaaatactaagaactctcctttaataaatgaacatatctgtctacagtgtacagtgtacaagattagggatcttgcagtcactttactttcaatttctcttatttaaattgtcactctaatccaaaaacttatctttgtctcttacccctccccaatccaattcctgccttttatcagactaagcttttcgcagtacagctaagaatacatatctttcttcctttttcctccccatctactgctcatgacccacataagagatgccttccccatgaagccccatctgttctctccatctcctttcaaattttgttttcatgtctgttgggtcaggcatcacattatatttattataataactttgctccacttatacctggtcccggcttaccaccttttctatcttgccccatttttccaggtcaataaccacatcttatttacctttatatctccaatacagaacttcttactttaaatattcataagaatcatctagggttcttgttgaaatgcagatttttgattcagcaggtctgggatggggcgggaactctgtatttctcggcatatccagctcccaaaggatactaatatgactgattcatggaccacagtctgactaggaaagtcctggtatattttgcataacattttgcacatggcaggtgttaactcacatgtaacagaggaaaagcaaaatatgaattaaaactacaatgagatcccactacacaccactaatatggctaaaattaaagactgacaacatcagatattgatgaggatgtctgagtgcctgaattcttataaactgttggtaggaatgtaagataatatgactacttggggaaaagatctagcagattttgtttttttgtaaaattaacatatacttaccccatgatctagcagttcttctcctaggtatttatcaaagaaagatgaaaacacatgttcacaaaaagatttgtacaagaatgttgacataaaccccctgtattagcctgttctcacactgctgtaaagaaatacctgacaccaggtaatttagaaagaaaagaggtataattggctcacagttctgcaggctgtatgggaagcatagcagcatctgcttctggggaagcctcaggaagcttttactcatgccagaaggcaacgcaggagcaggtgtcttacatggcagggaaagtaccaaaagagagagtagcggaggtgccacacatttttaaatgaccagaccttatgagaactcactaactatcaccagaacagcactaaatgggaaatctggctccataagccaatcatcttccaccaggccccatcaccaacattggggattacaattagacatgagatttgggcagggacacagatccaaaccatataattcagtccctggctccttcgaaatctcatatcctggtaatatttcaaaatacaatcatgccttcctaacaattgcccaaagttttaactcattccagcactaactcaaaagcccaatgtccaaagtctcatctgagacaagggtagtcccttccacctatgagcctgtaaaataaaaaacaagttagttacttgcaaaatacaatggggatataggcattgggtaaatactcctgttccaaaaggagaaattggcccaaaaaagggggtctacaggcccccatgcaagtctgaaaaccagcagggcagtcattaaatcttaaagctccaaaataatcttctttgacttcatttctcacatccagggaacactggtgaaaggggtgggcccccaaagmcttaggaagctcctcctttgtgactttgcagggttcagctcccacagctgctctgatgggctgtcactgagtgcctgtggcttttccaggtacatggtgcaagctgtttgtggctctaccattctggggtttggaggacagtggccatcctctcatagctccactaggcagtaccccaataaggactctgagtgggggctacaatcccacattttccctctgcattgccctaatagaggttctccctgagggctccatccctgcagcaggcttctgcctgcacattcacacttttccataattctctgaaatctaggtagtagagcctcaacttttgcactctgtgcacccacagacttaacaccacgtggatgccaccagtcttatggcttacaccctctgaagcagcagcctgagcartacccaggcccctttaagccacggctggggtagaagcagccaggatacagggagcagtatcccaaggctgcacagggcagtggggccctgggcctggcccaggaaaccattcttccctcctaygcctccaggtctgtgatgggacgggctgccataaaggtctctgaaatgccttcaaggcctttcctccattgccttggatattagcacttggctcctcttatgcaaatttctgcagcctgcttgaattcttcccctgaaaatgggtttttcctttttactatatagctaggctataaatttyccaacttttatgctctgcttcccttttaaaaataagttccaatttcaggtcatttctttgctcatgtatatgaacataagttgttagaagcagccaggtcacatcttgaacattttgctgctaacaaatttcttctgccagataccctaaatcatcattcgcaagttcaaagtttcacagatccctagtataggggaacaatgcagccaacctctttgctaatgcataacaaaagcgacatttgtttgagttcctaataagtttctcatctccatctgagactgctgcagcctggatttcattgtccatatcacatattactatcagcattttagtcacagcaatttaacaatactctaggaagtcccaaactttcccccrtcttcctatcttcttctgagccttctacattcttccaactcagttccaaagctgcttccatattttcagatatctttatcccaacccctggtaccatttttctgtattagtctgtactawgctgcttccatattttcagatatctttatcccaacccctgtaccatttttctgtattagtctgttcttgtactgctataaacaaatacctgacattgggtaatttataaaggaaagaggtttaattgactcactgctctacaatatatacaggaagcatggtggcatctacttctggggaggcctcagggagcttttactcatggcagaaggcaaagcctgaacagtcatcttacatggcaggaacaagaccaagagagagtagggggaggtgccacacacttttaagtgaccagatctcatgagaactcactcactcgcaatggaacagcaccaagtgggaaatctgcccctatgattcaatcacctcccaccagccctcacccccaacactggggattacaatttgacatgagatccaggccagggaacagatccaaaccatatcatgccacaaactgagaatatcccaggagtctattgactagcaaatggataaataagttgtggtatatccacaccgtgcaatgctggctactacttctataccatggaacactggctcaggttctcttgctgttgcagtcatgtaggataggacttcagtcatccgaaggtttgactgggattacagactcttcttccaaagggcttgctcatatggctgtttgcagaaggcctcagacttttgccacctagtcctctccatgtagctgcttggtgtccttatgacatggctgctggcctccaacatatgagagatgcaagagagcatactcctgtggcctagctggctgcaagctgcttctggtcctgccttgagtctttcttgattaatgttggaccaaagacttctaatgaaaatgtgtgaattactgatacacaacaacaacaacaacatgggtgaatctcaaaagcatgatgttgaatgaaacaaccagactcaagagagtacttactatacgatttaatttcttttatatgaagctatagaaggcaaaacaaatctatagtttgttaaaaggcaaaacagtggttrcttgaaaaccagagtaagcagagattatttggaagggccatgagggaacttcctagggggatgggatattctacatcttcataggactttaggttacataggtctatgcatttgtgaaaactcaaagaatagtacacttaagaattacacatttcattctttataaattttatttaaaacaaaaggaactctaaacaaatttttgactatcgttaatgatatgttgctgaaatgtttggaggtgaagagtactgatgtctgtagttgacagtgcattaaaaaataagaygtgcattaaaaataatatgaatggatggatggatgactagatatgtaggtaaaacaaatatagcaaatgtttattgtrgaatctgagtagcaggcatgtgggtgttcttcaacttttctgtatgctggaaatttttcataatacaatgtctaaaagaaaaaaacaacaacaatgaggagatactactgcctgtatctgtagccctgaccccagcttgggatagatgccattgatgtacatttggagaggcagtggcagatctctgctgctcaacccctgtgcagggaaaaagctgtgttcagacacactgagagcaattgtggcaaaggactggaaatactggctatgctggaccatcagttacttacagaggcttaagcctcctgaaggacacaaatcaacatggtctaaggttgccagtggcaactagagtagctaagagtatgaaagagatactccaagacttgaatttcaccattccaggccatacatgattcacaagtaccctaatgaaatgtcttgatagttaagatttaacatacatggacatagtttactagacatatctacaattctctatatcggtatctctagtaccttctgttataatttaattcatatttttttttgctgagttaatctgaaatggtaaccgtttttgttaatggaagacagacggaaactactgatgagttagtcactgcattattttctcctggaccatctgatggggtgtacacacgtcttcttactgggtctcaaagctggcttcatattaraatcacctgggaagcttttaaagcaatagagatgacagccaccctatggcaactcagcatggaggagtgtgcaggagggaggcctgggcaatggtacattaaaaattctctcctggtgattttaatatttgtcacataactaggtcttcgatttctaaaagttaaaacatcttcaaagggactgcaaggaaaataaagttttactttaaaaaatatgctattgagggcaaagtttcttaagttttgtaggtatctttttcttccacctcttagcaatacttatcaaagtgtgatgggtcaagaaatttacatttaagtagaacaaacatcagttttggatttccagtagtaagatttcactggcagaaattattaattattattgaatgttattgaaattgaagtgaaaatgctactagtaaatgaaaatgctaccagtttcccaaattctgatgtgtgtatgtctggccaccatagctggtttacattataggcaggctaagcatgtgcttagggcagacaacaaaatatgtttttagaaaaagcttcacatttgatatttcaaaagcagccttagagtaatcaaataaagaaaaaacaatcagtattgtgttggcgtttcttccacttattctacctattggaggtggggaggaaacatagcctttgcaaggattaatgtcatggaagatcttcaccagcctggacagggagtggaaggtgcttctgcaacggaagcataactattgctttctgctgcctctccttactgctttgctccccagcccaggtgtcaccacccagtcaatcagaaagtcaaagagtctgagggcagtggagggaggttgtgcctggcccagagggttttaagtgtgaactggattgagaacaacatgccgattgttctttgtttgctgagactggcttggtgccagcgcagaactggctggccctgagaagcttacagagcctagtgaccaggtgtggggaaccagcactggctgcgggggtgggggtagaagggagcacagaaggcactacttcatagatggttagaaacttcaccaaacttactgggtaggttccacaccaagttttatcttattagagaaagggacagaaaatggctaaaaagtcaggccagtaataatcaacacacaaaactgagggaagaaggtagagaggttgtcccactgaatcctaagtgtacaggcactcccccagaataggggttgagcctaaatgtcaaaactcttgttggtctttaggatgtttgacctgcaggaagtgaaaagggcagaaaaattaccagaccgagttttcaggaatgctgtggaataattctatcaatgtagcccccgactgtggtaacagagaatcaacctcccttgaaagcaggactttctgaaagggagaaaaaagtatttttgtctattattactatacactgagcaagtgaaacagtagacagccattggcttccctgatgtatttgtactggaaaaaaatttaaatatatataaaggaaaacatacttttcagaaatggacatgcacaaagctgtcatttgcagtatctcctggtggtgagtttggggaagaattttactttcttttgtgtacatttctagattgccttactcactttatatatgtatgtacatatgctaagaccatgtgtgtctttaaacccagaaaaagtaggaatctagttctgtagtaaaatagttttttaaattgcaaaatgtatactcttgcccacctatttaattaagggtrgatgtgtggatacattggcctttgagctggcattccctgtgtctatctctctggggaaaaggaatgaaaaattattaaaatgcacacttccttgttaacatgactggcagaataacgatcattttgatagtattttgtccatggaggctttgaaaaggacagagggagagatttctatctcaaggaaaacttccaatgccttcctgaggttacttaaaattcataaggccataaaaaaaaaaaacggggctgagacctcgcttctactattttgacaaattgccaaccagttttcttctcctggaaacaatgctatttaggtcccagttttagttctgcaaagatgccaggcagaactaggtcactatgatatgtatcagttagttaactcatcccagtttggctccagccattcatcatccgcctttgaccttttaccttgtttcagtcttcagtcactaggtcagagctgcaatgcatggaaatatcaagcaggatattgccaggaaaaaacaaacaaacaaacaaaaacaaaaacaaactaaaactctatgagtgagctgggactgctatcattgcctttattcccattttaaagatgaaaaaactgagaattggaaaagttatagaatttgccctttgttatgcagcagctccctgactttgccctggggctgcttgcaccttggtggggtcagtggatggctgatgacgctgtccgcattggcacaagctgcaggagctacactagctacagatttgcaaacaccctcccagccgaaatgccactccccggtcttagtgctaagaccacaggggcagcaatttactggggctcaagtggatgggtgccattcatgaacatcattgtattctaatgttaatcatataccttttattttaaattatataagaaatacataaatatagtcataatgtaagaaattaaggcaatatgaaagaattataggggccaagggaaaacttccactttgtcctctgaagtttygctgaaaaatcaactcacaaaaggcaggattaattggagaaaaggcatacaaatttattcgtgtgcacacagagggaaccacagagcgattaccactaacccctcaatggggtgcagcagcttaaacaccacctggaggttacagaaaaaatgggggctcagagcatgaccaaaaacaggttatggttgaaaatcaggtgatggtggcaggacagttatgggacaggacatacgacctcatccaccatgaaataaagaattcccgtggaaacttcaggggattgaaatacatctcatagaagagaaaaatctcagtactcatttgacctggggtctgcatgtaccctgtgccaacccactaagtcaacaaatccagacacgtgaatctgcgaagatagaaaatactcaggttgtaagactgctctgctgcttagaatgtttctaaagtaaccaagaagcctatacaaacatgcctcagaaagctgttcaaaggggtataaaataatctgatcacttcatcatgtccttgggaaaggaatgagtgtttcaaatttgctacctataactaagcaggtaattaaaacttcatatatgttgttcaaagacaaaattacaataaatttaaagaccttaattggcttttatttgtgattctagaattgggcgacatctcattctacaaagtggaatgtgttcagatgaactgagcagaggaggttggttttgtagacagaaaagggctgagaaaagcagaatcaaaagacaaaaagcaagttggttatttccaagctcctttccttgtaaaggttaaaacagaggggatttccttatcatgccagctaaaactggcttgtgtggagatttggctattatctctcactctcctgatttctcagaaggtcaggtagagaacttacttttggcttggtgacatggaacttcagcaggagtgactgcattttggtttggtctgttgaacctagtgcaggggctcaatctaaaccaacracctcatatgaagtttatttaataatgtaaaatgcaggtttaaatttgataatttccaaagtcctttttgactttttctttaatcattcataagctaaatacccctagaaataaccattccatacattacaccattcctggggsaaaaaatattttaggctcattccaggtacattctagaatattgagaaaaaaaaaagaagtgtgtgtgttgggggtgggggtggtatgaggagtgagataatagaagggtaaatttatgtcctaggttatattaatttcacgggccagggcccttgagcccctgaagtttcatggaaaaatcacttcatacaaggcagaataattggagaaaaatcataaaaatttatttaacatatacacacaggaaccttctgaatgaagacccaaaaatacacagaaaattgtccgatttttgcttaggttcaacaaagtacgagcagcaatggagaaatatgattggacaataagggtatgatctaatgctaatagatggagttgggaaaccccagcagggcctgcctgtctagactcatcttggcctctctgagcagcgttccttccttctgggtgtggcacagggccctctatggaatggaggtcttatgacctacagccaaataagggaggtcagaaaatttctttatgtccaacttttatacagaaaggcaaagggaaagttagagtaatattctaagattttgtggctggctttggggaaaagggattctggtttttatgactcaccttgagagaaagaaggtcagagaagaacttttatttctgatgccttcatttggggatattattttctgagcttcagtgtaatgtttcctgcttctgtatttgccagctgactccagccatcttcaaattayagatatagaagaaagggttaataaaatacgcatcacagagctcatagggtagttgaatttctggattgtttttttaaagcatgattcaagcatacaaagggtgagtgctgttttaaaatgtatttatatgtaacgtcccctgattccagaaaggattaggtgacataaactaaaagtaaaaatcagagaagaaagaaacacaagactgggacaaacgtcaatgaagaatgcctcgtgaagaattggtaatattgctctccatttctcccttgcggataaacacatattcaaatatagcatgggatatccagatgagtttaaaaatttcttctttgattaattctttctcaaagtattatctcattggatcatatcacacgagtttcactcagcttttttttttgaggataacaaacagcagtgtttccattttacaaggaaaataatacagacttgaagagattaactaatttgcctatagtcctgtaactagttgcagcaaaacttataattaagatcttcaagcaaacaaatgggcttcttaaaattatatataacctttcctgtaggcttttgaaaaataagataaatagcgactgaaggaaataaaaatatttcaccccaaagtatacttctttgacatacttcgaggtggggtggctgttcagagaccctgcaaacagaagtaaccctgcaargctgcctttcataggggacatttacatctgtagacaatctgcactgatgcagctaggttttgtctgaggcctttccttgtctaagaaagattaatgagagtcttactatctattctttctgaggactgatacctgtgaagttttatttatataacaagaccacctttgctagccaggcctcctctccttgccctcccataatgcattttgccaccagaatctgttttgccatgatccaagctgccattctttctgcaacctcaggatggcatacattcttaactccattggagggtggggtagtcactctgtggttttccttcatgtgcacattaacaaatttgtatgccttttctccaattcatctgagttgatttttttcagcaaaacttcagagggcaaaggggaggttttcctttggctcctactgttttgttgctgtgagcaggattccaaagctccactcttctggaagctgcagctaagggaacccaggacctgacaagccagcagaagggtaagagattcttacccatcaggctcccagcctctgtttrtctctctctggtggagcaaatggtaaaaagcactgtttctttttcacctgcaaggttttgattaataggagaaaaggacttgtgtgactagtcttggtgtagtcaagtacaactctgtgtactcatattgaatcccttttcttccagaaatcatcttttcctatgcctttgtttttctgggtgtagccaagtacaactctggtgtactttttggtatgcatattcatatttaatcccttttcttccagaaataatattttcctatgcctttgtttttctgtgctgttctgtcagaaagatgggtactggataaggtttcctcttgtcttgttttatgtccatgagagcttgacttgtgatgaagtgagagcacattctttttgtctccaccatctggggggcatgatcttcaagtcatgacaggtgaccattctaaaaatggctgggaacttgaggccagcacagtttctgttctgaacgtgtcaagttctcaggcgagtttgtcttaacaagtcccatcaccatgggacttttgttgtctcaaccttgttgcttgttagtctatggcaacaagagtgtttcgctatctgagactgtccctggtaatgaattttgggggagggggatttgggggattgcttcttctatgccttctctaggaaacaccactttgttccaagcctggcaaattataatacaccctgagctttccataaagaggcaaagactcctatgtttaaaaaaaaaaaaaaaaaggaaatttggagatcacttattctaaataattgacttctttgtacctgtaggaagaccaaattgaaagaaagacacataatagtatcatggttagccttagaaatttccttgactaaattaaagagcaaaaatctgacctgaaacaaagttaaaagcccttgtacattaaaactgcctgctttggaccctttgcaggattcacaatgaagtctagtccagcttgcagtgtgacagctaaaattccatgccttcattcctgcagccttggtttgattcctggtcagggaatcaatctcttttggtttgaagtttgtgtgacttttggcttttgggagtaggcatttattggtccttttctctttcatgggcagcttttgagtggggcatatggggcttttgggcatttgtgtgaaaatggtcagctgagacgctgagaccttaagagaatgcagccggacagatgtgggttgtaacacatttgtggctaataaaactcctttctttgagctgtctttgaggtggttctggatcttatgaggtgggagaatattttttgttttttgttttttttaaagttaaaagccagaaatatcagttgtttgtcatggttaaaatctgttagagatttaaaaggatttttttgaaaagatctccatggtcagaagtcagcttcattaaaagccaatattcaagctatatatacacatatacttttctaaaaaggccttcctgctttttaaggcccgtttggggagatttttttcagtcaactgaaacctcttttaaatatgtgcttggttcctctgttcttttcctttctcaagaattattttatttaattctcctccctatgctgtctttctctttactgtctttgataccacatgaaaagatctagaagggagtgctagtgactcaggccccttaagaaactcagaaaaaggtgccactcacccccttttgaagtcttctgttttccttgtggagtttcaggagtcacaggcaggttctctcagatctaaagctctgctctattttacattctgttacctgatctctttggccttggggatgccaagaattactttgtactctaagagagaacttgacctttatgtgtgcaatggctggtgggtcactggcaagaactacagtttgggaagttctgacagtgattgcaataaatggttgtcactacaggyggctatgtatttctttgtgtttagatgagaaaggtgcagtttgaacacttggagtctatgagagtgctcaccacagagggatgagactctcatgggagatgagcttgtcaaagtgggtcaaatgattctgggttgcccaccagcttaggggcaatgtctttgtaacaagaactgtctgcctagccctcatctcaagatgtgtgtctattttttggcacctggaattcaatggaaaagtggaacagagtttcgctctgtcaccatgctggagtgcagtggtgtgatctcggctcactgcaacctctgcctcccaggttcaagtgattgaggttcctacctcagcctcctgaatagctgggcctacaggagcgtgccaccatgccmagctaatttttgtatttttagtagagacagggtttcaccatgttggccaggatggtctcaatctcttgaccttgtgatccacctgcctcagcctcccaaagtgctgggattataggcatgagtcactatgccaggccggaatccttgatttttaaagatctagatatactttccagctgtgcctgcttttcacatatttaaatattaggtcccccataaaacctgcaatgcttttttggggcccaatttgttaatgagctttgccctgaggtcagtggtccagttgaagaatgaagacaaaatttaaaagccacctattcaaatagattggtctccaaaatatgactttctggtgtttagctggttattttgaaaaggtttctaaatttcctctaggcccatctgcatgtttccttatgaaatcctatgattttatgttaccttggcatttatttttaatcttcctctaacacacccaaactcctcgaaaaagctaaatcctctttctctgtgctttgagatgtaaatttgctaccacgtttaatctaaaactcagtgagggctttacctatgtgagaaagataaactttatccttttgcatttacaaaggtacagtttgaatccaaatgccttttaaactagtgagtttyaatggtctcatgactaaaattttaaagtcaaagctataaagtctttttttatgtttgtatttttatatatacgtgggtacacatctatgtttatatattgtcccaacttaatttataaataaatgagtgctcataaataactagcccaaaagtttatcaaatttacatgattttagtaatctttcataaataaagtgattttaaaagttattggtaaaatataaatgtcttcagaatttaatttagacttttttttttgcctggttctattggtcagacaggtgtatactgtctctaatagatgttttaaagtgataaaactgttgcttctctgacatttttaatctgtgagtttatgtttttggatttcagcctttagattttgaggtctaggcaagtgaccacggtgaggcctgggaacagggcctaatccctttctccctggctcagttgtgccttccggccttgctaggaggagttggatcctccaggcatagtcttcacatccctgtcccttgtcccaagatctgcatctggtacataattaaaattgcttatttcctagggttttcacaaaataaggttaccaaaataaaagataacattgtgattaatatgtgtaattaaaattgctagatatattaataaaataaacagttctgtatacaaagtacataagaaaagtaggaagtattttcggtttaaaaaaggttatataaggaggcaggaaaatgtgggtttcgttaaaggaaaagtaattttggttagtttagaggattttaaaagttgtcttaaattgaaggaataaaaataataatagataaaacttaatggggctgggtgcattggctcacgcctgtaatcccagcactttgggaggtcaaggtgggtggatcacctgaggttgggagttcaagacctgtctggccaatatggcaaaaccctgtctctactaaaaatacaaaattagccaagcgtggtggcgcatgcctgtaatcctagccactcggaggctgaggcaggagaattgcttgaacccaggaggctggggttgcagtgaacagagatcacgccattgcactccagccagggcaacaagagcaaaactccatcaaaaaaaaaaaaaaaaaaaaaaaaaaaaaaacctcaatggatacagaaagttggaaagaaagaaaatggggaaaattataagacgttaaaaagggtttatggaaatattattgtgtgtggtcaaagctgattgagattgcatgaatctgcttataaggttttattaaaattattgttagcattaataatacactgatgcaaaagtgaaatttgactttctttttagaacatgatttttgtgtaatattcataagagatagtaaaacattttttgtttacattttatataaactgcaaaaaaaaagggaagagagagattttgtttgcctctttatcgggtctttgtgtgtgtgtgtgtgtgtgtgtgtgtgwgwgagagagagagagagatggagtttcattcttgttgcccaggctggagtgcaatggtgcggtcttggctcactgcaacctccacctcctgggttcaagcgattctcctgcctcagcctcccaagtagctgagattacaggtgcccaccaccacacttggctgatttttttgtatttttagtagagacagggtttcaccatgttggccaggcttgtcttgtactcctgactaaggtgatctaccagccttgacctcccaaagtgctgagattacaggtgtgagccaccacaccttgcctatcaggtcttttaattgtttgaaaagctgagtctcctgtcactctatatgatttttgccttttgaaagctttgaattatcactttggctaattgaatgaatgttttttttcagtgacttgtgttcccattttgagcactttccaaaatcatatttcaaattccaaatttgatctttggcctaaaattaactttttgtatattagggatcctgaaagtccaagagagacttattaggctaatttagtatgttaaagtgatatggcaagcattgtcaaataagaaatggtgtttaacttgtataaataygttattaatgtgccccaaggttatatagattccctaaattcttacatgtcttaggatatgtcatcagtaataattatgattattacattaaatygttgtatgccactggaataaccaacttttcttattaattgtgtctttatagatatttctaagtattttgtcacccatagacaattattcttttactttttctcgaagaatggtttataattggctatagtcccaaatttccttcttcttcaaggaaatttttggaaagcatcctgaccagtatttaacactcttgaatacaggtttctggtaactttggagataacagtttaatctattccataacattggactagattaaaaacttccaggactctaattaaaaagctgatgtgttctgcctggtgcggtggcttacgcctataatcccagcactttgggaggccgaggcgggtgcatcatgaggtcaagagatcgagaccatcctggccaaaatggtgaaacagtctccactaaaaaaaaaaaaaaaaaaaaaaaaaaaaaaaaaagctgatgcgttcatgaggattgctaactcaacagcaatcaaagcaagtatgaattacatgggaatgaatagaggactgaaataattttttataactttgtttgaaacattgctgattctttttatgtttagttttccagagtcaagaaaactttttcttttgagctatttgtagcttacaacaatagggtaaagtatacttttgtgagcaaagttgaaatgtttatcttactctttacctgatttctccagaatttggaaactgttgggaaaagctgagcgttgggagaagctgaggcagggcttgcatgtctgacataatgtaaaagagtcttggaacatgtctggggtccagggtctaaaaccccttgtggcctttggaataccaaattctgtgctaaagggtggaaggctaccctcacccaccataatctaagcccagggcataaaatccctcrtggcttggatagaatccagggcttgtggctctggaacgggtctagacttgctggctccttgctccttgctctcccaggatcgactgtatcttgagttaaaagaacctgctctccgttacctcaagtagcagaacatgttccatataaatgctaaaccatcacagctgtagatcatacgcctgaccttttgtcctccacattctcaccacctgtttctttgttggattaccaataaatagcgtgggctcccagagctcagggccttcgtagcctccatgattgtgatggctcccctggtgtcccacctttctctctcaaactgtctttttctcaatccttttactccaccggactttgtcacccccacgacctggtgttgggtctgatcaccccaacaggaaactatttgtgagtatttttaatttatggcaacatagttacttgcataatttcaataagaatctgttttcttttgtaacagaatgtgattagagacactggttatttttccaagttttttactggaagggcatattttcaggtatgaccagactgctttgagattggaaagactgatatggtaccttgtctacatggttctcttataaggtttctttgaccttataagaggtaggtaggtaggtaaagaatgtcactttctgataggaccaggaacttcaagatcttgtgggacctcaagaataaaagaatttacccaattcatgtggatattacaagcacagtctgttggcaaactcttggcttgattttctagcctcaagccttttaaaagtctartcttagattcttcatgattttctccagcaaagccaacttaaaaacctacatagtcaatcactgtgtttgctgcattttatgcaaataatgaagccaaatacaataaaactaaaacttattttgcaaataaattggtcctactattccttacgcttggtagaaatggggaactggggagagaaaaaattatgtttgagaagaaaattacagtacacttgttattcgattgtagccttgttggtagttttttagtttttacaatttcctacaatttgggctgaacccttaattctttccttgttacaagtctccaaactaatgttttcacatttttcttctatttctctcacttggaatcactagaaatcaaacctgtccttttttttttttttggaaacagacaacttgaattaaactctagaagaaatcaccacagcaacttataaacagccttcatgcctgatgatgtatggactactcagaaagctcacttaaacacctaattcaaactacaaatgcagaaaaaatctgtcagatagcccctgccatctgaagatgctttagagcctctagaaaaaccagtgtgtagactgcttcagacattcacttttgtttttcttctatttccttagaaatacctcttactaaagatgtttgccatatatagaggcctagcccatttgcaatgccacctcctgaaatgggacacagctattcaattgacctgatctattctcaggtctaacaggttgattcaagaagatatgggatatgtttaaatttagtcttttttgcttatcaccatttgttttcttttcccttccttttcctctctatctaacaacatttaacccaaatctctccaaagttatcaactatatacaaaacattttaaagtttcaaagtaaggtgatatggtttggctgtgtccccacccaaatctcatcttgaattgtagctcccacaattcccatgtgtcatgagagggacctggtgggaagtgatcgaatcatgggggtgggtctttcctgtgctgttctcatgatagtgaataagtctcatgagatctgatggttttataaagagaagtttccctgcacaagttctctcttgtctgccactaygtaagatataaactttcaccttccaccatgattgtgaggcctccccagccacgtggaattgtgggtcaataaaacctctttttctttataaattaaccagtctcaagtataaattaaccagtctcaagtatgtctttatcagcagtgtgaaaacagacgaatacataaggactgaaggaaatctccctaaaatatttcatcctaaaatatacttatttgacatattttgagatggttggtcagaaagccaacaaacagaagtaaccctgcaaagctgtctttggtgggcggcatttgtatcagtagataatctgcatagatgcagccagcttttctctgaggccttcccctgtctggacctagaaaaaattacctgagagtctgattatcttaaaaggtctaaaagaaacatttaccatctattttctctaagagctttcacctgtgagttttattatataacaagaccacctttgctagctactcccatcttttccccctttcataacctgttttaccaccataatctgttttgccgcaatccaagtccccattctttctgcatcttcaagatggtgtatcggcttctgaatgcctttgggggggtaatcactctgtggtttgccccccacgtgcatgttaataaatttgtatgccttttctccaattaatctgacttttgtgggttattagcaattgtatacacttattartaaacacagtttctcttgcagagatttaatgaatatggggatgagaaattcaaagctttgtgtggagggtggtttaggcagtggggatgcagcaaaggttctgaggcataaatgagcttatcaaggtctctgagaagaagaaataagaacaagcaggctgggcgctgtggctgatgcctgtaattctagaactttgggagaccaagatgggcagatcacctgaggtcaggagtttgagaacagcctggccaacatggtgaaaccccatctctasttaaaatataaaaattagccgagtgtggtggcaggcacctgtagtcccagctactcaggaggctaggcaggagaatcacttgaacccaggaggtggaggttgcaataagctgagatgatgccactgcattccagcctgggtgacagagcgagaatctgtctcaaaaaacaaaaagaataagtagtaggccaggccaggttgttaaggatgatgtatatgagattgtgagttggagggaactgaggwctgggaaatacgcaactactcaggggtcagatcctgtgaggcaccatcagccacagtaaggacactggattaattctgaatatgagagaacatttgtagtgtctgagcaaatgagccacaggaaatgattttctaactcaaaagctccaactggctgctgagtgaagactagagagtaagaagtgggaaggaaagaaacagctagaaggtgagtagagtagsgttcgggaagaaggggggtggcctgaggcattgctggaggaggtaagaaacaagttgtggggcagctttgcaaacaggtgatgtcaggaatcaggctgtggctattaggaagtcaggggtttcttacagcccagcaagtaggcaggttctgtcagtaggcaggtaagtgatgtgagcagttatatgacaccggccagcaggtgtggcacacttaccagcaggtgggtcaaatctgcaaacaggtgagtcatgctggcaaggggaccagacacttctttaattagatggtatgggctgaattgtgtgtccctgcccccttaaagttcatatattgaagtcctcacccctagtacctcagaatatgactgcatttggagacagggcctttaaagaggtaatyaatttaaaatgaggccacagaggttggccccaatctgaccaacgtccttatcaaaagagatgaggacataaacatgcacagtggggtaaaccacatgaagatggagagaagatggccatccataagccaaggagagtgtccctcagaggaaacccactctgctgataccttgatattgttctgttaccagaaagtggggggaatcttcagtccttagtcattttgggagaaagatttcagcgaagaaacagttcaaagatagcagagagctttattgaagggaaatggagaggagagagtttatttaaagagacattacactctgaaagatgaggcagaatgggctcctgaaagagtgagtaggccagcagccccaagagctctacattgcagtttttattatgtggaaccctttcttgaagttcccagctctgctttaagtctctaccttttttctttgtctagtttgtccgctattgccttaagtccctgcctttcccccacctagttcccataccagggttgtgggattctcctttactgtcagttgatgtgcatgcgcagcccagtgttggctgcaaattttacctattggcagcactgctcattaccgtcacccccagaagatgggatagcagtcaaacctatacttattgcacctgagtatctcttaggaatttctcttttgccctctttcctccttatcagcatgtatctagctacattctgtcaggttaactgcagagcatactcttactgggcatcttaatgggagttccttcctgtataggtacttgccctcctctctgatcctgtgtagcatgtgtgtttcaggtggtctctggcatgtgagattttccagacctcccttttttcaaggggtcctcctgcctgcttgcatcaatctgcctattctaacagttcttcaacccttcagaattatgagaaaataaattgctattgtttaaagcctcccagtctctggtactttgttatggcagtcctagcaaactaacacagatggacaacttgtataaatctctgagaggtcctgcatgtgtctgagggctacagaagcagctgaaagaggttgctgagcatatgggggacttgggagagtgatatggaggtcatgggtggctaggagattctatgaaccagtgggtgaccagggcaaaaatccagggatgataacaagacagctcattgacacaaggatatctaagcactgacgatgagttatgtggagagaaaaggagaagacaggggatttgagtagtagcttagcaactccattgaatccctggagacyggaccatagtaggtgaccctggagagattctggacctctggttgagagcttaggaggatagttggaaaccatgatgctaagagtaatttgaggaattgggcctagaggttatttatgggcagtcagyaatgacaccactatcatccaaacaggaacagtgagaagccagtactctactagctcctagaaaagaggtcagaaatccacctccattttcactgaggccacaccttgtggctgagcatagattctgactttcccatctcaccaaatatattaatttaccaaatttcttgctccctaatctgtttctgggtctgcagaatctggtaggacacatcctgggtgtgagcaggcaacatagataagctgctccaaactgtgcttcctctagtcctataatgtcataataataattttttcccttttttcagcttttgggttttactataaagagttacactaattaaaactttccattttgtttgtatgtttttaccttcagaatgcactaacacaattacagtactgttaaccaattttgttcaccttctacaaaaggtgacttcaacagaagcagcctctgtttatctctgaaaaattatgtcactgaaacaagtagaccctttatttttaatgaatgtcaaaagagattataatgcttgggtttctgtaatctgcaggaaagatatttacatgtgtctaacaaaaccagttacacccaggtgccttaggttaagtaaatcagatggcatttatgccaggtcagaaatagggcagggcccagccggtttttcacatgacataaaagagggaaccggtatcttcagggatggaagctggccttaaaaagttcaaggaagttcaagtcaaatgtaaaattacctggaaattttggatataattataaaaactcatgctattttttatcctcctctataaattacctatattgttagaacatgtgagagtggggccctgaccccattggtatagccattaccagaatgataatgatagaatcattatcaagtctttagggtataaccattagcaagaccacagagtctggaagcagctttggagagaatttgacgcctttagggtataaccattagcaagaccacagagtctggaagcagctttggagagaatttgacactagatgtatttgtttttttctgatttttagtttgtgccttgatcggttaattccagtttcaagcctcaaggctggcctgtgcattggtgaatatgggctgtcaaagttggggggatggtaaaagttatgtagcacaattcctagaacctaccagacctgaatttgagtattcactctgctactcaccagcagaacaatcatgggccaatgtctcgagctatttgagctttcatttcctcatctgcaaaaagggccctgttaagtacatatctcttggggttactgtcgaatgaatgagaagctttaaagcaagtactcagcacagtatctgacacatgttaagtgttggggattactatcattatgaccagaaaaatttacctcaatttgaacaatagggtaaggccaagctctgggggaatgtatgtaatatccaatttagcagaacttaaattttctagcacttgcgggatattgtccatatcctctttgttcattcagtaggtgcctggttgcttaaagggtggacaaaattgttgaccatctaggtcagatgtgtggtgaagtcagcagctgatggcatcagaagagaagggctcccttcatccactgctcctgcatccactgcagggctcagtcctgacacttcccatagaaccctaggtgaacaccttaacctctgtgatttagaaataacatggatataaagggcatgcttatttacagaccagttgtgaaaaccaagtaagactctaatgtaaaagcattttgtaggctgcaaagcactcaacacattcaaagttcaattattattccagacttcctttccttacttaagcatttagtgacctcaaattgtccctggccaatctgaggctcttctctacctagtgcacagagccccatgtttcatgcaatagcttctccccttcatgcaagtgtccccatggtgtcctgtcagctgtactccaccatgtaacacaccaggataccaggttaccccttactacctaatctgatacttcccaaacatgcctgatcatgagacacccagtgcctgtgagaaatagaagtcctcagacaccacataagatttactagatccaaatcttcaaaggaggggcttgggacatttttaacaaaagccacaagtgattctgtaattcagcaggtttgggaaacagtaaactaatacatgcaaatgtgttggttaactaatatattactctatctggactcaacccaattaaaatgtatagctcttttaatatcttaagtgggctatactagttctggagatttcaagtaggatccaagggagggtttgtgaataaaaagaattcttttaatcacactattaggaagaatgtttattaaattctacatacatttttgtagtaccatagtttgagatataaatatccttgggggaaagctataggatgaccaatgattagaaacaacaaataacaattttaaaaaattgaaagaaattaagtccagaggtgagccactttagcaagaatctttaaatttgagaagaaatattatcttatttcactgattctaaaataggtttttttcacattttaatgtctctgaaatcagaatgtttcttaaagctgattagcaacaatttttttagtggtatataaaataataggatttcttaacaaagggtgtattctggattcagtgaaatactgaaacacaagacagtgacaattttctccaactctattgacacatcacaagtggtctatgcccttgcctgggtgcctcctgtgcatctctatttccacaagcctgcctacatttgaagctccagtgccaactgtgcatctcactggccacagcctgcccagctcacccaggctgcagggatgtctctcytcttcttacagctcttgctgtctgtagcacctattttctgtttctcttgcttagcatttatgctgctgctttgttgaccaaatattatttgttatcttatcatgttataaacatctttgaactctgaaactaaatggtaaacaccttgagcccagaaaagttgcctctatcttttgctttctcccagggtctaacacagggctcctacatggtaatattcaataaatattgatgatgatgccatttaggtagggtgatgacatatttcatcatccagaccaagatattttgaaggtgaaagggggcacaatgaatatttatggggcacaacaggcataaactaggactatcctgggcactttacatatagacgcctttctccctactacaytgtaaactttttgagggtagagataatgttttagtcatccctttttctacaatacaaaaagtatagtgctttgcacctcattaagtactaaatgaagtatgattccttccctgtctacaagataatatgattttaaccaaactttccagcctcaatcccaatgatctctcaaatattttccaggaaaattaaattattttcaagaactaacatacttctcttatcttggtgcctttgtcaatgctattgcctcagccagacattaatagtcacccaaagatgtctacatcctaatccccagattgtacaagttaccttaygtgataaaggggacctaccaggcataattaagtaagggtcttgagaaggggagatattatcttgcatcatctaggtaggcccaatgtgtaatcacgatgtggaatccttatcagggaaaaaggaggcaggtgagtcagaatcagagagggagagattagaagatgctttgcagataagagtatgaggccacaagtcgaggaatataggtggcctctagaggctggaaaaggcaacaaaatgaattctcttcaagaaatccagaaggaatgtagccctgctgacccattctcagcttctgacctccagaactggaagtaaaaaatttgtgttggtcaagccactaagtttgtggtagagcagtcataggaaactacttacaccatgctaatctgcaagaattaatcaaacaccagctcatcctgaatcmatttcctgacttcttgcagctgaatttaacctctgcctgatttaacctcttctccttttgggactcttttatagcaattacctcacttgatagtatagtgcaaacacatggtccctcttcttagcccttatttagatacaagtagtagaaaaccaattaaaagtagtttaagcagactggttggcggttccaacatgaccaaataggaacagctccagtctacagctcccagcgtgagcgacgcagaagatgggtgatttctgcatttccaactgaggtaccgggttcatctcactgaggcttgtcggacagtgggtgcaggacagtgggtgcagtgcaccgagcatgagctgaagcagggcgaggcatcgcctcatcagggaagtacaaggggtcagggaattccctttcatagccaagcaaggctgtgacagactgcaccttgaaaatygggtcactcccaccctaatactgcacttttctaatggtcttagcaaacggcacaagaggagattatatcctgcacctggcttggagggtcccacgcccacagagcctcactcattgctagcacagcagtctgagatggaactgcaaggcagcagcgagggtgggggaggggtgcccaccactgtgaggcttgagtaggtaaacaaagcagccaggaagctggaactgggtggagcccaccgcagctcaaggaggcctgcctgcctctgtagactccacctctgggggcagggcatagccaaacaaaaggcagcaaaaacctctgcagacttaaatgtccctgtctaacagctttgaagagagtagtggttctcccagcatgcagtttgagatctgagaatggacagactgcctcctcaagtggttccctgatgcctgagtaggctatcwgggaggcacccaccagtaggggcagactgacacctcacacggccgggtactcctctgagatgaaaccgccagaggaacgatcagacagcaacatttgctgttcagcaatattcrctgttctgcagcctccactgctgatacccaggcaaacagggtctggagtggacctccagcaaactccaacatacctgcagctgagggtcctgactgttaaagggaaaactaacaaacagaaaggacatccacaccaaaaccccatctgtacgtcaccatcatcaaagaccaaaggtagataaagccacaaagatggggaaaaaacagaacagaaaaactgaaaattctaaaaatcagagtgcctctcctcctccaaaggaatgcagctcctcaacagcaatggaccaaagctggacggagaataactttgacaagttgagagaagaaggcttcagatgatcaaacttctccgagctaaaggaggaagtacgaacccatcataaagaagttaaaaacactgaaaaaagattagatgaatggctaactagaataaccaatgcagagaagtccttaaaggacctgatggagctgaaaaccatggcacgagaactacatgatgaatgcacaagcttcagtagccgattcgatcaactggaagaaaggatatcagtgattgaagatcaaattaatgaaatgaagcaagaagagaagtttagagaaaaaagaataaaaagaaatgaacaaagcctccaagaaatatgggactaygtgaaaagaccaaatctatgtctaaytggttacctgaaagtgacrgggagaatggaaccaagttggaaaacactctgcaggatattatccaggagaacttccccaatctagcaaggcaggccaacattcaaattcaggaaatacagagaatgccaccaagatactcctcaagaagaacaactccgagacacatcattgtcaaattcaccaaagttgaaatgaaggaaaaaatgttaagggcagccagagagaaaggtcgggttactcacaaagggaagcccatcagactaacwgctaatctctcggcagaaactctacaagccagaagagagtgggggccaatattcaacattcttaaagaaaagaattttcaacccagaatttcatatccagccaaactaagcttcacaagtgaaggagaaataaaatcctttacagacaagcaaatgctgagagattttgtcaccaccaggcctgccctaaaagagctcctgaaggaagcactaaacatggaaaggaacaaccggtaccagccactacaaaaacatgccaaattttaaagcccattgatgctaggaagaaactgcatcaactaacgagcaaaataaccagctaacatcataatgacaggatcaaattcacacataacaatatgaaccttaaatgtaaatggaataaatgctccaattaaaagacacagactggcaaattggataaagagtcaagaaccatcagtgtgctctattcaggaaacccatctcwtgtgcagagacacacataggctcaaaataaaggatggaggaagatctaccaagcaaatgaaaaacaaaaaaaggcaggggttgcaatcctagtctctgataaaacagactttaaaccaacaaagatcaaaagagacaaagaaggccattacataatggtaaagggatcaattcaacaagaagagctaactatcctaaatatatatgcacccaatacaggagcacccagattcataaagcaagtccttacagacctaaaagagacttagactcccacacaataataatgggagactttaacaccccactgtcaacattagacagatcaacgagagagaaagttaacaaggatatccaggaatagaattcagctctgcaccaagcaggcctaatagacatctacagaactctccacaccaaatcaacagaatatacattcttctcagcaccacactgcacctattccaaaactgaccacatagttggaaggaaagcactcctcagcaaatgtaaaagaacagaaattataacaaactgtctctcaggccacagtgtaatcaaactagaactcaggattaagaaactcactcaaaaccactcaaccacatggaaactgcacaacctgctcctgaatgactactgggtacataacaaaatgaagacagaaataaagatgttctttgaaaccaatgagaacaaagacacaacataccagaatctctgggacacatttaaagcagtgtgtagagggaaatttatagcactaaatgcccacaacagaaagcaggaaagacataaaattgacaccctaacatcgcaattaaaagaactagagaagaaagagcagacacattcaaaagctagcagaaggcaagaaataactaagatcagagcagaactgaaggagatagagacacaaaaaacccttcaaaaaatcaatgaatccgggatctggttttttraaaagatcaacaaaattgatagaccactagcaagactaataaagaagaaaagagagaagaatcaaatagatgcaataaaaaatgataaaggggataccaccgccgatcccacagaaatacaaactaccatcagagaataatataaacacctctatgcaaataaactagagaatctagaagaaatggataaactcctcaacacatacaccctcccaagactaaaccaggaagaagttgaatctcttaatagaccaataacaggctctgaaattaaggcaataattaatagcttaccaaccaaaaaaagtccaggaccagacagactgacagccgaattctaccagaggtacaaggagtagctggtaccattccttctgaaactattccaatcaatagaaagagagggaatcctccctaactcattttatgaggccagcgtcatcctgataccaaagcctggaagagacacaagaataaaaagagaattttagaccaatatccctgatgaatatcaatgcaaaaatcctcaataaaatactggcaaaccgaatccagcagcacatcaaaaagcttatccaccatgatcaagtgggcttcatccctggcatgcaaggctggttcaacatatgaaaatctataaacgtaatccagcatattaacagaaccaaagacaaaaaccacatgattatctcaatagatgcagaaaaggccttccacaatattcaacagctcttcatgctaaaaatgctcaataaattaggtattgatgggaggtatctaaaaataataagagctatttatgacagacccacagccaatatcatactgaatgggcaaaaactggaagcattccctttgaaaactggcacaagacagggatgccctctctcaccactcctattcaacatagtgttggaagtcctggccaaggcaatcaggcaggagaaagaaataaagggtattcaattaggaaaagaggaagtcaaattgtctctgtttgcagatgacatgattgtatatctagaaaaccccattgtctcagcccaaaatccccttaagctgataagcaacttcagcaaagtctcaggatacaaaatcaatgtgcaaaaatcacaagcattttatacaccaataacagacaaacagagagccaaatcatgagtgaactcccattcacaattgcttcaaagagaataaaatacctagaattccagcttacaagggatgtgaaggacctcttcaaggcgarctacaaaccactgctcaatgaaataaaagaggatacaaacaaatggaagaacattccatgctcatggataggaagaatcaatattatgaaaatggccatactgcccaaggtaatttatagattcattgccatccccatcaagctaccaatgactttcttcacagaattggaaaaaactactttaaagttcatatggaaccaaaaaagagcccacattgccaagtcaatcctaagccaaaagaacaaagctggaggcatcacactacctgacttcaaactagactacaaggctacagtaaccaaaacagcatggcactggtaccaaaacagagatatagaccaatggaacagaacagagccctcagaaataataccacacatctaaaactatctgatctttgacaaacctgacaaaaacaagaaatgtggaaaggattccctatttaacaaatggtgctgggaaaactggccagccatatgtagaaagctgaaactggatcccttccttacaccctacacaaaaattaattcaaggtggacttaaatgttagtcctaaaaccattgaaaccctagatgaaaacctaggcaataccattcaggacataggcatgggcaaggacttcatgtctgaaacaccaaaagcaatggcaacaaaagccaaaattgacaaatgggatctaattaaactaaagaacttctgcacagcaaaagaaactaccatcagagtgaatgggcaacctacagaatgggagaaaatttttgcaatctactcatctgacaaagggctaatatccagaatctacaaagaactcaaacaaatttacaagaaaaaaacaaacaaccccatcagaaagtgggcaaaggatatgaacagacacttctcaaaagaagacatttacgcagccaacagacacatgaaaaaatgctcatcatcactggccatcagagaagtgcaaatcaaaaccacaatgagatgtcatctcacaccagttagaatggcgatcattaaaaagtcaggaaacaacaggtactggagaggatgtggaggaataggaacacttttacactgttggtgggactgtaaactagttcaaccattgtggaagacagtgtggcgattcctcagggatctagaactagaaataccatttgacccagccatcccataactaggtatatacccaaaggattataaatcatgttgctataaagacaaaagcacacatatgtttattgcagcactactcacaatagcaaagacttggatccaacccaaatgtccaacaatgatagactggattaagaaaatgtggcacatatacaccacagaatactatgcagccataaaaataatgagttcatgtcctttgtagggacatggatgaagctggaaaccatcattctcagcaaactatcgcaaggacaaaaaaccaaacaccgcatgttctcactcataggtgggaattgaacaatgagaacacttggacccaggaaggggaacatcacacaccagggcctgttgtggggtgggaggagaggggagggatagcattaggagatatacatratgtaaatgacgagttaatgggtgtagcacaccaacatggcacatgtatacatatgtaacaaacttgcacgttgtgcacatgtaccttagaacttaaagtataattaaaatatatatatatatttttaaaaagttaaaaaaatagtttaagcaaaaagataatttactgagtcatgtaaagtgaaaagtccaaggatggagcttcaggttaacttggacccacgtgctcaatgtcatcacgtgttggactccagctcttggctttgctttcttytcaggtagactttccctttacagtgacaatgatggccaccagcagcttcagtgattgctaaataggtagattatcaacaattgccaaataggtaagcttatactctacctatttagcaattgttgctgaaacagggactctttcccaattatttcaacaaaagtttcagaattgagtctttatggcctggactgaggcatgtccccatcactgaactaattcatgtggttaatggagtaaaattggctccaaaaggccaagtttgagtcaggcttagggtgaccaactcaccccgatttgcttgttgcttttctgattttaggattaaaaatcccatgtcccaggaacctcttccatttgggacaaaccaagatagctggcaccttaggagtctgccccgtggatgaggggaattaacagtcagccccatctgactcccatagtcaaagaatgaaggtgggtttgtctcttggaggaattgccagaaggaggaggaatgaatgctgggcaggcaaaagcaagagagtaatgtcctctccattcattttcttagattagaggcaccttgagggcaaggaattaatcttacttatttttgtatcttttgaaaaattgagcacattgctctccacataggaaagcctcaaaagaatttatactgattctttcacagctttattaaatatttgaaaaaattcctttagagtgaaggtctaacacaatagttcatggtggttaatacagaatcattttttaaaggagcacttaaaaatattttacaatcttaacttgattgagattattccaatataatcttactgaaaatggagtaggtgaaaagttttcaccaaaggaactttcaaaatcactaaaatgcaatgattcataaggtccttttcccctgttatatttaagataaaatctgtattacttaaacatctaatttatattaaaaagtgaaccttaaatactctccttgacattcaattatttagtttcagttgtgttgttgtttaattagaactgagcagtggacaggaattgtttttctttgggmagsgtgtggcttttgctctgaaaccttcttcctgtaacttctaacttctgaccttctcctggccagcaatgagttatacatcacaattaggagtataaaagagaaataattgtatagagagctatgtcttaaattttgaaaacaggataagatttttaaaatattttgtgttaatgaataaatgttcagtcttgagcgtagttcatgggagaaaaagaaactgcctttgacatgctgcttccaaatctgacattgccccatagaggcaaatgctctagttgtacttagtttttgtgtattgataaataatatttctatacatttatagggcagatgtgatattttgttacatgcattgaacgtgtaacaatccagtcaggrtatttagggtatccattacctcgagtatttatcatttctatgtgatgggaacatttcaagtcctgtcttctagctattttgaaatataaaatacatttaactatagtcaccctactctcctatcaaacattagaatatatttcttctatctaactgtatgtttgctcagtcatttctctgtggggtatattcatttgtaaataataagtttagactattgcctctaattcatttcaatctctaacataaaatgggtttaaaggctctctatatttccaaaatttatataaaattccctttgcaaaagctgagctgaaagaacattataaatgaatattattttgcctacctaaataaaacaacacttatgcctaaaaatcacattgtaaataagaaatttatgttactattatgttttcttttattatcattaaagttctacaatgaaactatagtgaactttgtggccggcttcccagcacccattccaactcatttccattgagaaaaaaagtaaagtttgggtgagacctcagtttaagatgtggactgcrttggtctacaggtaaccatatcctttgctggcttagatttggatatgtgacacaattctgtccaaagtgattaaaggagacagttgctgaagacttctaagagacagaagaaatctagacgtcatttctatcacccagtggaagtgaaaaatgaattacatggttcctgttgctgctggtagttatatttaccactaaaggaaccagaagtctactctgttaaaagccaagtgtaaagctgcaaagaactgagtacattatgaaatcgttgagttgctaactcaaccagtcctgaagtctgccttacctctggacttcttgttccacaagacgataaatatccttactataacaggattttgrttgtggttgaaatggtaaatatatagaggataacaaaagtttagggccaaaggtccttatgtgtcattttgtccctctgttcctgaccactttatcttacagagcaagagcccaggtggcatgagactccctaatttaacccagccacacaggcagtagcagtggataaagagagtcctctcctgatgcccatccagctgcyatcttcaccacacatctgacctagatggcattcagttttgtccaccctttaagcatacatatgcacctactgaatgaacaaacaggatatgcacaatacccccaaatgccacaaaatttaagttctgctaatcttaaatgttatgtcattggacattacctaaattcccccaaaacttggccttaccctgactattgttcaaattggggtacttttttggtcataatgataataatccccaaaacaacatgtgtcagatactgtgctgaatactctactcgctttcctcattcatttgatagtaagaggttggtattgtaacaagacgcgttttgcagatgaggaaatgaaagctcaaataggttgagacactggcccatgattgctctgctggtgagtgacagagtgagtattcaaaccaggttctagggtctgcaggttctagggattcagctacagacccactaccatcccctccagctctgaaagcccatggatctamkatgcccatattcaccaatgcacaggccaacctgagacttaaaactggaattaatttatcaaggcacaaactaataatcaacggaatacatctattgccaaatcatctccatggctgcttccagattgttggtaatagctatactgtaaggttcagaccaaggggaccaacgtcagaatttgttatctaaggtccagtactgcagtttactaatccaggtactggatttacagctaytaaatacttaacacttgaggatatcacatgtgattaayattcttaatttatttgtactttttatttgagctggagatacagtagtgaacaagaaagaaaatacctyctggagcctgcattttaacaagcgggacaattaaattcaatagtgatttagcaagtacttctataccaagttctgtttggcactacagataaaaagaaaaaagatgctatcctctcactgccaagtgtgcctggacaacccaactgttagcgaataattctacttctgtttggtaactgctctttatgttggaaagtttagttacattattctattaaataaccttccaattaaaagcaggagcacaatcccacatacgcgtctgtcaaagtaagcacccatttctcagctgtaactcattactggttccctgccgcaggcactgtgctgcttttaaccttacttgtaaactattacctaacttccccggtaaaggtgctcgcttatccagtaagacggacagacgtctatggtagatccacgtttcatttatcccaactcactggaactggctgaagcttctccagacttgtgccggaccttggtgcagccaaagttgctttctccgcggccacctaagctgccaggtgcacattaactaagtggcagaaggccatcggcttggcaattgcctgaggcctttccgggactcgctggtttttaggttccatgaagggcatccagatctaggatgatacgaaaagtgcgtggtgggagagtggaatcaacctctactcttaggtccgatacaacccctccaagcacctgtctaaccaatcggaaagaaagttacattcaacgctggttctagcatccaatccaaggacgtgtttcagactctgctgcccggtcccagccagccctgagctggcgccttagacgctcgcctggcagctgcgcacactcggagcgccccgagcggcgcagatagggacgttggggctgtgccccgcggcgcggcgcctgccactgcgcaggcgcctcaggaagagctcggcatcgcccctcttcctccaggtcccccttccccgcaacttcccacgagtgccaggtgccgcgagcgccgagttccgcgcattggaaagaagcgaccgcggcggctggtgagtacgcgcctcgcgcgctcggcgttctggggggcaatgtcaccccctctccagtcccctaggggctttgaaaatagagatggtgagaccagaccctatgacccactctcccccactacacgcacatcccctggggcgcggcggggacgtccacgaagggactcaaagagccagggaggtggcgggccgaggcggaggccaggaagggaagaggaaagaaaaattagcaggtgctggggaaggcaacctgtggtgttaagtgtgaagggagggaagtcagccgaacggtagtggaggaacctaaggtgggtctggggtaaaattgaggggagctggggcggggtcgccaggcttttggttttaaaggagaaccacccatggcatcgacatccgtctgtctgaatattagattagagtttatgttaattatagataatgatatttaagaactaatttcctggaaaacaagccaaccaaacaataaaaggtacatttaagtgcctttttaaagggctggattaaaagcacgtaaggacttaaaaacaatgcttccttttcttgtcacaaccaccctatgagatcatagcattcccattttacagatgacgaaagtcaggctcagagaagtgaagggacgcgtccaaccaagattgtacaactagtgacaggcagattcaggtttacaccagatctgactccagaagggctttgcttaatcaggcaatcttgtggacccaagtctgaaggaagatttgccaactactgtgaaatatcaactgctggtttcagtattatgagcttctatttcttcttttttcccctcagagattgtttcaatctgttttaaggaaattaagaggcctgctgcacttgtgcgtcttccccccacctccacttaaattagttacaggatataatttggaagacattttttttatggtctcaggtcttagatttatttatttattaattattattattataccttaagttttagggtacatgtgcacaatgtgcaggttagttacatatgtatatatgtgccatgctggtgcgctgcacccactaacccatcatctagcattaggtatatctcccaatgccatccctcccccttccccccaccccacaacagtccccagagtgtgatgttccccttcctgtgtccatgtgttctcattgttcaattcccacctatgagtgagaatatgcagtgtttggttttttgttcttgcgatagtttactgagaatggatttccaatttcatccatgtccctacaaaggacatgaactcatcattttttatggctgcatagtattccatggtgtatatgtgccacattttcttaatccagtctatcattgttggacatttggcttggttccaagtctttgctattgtgaataatgctgcaatgaacatatgtgtgcatgtgtctttatagcagcatgatttatagtcctttgggtatatacccagtaatgggatggctgggtcaaatggtatttctagttctagatccctgaggaatcgccacactgacttccacaatggttgaactagtttacagtcccaccaacagtgtaaaagtgttcctatttctccacatcctctccagcacctgttgtgtcctgactttttaatgattgccattctaactggtgtgagatgatatctcattgtggttttgatttgcacttctctgatggccagtgatggtgagcattttttcatgtgttttttggctgcataaatgtcttcttttgagaagtgtctgttcatgtccttcgcccactttttgatggggttgtttttttcttgtaaatttgtttgaattcattttagattctggatattagccctttttcagatgagtagattgtgaaaattttctcccattttgtaggttgcctgttcactctgatggtagtttcttttgctgtgcagaagctctttagtttaattagatcccatttgtcaattttggcttttgttgccgttgcttttggtgttttagacatgaagtccttgcccatgcctatgtcctgaatggtaatgcctaggttttcttctagggtttttatggttttaggtctaacgtttaagtctttaatccatcttgaattgattgttgtataaggtgtaaggaagggatccagtttcagctttctacatatggctagccagttttcccagcaccatttatgaaatagggaatactttccccattgcttgtttttctcaggtttatcaaagattagatagttgtagatatgcggcgttatttctgagggctctgttctgttccattgatctatatctctgttttggtaccagtaccatgctgttttggttactgtggacttgtagtatcgtttgaagtcaggtagtgtgatgcctccagctttgttcttttggctaaggattgacttggcgatgcgggctcttttttggttccatatgaactttaaagtagttttttccaattctgtgaagaaagtcattggtagcttgatggggatggcattgaatctataaataccttgggcattatggccattttcacgatattgattcttcctacccatgagcatggaatgttcttccatttgtttgtatcctcttttatttccttgagcagtggtttgtagttctccttgaagaggtccttcacatcccttgtaagttggattcctaggtattttattctctttgaagcaattgtgaatgggagttcactcatgatttggctgtttgtctgttgttgatgtataagaatgcttgtgatttttgcacattgattttgtatcctgagactttgctgaagttgcttatcagcttaaggagattctgggctgagacaatggggttttctagatatacaatcatgtcgtctgcaaacagggacaatttgacttaatttggaagaaattttgatgaaaggacaaggagtaatggaggtattttactatgtagaaagtaagataagtgtaagtgttttgaagctgctagaaaactttgtgtatgctagaaatttctgtgtattttacaaaattggagaataatttagaatcctacgatttttaagactaaggaatttttaaggagtatatttttttccttagactataagaaagcaactgataataatctaaagataactgccttatttatagtcatagaataaagtttttaaaggtgtatgagagtttcattgtattacagagcagatggcgtgctaatagtgacaaatatctttcaccatatcctgtaatggtttatactctcttggcttcacatgggctaggaatgccagtgagagttgactgcattccatccagggaagaacgtcttcccagagaaattagaaggtagtttgtcccctgaattgaagactaactcatacttccatttgttgtagggatatttggttgcagtccagagaggtctgctttttttcttctctttgacatctttttggtgtgaaaaattacagaatttctctcaatgttttatactgtaacagtttcattccctgcaaactttattttcattccttggaaactgcttgagaacttctcattgttggtttgtctgtagcttaacactccctattagaatgagacagaatgtggcagacatggatccggcactgctaataaaaggtgttctatcaggaagagttctgttaatagtttggagattattatcagacttgttaacttgctattactggacttgtaaacttattgaggacatgaaattagtaagaacacagtgaagcaactgattgctttctgagcccggctaatcactggactttagcttcatcataagcaaagtcatatgcaaggtcatcatatgcgaagagatgagactaaattattcctaatgtattttatagtttcacaataatattctgcctatcatagtacagtcttgttttttttcccaacatctttgtaactagaatgataaagggaaactaattttgagggcctattctgtaacctttacacatcctcattttacacacaaggaaacagaagccaagaaaagttggatctacccaagatcacccatctactaattgtgagttcaggttctgggacccttctgacttcagtctatagtctttccactttgtctgtactacttatcctgagaacaaggactgggacgcttggatcccagcagtgtgctgagggattactgagccacaggattaacagcatgtgttcctggagcatccttttaactcaagatttgaggaagaagcattttgatttgtgttttgtgggagaggacggacacaggtttttggtctgttttgcacatgggaagtggtataaaactttcacattaaaacactcaagtgtgtattttggagtataaaattcacttttttgaggtaaaatgagataaaaaatgtttcctgttttgtggcaggacatttcagattacaatttcacttccctctgctcttttttaaaaaataatattttattgagatataaatcacacaccattcaattcactcattttaagagtactgctttatggagctgtgcaactgtcatcacaatcaatttgaaaacattttcataaccccaaaaataaactttatacttactggcatttattacccatttcccccccaacccctggccctagatagttactatagttacttttagtctctatagatttgcctgttctagacattttatctaaatggaatcatataataagtgattttttgtgactgcgttcttacatttagcgtatttatccaggttataaaatgtgttagcacttccttcctttttgtgtcaaataatatttcattatatggatatattacattttatttatccattcataagttagtgcacattgagatgtttccacttgattcttacaaataatgctgctgtgaacatttgtgtacaagtttttgtgtggacatatgttttcatttctcttgagcacatacctaatagtagaattgctgggttatatggtagccctatgtttaaccctttgaagactgccagaatattttccaaagtggctgtaccatttcacatttccagtagcagtttataaaggtttcaatttctctatcaacacttgttgttatctattttatttactcatccttcggggtgtgaaatggtaccttattgtgggtttgattgcatttctctgatgactaatgctgttgagcatcttttcatgtgctaatttgtcatttgtgtcttctttggagaaatatctttttcagctcatgctcattttttgactggattatctgacttttattattgagttgtagcaattctttatatagtctagatacaaatctcttcagatatatgatttgcaaatattttcttccattctctgggttgtcttttcactttcttgatggtatcctttgaggcacgagactttttaattttgaagtccagtttatttctcttttttggtcacttgtgctcttggtgtggtatctaagaaggctctgttgaacccagggttacaaaaatgtactcccacatttactcctacattttcttttaagagttttacagttttagctattaatcta

SEQ ID NO: 96378 - DNA, 97909 bp, Homo sapiens
ctgttgagtaatgggccattccagtgggtctcctggagcctgatgggaggtggcgttgtcttcctggggttgagtcaaggcagagctctggcccatacctggttgtgctgcaggtcagccctgggactcgtgggctttgggccgaggggcagcccgcatcccgctggagattaccctatctctgagatcaagcgtcatagagggtgacctcctgagaagggaaggcccactgtcgagggacctttcctaggattttgttgctcaggctgcttggaatccattgtgtcacctccagggtgatggaggtttgggcccaagcaatggagagggcaccatgtgtctcctgattgttcaagtgtgtcggagatatgcggggtatggatggtggcccaccaaagaaagcatgtgactcaagctgtgatttccagtgcatgcttagagagggcgcctgtatgcgtgccccacatgcccggggtaggctatgcaactgccaggtctgcagtggcgcatggcatcttggccagccttcttggttggccatgacctggctaatgaccctggcctgtgcccagtgatcccagggaagccctggtgtcatgcagcggaggcctcttgggcagtggaggtgctcttaaagcctgcagcatggcacggcctgggcatttatcccaagcccaatgaactacctgccctgtccttccagggttcggtggcaggcagggccaagggtgccccgtgttggtgacaagtcagtatttcacatggctctcatcacatgtgtccgtggaagataagcaagtgtgaactggcacgtcctacctccttccctacatggaggtaactttggacacatgttctccacctctctcccagatggtgagaccggaggaagacttgcattgggcctgttgttcctgggccagtggccatcagcctgttgcccagcccctgatgcgctgaagctcgggcccttcctcgcgccctggtctcctgcactgagctgtggtgagcacatccgggtcctgctggatgcatgcacgaggtgattgatcccctcagttgggtcgatgatgagaaccttatattgttctgaagagaggtgatgacttaaaaatcatgctcaataggattacgctgaggcccagcctaggtgagaattttggaagaggatgctgggatcccgagatccctggcagggccactatattttgggctggagaacttgaggccctgaagggcatctcaggggggtccaaccctatctctgtgcccctccatgaggcagcccaggctccctgtgtgggcatggtgtccgggctctggttccctgggggtggggcatgttggtggctccttcctgagcctgctttctcccccatgtctttcagtgagctcttctgcccaggtgaggcccatggccttaagcggcataggtgagtgtatcctgttggggtcatgggccatgaatgaggcagcatggggccatttatggtcagccttcgggccactagggttttctcagggtgcgaccggggagggaatgtttctccagtagggtcacttccttgggaatctgaccctaggagcatgcatttcgtgaagccctgcaaaggtgatggtggtcccggcaggaaagggttccttcagcccaacatagagcagctcccagctgaaactcagcgggctggtcaggcctcgaggactgcccaggccacatgaggtgggcaacaggggctctggggcaacctgggggtcacgctggagttctccctctctggacagtggtgggtgattgggcccacgcagacaggccccggagattcaggactgcaccccatccatggccctgaatgggaccgaccctgttgagtaatgggccatctcagtggtacctccttgagcctggtagggggaggcactgtttcaatgcagttgaatcaaggctgagctctggctggtgcctggtggtgctgcaggcagccctgggggttgtggtctttgggacaaggggccagctcacgtccctctggggtctccccttccttgagattcagtggccgaaaggatgtcctcctgaggtgggaagtcctgctgtcgagggacctgttctgggaatttgccacacaggctgcttctgagccacggggtcacctccagggtggtagggtcttgatcccaaggaaaggagaggacaccatgtggtttcttattgaccaagtgggacctggctctgtgtgtgggaggtgtagggcaagatgaggacccaccagagaaagtacgtggccctggaggcccccaggctttgatttctggtgtgtgcttggagagggcaccagggtgggcacccaccatgcccagggtaggctctgcaatggccaggtctgcattggctcctggtgttagggccagactcgctggttggccatgagcaggttggttgccctcacccgtccccatagtcccagtgcggccctggggttgttcgggggagccggcccgagcagtggaggtgctgttggggcctgcagtagggcatcttgccccagcccagtgacccaccttccctgtctttccaaggtttggtggccagcagggccaatggtgccctgtgtctgtgatgagtcagtgttcttcatggattccatcacatgggtatcccctacccacattcccctcgctcatatgtgaggccctggttggacacatgtccttctcctgtcaccaccccagatggtgagcctggaggaagacttgtattgggaccctacaggccccaggccagtgtctgtcagcctggtgctcatcccccagtgcgctgaagctcagaccctccctggcaccctggtctcctgcactgagctgtggtgagcacatccaggttctgctggatgcatgcatggggagggccttgattgggtcaatgatgagaaccttatattgtcctgaagagaggtgatgacttaaaaatcatgctcaataggattacgctgaggcccaggctaggtgagaattttggaagggagcgctgggatgccaagatccccggcagggccactagccactgtattttatactgaagaacttgaggccccaaagggcatctcaggggtcctagccctgtctctgtgcccctccgtgaggcagcccaggctccctgtgttgacttggtgtccaggctctgcttcctggggatagggcatgttggcagctccttcctgagcccacgttctcccctgtgtcttctattgagctcttctgcccaggtggggcccatgcccttaagcagtataggtgagtgtatcctgttgcggtcatgggccataaatgaggcagtgtggggtcatcgagggtcagccttcaggccactagcgttttctccaggtgcccccggggagggaacattgctccagtagggtcacttccttgggaatctgaccctaggagcacgcatttcctgaagccctgcaaaggtgatggtggtccaggcaggaaagcgttccttcagcccaacatacagcagctcccagctgaaatttggtgggctcgtcaggccttgaggactgcccaggcttcatgatgggggacacagaagctctggggctccctggggctcacactggagttctccctccctgaagagtggtgggtgattgggcccacagtcaggtggcggagattcaaggaatgcccccacccctggccctgaatgggaccaactctgttgagtaatgggccatcttaatggcgcctccttgagcctgttgggggtgggttgctgtttcaataaggttgagtcaaagctgagctctgactgggcgcctggtggtactgcaggccggcccttccttgggccaagggggcagcttgtgtcccgctggtgtcatcccttccttgaggtccagtggtggaaagggtagcctcctatggtgggaaggcctgctgctcagggacctgtcctggaaatttgccatccaggctgcttctgagccatggggtcacctccagggtagtggggtcttgagtccaagaaaaggagaggacaccatgtggttcctgattggccaaggctccttggttggccaggagcaggttggttgccctggcccatgccccatggtcctggtgtggccctggggttgttcaggggagctggcccaggccgtgaaggtgctctcagggcctgcagtagagtgcagcccaggcatcttgccccagcccagtgacccacttaccctgtctttctaaggtttggtggccaggagggccaatggtgccttgtgcccatgttgggtcagtgttctgcatggatccccatcatatgggtattccctacccaccctccctgcactgatatgtgaggccctggttggacacatgtcctcctcctgtcccttcagatggtgagtctggaggaagacttgtgttggacccccacaggccccaggccagtgtccatcagcctggtgctaatcccccagtgctctggagtttggaccctccctggcaccctggtctcctgcactgagctgtggtgagcacatggatgcatgcttggggtgggggttgcccttggttgggtcaatgatgagaaccttatattgtcctgaagagcggtgatgacttaaaaatcatgctcaataggattacgctgaggcccagcctaggtgagaattttggaagaggacactgggctccccggaatggccactgtattttgcgctggacacctgcaggccctgagggccatctggaaggtccaaccctgtctctctgctcctccaggaggcagcccaggctccctgagggggcttggtgtcgggctcctgttccccggggttggggccggttggtggctccttcctgagcccccattctccccttgtgtctttcagtgagctcttccacccgggcgggcccccggcattgactggcataggtgagtggatcctgcttgtgtcatgggccatgaaccggtccatgtggggtcaccaagggtcagcctttgggataagagggtttcctcagggaaccaacctgaattcccatcagagaggtatgggttctccaggagggccgcttttttgggaattggacccaaggaggataacttccctgatctctgcaggagtgacggtggtccaggcaggaaagagttccttcagccccacccagcgcagcgttctgttgagactcagtgctcaggtcaggcctggaggatttctcaggccatctgagggggttagaggggagctctttgtccatggagtgtggtgcttgaatctgcccttggggttgggtcatggagattcaaggatggtgcctcacccatggccctgattggaattgtccattgagaaatacgccattccagtgggcctcctggagcctgatggggggtggtgtttttttccctggggttgagtcgttgatggggactcaccatagaaagcatgtggctctggaggcccccaggctttgatttccagtgcctgcttggagcgggcaccagggccggcacccaccatgcccaagggcaggctctgcgactgccaggtctgcattggctcctggcatcaggaccagcctccttggttggccatcagctgcttggttgccctggcccatgccccgtggtcctggtgtggccctggggtggttgagtggagctggcccaggcagtggaggtgctcttggggcctgcagtagggtgcagcccaggcatcttgcctgatcccagtgacctgcttgccctgtctttccaggattttgtggcagggagggccaagggtgccctgcatccgtgatgggtcagtgttccacgtggatcccattacgtgggtccatagaggatgagcatgcgtgagccagcgcccccttcccacttcttctcatggagctgtgaggccctgtgtggacagctgtcttcctcttgtcccaccaggtggtgagcccggaggaggacttgcgttcggcccgctggtcccagtgtgtccggaattggtgggttcttggtctcactgacttcaagaatgaagctgcggaccctcgckgtgagtgttacagctcttaaggtggcatgtctggagtttgttccttctgatgttcggatgtgttcggagtttcttccttctggtgggtttgtggtctcgctggcttcaggagtgaagctgcagaccttcgcggtgagtgttacagctcataaaagcagtgtggacccaaagagtgagcagtagcaagatttattgcaaagagtgaaagaacaaagcttccacagtttggaaggggacccaagtgggttgccactgctggctggggcagcctgcttttattctcttatctggccccacacacatcctgctgattggtagagctgagtgatctgttttgacagggcgctgattggtgcgtttacaatccctgagctagacacaaaggttctccatgtccccactagattagctagatacagagtgttgacacaaaggttctccaagtccccaccggagtagctagatacagagtgtctattggtgcattcacaaaccctgagcttgacacagagtgctgattggtgtgtttgcaaaccttgagccagatacagagcgcggattgktgtatttacagtccctgagctagacataaaggttctccaaggccccaccagagaagctagatacagagtgtcgattggtgcattcacaaaccctgagctagacacagggtgctgattggtgtgtttacaaaccttgagctagatacagagtgccraytggtgtatttacaatccctgagctagacataaaggttctccaaggccccaccagactcaggagcccagctgtcttcacccagtggatcccgcactggggctgcaggtggagctgcctgccagtcctgcgccatgcgcccgcactcctcagcccttgtgtggttgatgggactgggcaccgtggagcagggggcggcrctcgtcggggaggctctggctgcacaggagcccatggagggggtgggaggctcaggcatggcaggctgcaggtcccgagccctgccccgagggaaggcagctaaggcccggtgagaaatcaagtgcagcgccggtgggctggcactgctgggggacccagtataccctctgcagctgctggcccgggtgctaagcccctcattgcctggggccggcagggccggcccgctgctccgagtgtggggcccgccaagcccacacccacccggaactccagctggcccacaagcgccccgcgcagccccggttcccacttgcgcctctccctccacacctccctgcaagctgagggagcaggctccggccttggccagcccagaaaggggctcccacagtgcagcagtgggctgaagggctcctcaagtgccaccaaagtgggagcccaggcagaggaggcgccaagagcaagtgagggctgtgaggactgccagcacgctgtcacctttcatcaggacagtgtctgtcagccaggtgcacagcccttggtgtgctggagcttgggcttttcttggcagcctggtgtcctgcattgagcggtggtgagcttgtccaggtcccgctggttacctgcacggtgacgggggtgccctcggttaggttgatgatgagaaccttattttgtctcgaggagaggttatgtgatgggtgttgtggcagctctttgtatttcattttcttcagtgctttttgtgtgttctctttgtattttttaccgctttgtgtattttactttcacaaaggcagcagcaaatgttttattggtggtggtatttttcatttttatttacttcctaatttgatagtgttttagttggaatacacagtctcattgtagttgttcagaaatatgctttttttctgtacattatatgattgtgcataatttttgccagttttttttttaattggggactacagttgaatgcactgcctatctcctactttactgaaacagattgtatggaaatctaaagacgagaaagtagacaagcacagcagaggacatttattttgatataaccacagaaattcattgatatgaccttatcatattgatggtttttcaaagaaatataaaatctttcgataatggattgtctcagttgcgtttctccttatatcatgttttgccttcaatacaaattgcaatgcttagaaatttaaagaacaccttctgaagtggaagatctagctaaagaattagattggtattggctgaaatgttgcagtaatcacatgatagggttaatacaacatgagttacatgctgagtgctctaaggtagaaagtaggtaacaaggaataacaggtaggtaatgtaagtcgggagaaggaaactctaggacagaatcattagaaaaggcttgacgtcaacagcagtgtatagaatttacagtgtatagaatttacagtgcatagaatttacaataagtgcctttttttgtgctcatcaatgctcttgcttatattgtaggaggagttagttcccttgaagaaatatcaatacaaatttccaaattgcaatgcagagggaaaaaagaatgagaaagtaaaaaatatccaagaactctggaagcatttcaaaaagtgtaaaaatgcatagtgacaatgtcaggagaataaggagataaaggaaaagaaatatttgacacaacaatgacttgagcactttctaaaattaatgatggacagaaacccacatgttcaggaagctcagagagcactctgcagaataaaaatattttacaaatcgacacctttgcatttcatatttaaagtccagaaaatcatagactaagggaaaagcttgataggagcaataggaagaaaaccatcttacctatggagsaacaagaataaaaattgctttgaaattatcttcagaatccatgaaagcaagaagtgagtcagggtgaaatatttagtgttaaaagtaagaaacaaaaaaaagtaccaactttgaattttctgctcatcaaaattattcttcaaaagtgaaggagaaatactctctgagaccaacaaaaattgctagaacttcttgccactacaccaaccttttaataaacgtaacaagaaattcttcagaaaggataaaaatgacataggtcggaaaatctaatttacataaagaaatgaaaagcattggagaagaaatatatgaagaaaaattaaatatatatgtattttttgattcataattgatctttcaacaatttgttcaaaataataacaagattatatttggtgattataggttatggaaaagtgaaatgaatgacagcaatattataagtcatccggttccaagatggccgaataggaacagctccagtttacagctcccagtgtgagtgacgcagaagacagttgatttctgcatttccaactgacgtaccaggttcatctcactggggcttgttggacagtgggtgcagcccatggagtgtaagccgaagcaggacgaggcatcacctcacctgggaagtgcaagaggtcagggaattccctttcctagccaagggaagcgtgacagatggtacctggaaaattgggacactcccaccctaatactgtgcttttccaactgtcttagcaaacggcacaccaggagattatatcccgcgcctggcttggagggtcccacatccacggagccttgctcactgctagcacagtagtctgagatcaaactgcaaggcagcagtgaggctgggggaggggcatccaccattgctgaggcttgagtaggtaaacaaagcggctgggaagctcgaactgggtggagcccaccacagctcaaggaggcctgcctgcytccgtagactccacctctaggggcagggcatagcagaacaaaaggcaacagaaacttctgcagacttaaacatccctgacagctttgaagagagtagtggttctcccagyacagagtttcagatctgagaacagacaggctgcctccttaaatgggtccctgacccccaagtagcctaactgagagacacctcccagtaggggctgactgatacctcatacagctgggtgcccctctgagacgaagcttccagaggaaggatcaggcagcaacatttgccgttctgcaatatttgctgttttgcagcctccactggtgatacccaagcaaacagggtctggagtggacttccagcaaactccaacagacctgcagctgaggatcctgactgttagaaggaaaactaacaaagagaaaggacatccacaccaaaaccccatctgtacgtcaccatcatcaaagaccaaaggtagatgaaaccacaaagatggggagaaaccagagcagaaaaactgaaaattctaaaaatcagagcacctcttctcctccaaaggaatgcagctccctgccagcaatggaacaaagctggacggagaatgactttgacgagytgacagaagtaggcttcagatgatcgstaataacaaacttctctgagctaaaggatgaggttcaaacccatcgcaaagaagctraaaaccttgaaaaaagattagatgagtggctaactagaataaacagcatagagaagaccttaaatgacctgatggagctgaaaccatggcacragaactacgtcacacatgcacaagcttcagtagccgatttgatcaagtggaagaaagggtatcagtgattcaagatcraatgaatgaaatgaagcaagaagagaagtttagagaaaaaagagtaaaaagaaacaaagcctaaaaaagtaaaaaagtaaaacaaagtaaaaaagaaacatgggactatgtgaaaacaccaaatctacgtctgattggygtacttgaaagtgatggggagaatggaaccaagttggaaaacactctgcaggatattatccaggagaactcccccaacctaggaaggcaagccaacattcaagttcagaaaatacagagaatgccacaaagatactccttgagaagcgtaactccaagacacataattgacagatacaccaaagttgaaatgaaggaaaaaatattaagggaagccagagagaaaggtcaagttacccacaaagggaagcccatcaaactaacagcagatctctcagcagaaactctacaagccagaagagagtgggggccaatattcaacattcttaaatgaaagaattttcaacccagaatttcatatccagccaaactaagcttcataattgaaggagaaataaaatactttacagacaagtaaatgctgagagattttgtcaccaccaggcctgccctacaagagctcctgaaggaagcactaagcatggaaaggaacaaccrgtaccagccactgcaaaaacatgccaaattgtaaagatcactgatgctaggaagaaactgcgtcaactaacgagcaaaataaccagctaacatcacaatgacaggatcacattcacacataacaatattaaccttaaatgtaaatgggctaaattctccaattaaaagacacagactggcaaattggataaagagtyaagacccatcagtgtgctgtattcaggagacccatctcatgtgcagagacacacataggctccaaataaagggatggaggaagatctacyaagcaaatggaaaacaaaaaaaagcaggggttgcaatcctagtctctgatgaaacagactttaaaccaacaaagatcaaaagagacaaagaaggccattatgtaatagtaaaggggtcaattcaacaacaagagctaactatcctaaatatacatgcacccaatacaggagcacccagattcataaagtaagtccttacagacctacaaagagacttagactcccacacaataataatgggagactttaacaccccactgtcaacattagacagatcaacaagacagaaagttaacaaggatatccaggaattgaactcagctctacaccaagcagacctaatagacatctacagaactctccaccccaaatcaacagaatgtacattcttctcagcaccacatcgcacttattccaaaattgaccacatagttggaagtaaagcactcctcagcgaatgtaaaagaatagaaattataacaaactgtctctcagaccacagtgcaatcaaactagaactcaggattaagaaactcactcaaaaccactcaactacatggaaactgaaaaatctgctcctgaatgactactgggtacataatgaaatgaaggcagaaataaagatgttctttgaaaccaatgagaacaaagacacaacataccagaatctctgggacatatttaaagcagtgtgtagagagaaatttatagcactaaatgcccacaagagaaagcaggaaagatctaaaattgacaccctaacatcacaattaaaagaactagggaagcaagagccaacattttcaaaagctagcagaaggcaggaaataactaagattggagcagaactgaaggagayagagacacaaaaaacccttcaaaaaatcaatgaatccaggaactggttttttgaaaagataaacaaaattgatagaccrctagmaagactaataaagaagaaaagagagaagaatccaatagatgcaataaaaaatgataaaggggatatcaccaccaatcccacagaaatacaaactaccatcagagaatactataaacatctctatgcaaataaactagaaaatctagaagaaatggataaattcctggacacatacaccctcccaagactaaaccaggaagaaggtgaatctctgaatagaccaataacaggctctgaaattgaggcaataattaatagcctaccaaccaaagaaagtccaggaccagagggattcacagctgaattctgccagaggtacaaagaggagctggtaccatgccttccgaaactattccagtcagtagaaaaatagggaatcctctctaactcattttataaggccagcatcatcctgataccaaagcctggcagagacacaacaaaaaagagaattttagaccaatatccctgatgaacatcgatgcaaaaatcttcaataaaatactggcaaaccgaatccagcaacacatcaaaagctaatccaccacgatcaagttggcttcatccctgggmtgcaaggctggttcaacatacacaaatcaataaacataatccatcatataaacagaaccaaagacaaaaaccacatgattatctcaacagatgcagaaaaggcctcgacaaaattcaacagcgcttcatgctaaaaactctcactaaactaggtgttgatgggacgtatctcaaaataataagagctgtttatgacaaacccacagccaatgtcatactgaatgggcaaaaactggaagcattccctttgaaaactggcacaagacaggaatgccctctctcaccgctcctattcaacttagtgttggaagttctggccagggcaatcaggcaggagaaagaaataaagggtattcaattaggaaaagaggaagtcaaattgtccctgtttgcagatgacatgattgtatatttagaaaaccccatcgtctcagcccaaaatctccttaagctgataagcaacttcagcaaagtctcagaatacaaaatcaatgtgcaaaaatcacaagcattcctatacaccaataacagacaaacagagagtgaaatcatgagtgaactcccattcacaattgcttcaaagaataaaatacctaggaatccaacttacaagggatgtgaaggacctcttcaaggagaactacaaaccactgctcaacgaaataaaagaggacrcaaacaaatggaagaacattccatgctcatggataggaagaatcagtatcgtgaaaatggccatactgcccaaggtaatttatagattcaatgccatccccatcaagctaccaatgactttcttcacagaattggaaaaaactactttaaagttcatatggaaccgaaaaagagcctgcattgccaagtcaatcctaagccaaaaggacaaagctggaggcatcacactacctgacttcaaactatactacgaggctacagtaaccaaaacagcatggtactggtaccaaaacagagatatagaccagtggaacagaacagacccctcagaaataataccacatgtctamaaccatctgatctttgacaaacctgacaaaaataagaaatggggaaaggattccctatttaataaatggtgctgagaaaactggctagccatatgtaaaaagctgaaactggatcccttccttacaccttatacaaaaattaattcaagatggattaaagacytaaatgttagacctaaaaccataaaaaccctagaagaaaacctaggcaataccattcaggacataggcatgggcaaggacttcatgactaaaacaccaaaagcaatggcaacaaaagccaaaataaacaaatgggatctaattaaactaaagagtttctacacagcaaaagaaactaccatcagagtgaacaggcaacctacagaatgggagaaaatttttacaatctactcatctgacaaagggctgatatccagaatctagaaagaagttaaacaaatttacaagaaaaaaatcaaccccatcaacaagtgggcaaaggatatgaacagacacttctcaaaagaagacatttatgcagccaaagacacatgaaaaaatgctcatmatcactggccatcagagaaatgcgaatcaaagccacaatgagatcccatctcacaccagttagaatggcaatcattaaaaagtcaggaaacaacaggtgctggacaggatgtggagaaataggaatacttttacactgttggtgggayggtaaactagttccaccattgtagaagacagtgtggcaattcctcaaggatctagaactagaaataccatttgtcccagccatcccattactgggtacatacccaaaggattatatatcatgctactataaagacacatgcacatgtatgttcattgtggcactattcacagtagcaaagacttggaaccaactcaaatgtccatcaacgatagactggattaagaaaatgtggcacatatacaccatggaatactttgcagccataaaaatggatgagttcaagtcttttgtagggacatggatgaagctggaaaccatcattctcagcaaactatcgcaaggacaaaaaaccaaacactgcatgttctcactcataggtgggaattgaacggtgagaacacttggacacagggtggggaacatcacacacgagtggctgccgtggggtggggggaggggggagggatagcattaggagatatacctaatgtaaatgacgagttaacgggtgcagcacaccaacatggcacatgtatacatatgtaacaaacctgcacgttttgcacatgtaccctagaacttaaagtatgaaatatatatatatatatatatatatagtcatgagggagagaaaatactcttagttacttggactaacccacgaagtaggacagtataatttgaaaaaggacttggattagttgtaaacgtataatgtaatatccagcacagccactaaaaatgattttgaaaaaagcagtataatcaatatactaacagaagaaaaagcagaatcaggccagacatggtgactcatgtctgtaatcccagcactttgggatgctgaggcaggaagatcacttgagccccggagttcaagtccagcctggcaacgaataagagcccatctctaccctccaccccccccaaaaaaaaaaagaaaaagaaaaagaggccgggcacggtggcttactcctgtaatcccagcactttgggaggccgaggtgggtggatcgcgaggtcaggagatcaagaccatcctgcctaacacggtgaaaccccgtctctactaaaaatacaaaaaaaaaaaaaaaatagctgggcatggtggcgggcgcctgtagtcccagctactcaggaggctgaggcaggagaatggtgtgaacctgggaggcagagcttgcagtgagccgagattgcgccactgcactccagcctgggagacagccgcaagattctgtctcaaaaaaacaacaacaacaacaaaaaaaaacaaaaacaaaaacaaagaaaacgaaaagaaaaagcagaatctttttttttttttttttttttttttttttgagatggagttttggtcttgttgcccgggctggagtgcaatggcacgatttcagctcaccacaacctccacctcccaggttcaagcaattctccgggctcagcctcccgaatagctgggattacaggtgtgcaccaccatgcctggctaattttttgtatgaaaaagcagaatcttatacaatgctcaattaaaatcagggagaggagaaaaagagtagaataccaaaaaagtaacaaattacaaggttgatataaatagaaaacaatcacaaatactgagtatactaatctaagtatatcaataatcactttaaacatcgcttaaaagacagagattgtcagtggattaagaacaagacccaaatatatgttgtctatgagaaatgcactttaaatagctgggcatggtggtgtgcacctgcagtccttaggaggccaaggcggagtgtcacctgagcccaggattttgggactacagtgagctatgatcatgccactgcactctagcctggttgacagaataagacctcatctctatagaaaaaagtaagtaaatctactttataaaggcacaaatatattcacagtaaaggaatagagaaagatatcccatgctaacattaatcaaaataaagtgaaatagccatattaatttcagacacaaccgactttagaacaaggaatattatcagagatcaaaagggacattccttaatgataaagggatcagttttctaagaagacataacaatccttaatgtgtacgcactgaacagcagatcatcaaagtacatgaagctaaatctgatagaactgcatagagaaatagataaattcactcttagagttggaggcattggcatccctctatcagaaatggacaggtttagcaagcagaaaatcagtaagggcataacatgatcaatcatgatcaaaaacttgattcagtcaactatatgtaactgacatctatggaccactttacccaacaacagcagatgacacattttctcacacacacatgaaacattcagcagaatagaccacattctgggctagaaaatgcacctcaacaaatttaaaagaatagaaatcatacaaagtatgttctcagactacaatggaatgaaagtaaacaaaaatcactaaaaaagatagctgaaaaacatgaaaatacttggaggttaaacaacagactgaaataactgaaggtcacagaagtctcaagataaatttttaaaatatttcaaactaaatggaattgaaagcacaacttatcaaaaatttaggaacgcaacaaaggcaktgcctactgggaaatttataccactgaatgtatgttaaaaagaacaaagatctaaataaataatccttcccattggaaagctagggggaaaattcaaattaaattcaaagtaagcaagtaaaasaaataataaaatatgaatacaattctgagtggcctgatatctgatttctggaagctgagttttatgtggctttagaagtttcatgttatgagtgtgaaatggcaagtgaccatggcgattgcttctgatatggccacctcaattacatagagaagggatgatcagtggcatcatcccagttctgcatgataccacaccagtgattctccaaagtcaagaaacctgtatatgttgtccttgtgtttggtgaatctgtggtctatagactacataatgggctatttctggggtactgaccattttgctccattaaggaaaaccatgcatgagccatataactatgggaaacaatgttttcctttttgacacctggcctactctcttcttaggtgagagcaaaggaagagcaccacttggcctgctgcacccagggcaatttataccatccagatatccagcactgaatatgtagcaactccaatccaccatagaacattaatctatctctgataagcatgctaatatctatgattctgcctttgtggggagatgactccatagattaaccccctggcttggggcaatatggagatgttatattgtcttcgacagggaagatgacataaaaattatgttcaataggattatgtggagacttaacataagtgacaaacctragacaagaagttagaaatccttgtttcttttaggtgaataattttggagcttgagaaaaagacaccatygtggcgaacttgctttgccaaaccctgtgtatgcatttttgggtaaacaacacattttcatcctttaagcattgtttccattatttataattcctaatagtatgagacatttaggactcattccttggttcttcttctctcattgtatctttcattgtatctttcagtgctgcaagagatgcaatcatcccattaatgaaagcagagtgactgccttcgtcacacatacattcaaaatagatcactaggctagtgatgattctctcttaaggctattatgtttactcatttaaaaaatctggatctcagtatagattttcttctcagtgagtgactgacctatctgatatgatgctatgacaaaatctttactttttacctgaatttggtgggattgaaagttgagaacatattaatttattttctgtttcacttgattaataatgcccaatctaacatgcagtgttcacttgggtacatatatacaactacatcaaattttttcttgttttaccttaaaagtgttaagatattgtaatggtatggccagtttactcactggtaaacttttcataacagaaatatcatgccagtggacacaaatatgtaacatcagtaatttgctttcctcatgaaacagagaactgaataagttgatgggtaaactagtatctgaattataaaccccaaatatcatgtgacttcatcattttcagtataatgaaaatacaggctgtgaatgcttccagttggtcctgaaagggcctttgaggtgagtaggttcaccaaagcggcaacatatgtgtcccagtgggcattctactcctcagtaagtgacttgacattctttatggcttcctcatgattaaaacaagtctttttattgaaattttactgaaataatgatgaaacaatgtaatattcttttcatctacatataagagtagacatagattaacctctaccttttttttttttttttttgagacggagtctcgctctgttgcccaggctagagtacagtggtgcgatctcagctcattgcaacctctgcctcccaggttcaagcgattctcctgcctcagcctcctgagtagctgggattacaggcacgtgctaccattcctggctaatttttttgtaattttagtagagacatggtttcaccatgttggtcaggctgttcttgaactcctgaccttgtgatctgcccacctctgcctcccaaagtgctgggattacaggcttgagcccccgtgcctggccttcacctctacctattataatattttcatgttattccattttgtcatgtttgtgggtcatttgatgagggttcacaatatgaaaactgggcattttggccaagatgcatgtaaatgaatacaactccatgtgccctgataactgatttctagatcctgagatgcaagtggcttccagagtgtctgtattttatgaaagttcatatacagtaaaccatgctaattgttactgatacagcttccttgaatatataaagcgatgattaatgggatgttttgtttctgcagaaaaccactgaattgcttctccaaagccaagtgacctgtatgatttgtccttattatattttgtgaaccagtggactaaaacctttataatgggtcatttttttagtattgtcaatattgctcaattaacaaacatgactcatatacacaggtgagatgtagttctccctttgacatttgctctacatctgtcccttagatgatgatatggaagaaaagcactctttggcctgttgtgactgggacagttgacagcacccaggtgtcctttaatgaaaatgctcttgacaccaatgcatcctagcatcacagcttcaggaagccttctcaagtgtgcatggggagtactatgtctttcatcaataatgaaatcttctgatttggtgagaaataatgccttaaaattacactcaataggattatgctgaggctcagcctacctagatgaaaatgctgaaacagataatagtgacttcttatttcccttcaaggggaattttattttgaacttgaaataacaaaatctttatgggtaacttgtttgcccaactgtatcagtgcacctataaatgaacaaaaaattctcagcctataagctttgcttcagtgacctttaatttctaatagtaaggtatattcaggtctcattctttggctttttctcttattgtgtatttcagtaagacatgctgccaagagatgtgccattctattataaaagatcagtagcttcctttaccgacgtgtatattctatctagaacattgagctatggaagactcccacctaagggaattagttttacaccttcaggtaatctgaacttcaatatgagttttgctttatgatataatccttatgacaaaatctttactttttatctgaacttcatacaatcaatattgaagattttttaaattcactgttacctagtccaatatttaatatacatttggctgtagatacatgactagacaaaaattttttatattattattgtgggggctctaacagtgtttcactgttttgagttactgatgaactttctgtaactgtgagaccatggtaatggaagagaccgtggtaatggggaggagaatgtgaggatcagtatgtactttgcctataaaacttaaatatttagtaatttgatcaccaaattgatactcaaatttcagttcctatcatgtgtaaaccaaaaagtatctgagatttagaagtttatttagaagtggattttgccaaggttaagcacatgctcagaagaaataaacccaaaatcacagaaaccgtctggggtctatgtctttctccaaagatgattttgagggcttcagtgtttaaaggggaaaagtgggctggagggggaaaagggagggtatgataatccgtatgttccaagacaaaaggagcaggtaggggtatagtcaataatgtattcatctcatgctcagtaaatcagcactttacataagataaggtgaacatagagaagctacctgtggagatctttaacctttaatctgtagctatctgcttaagatcaaaaggaaattcttgcatgactcagctttcagcttattttttttttctcttggcgtagtaaattggggtcccaagtttattttcctttcacacatgtgaccccactattttcagaataatgaaagcacatgttagaaatgatgacacttattcctaatatggactttgaaatgactgggttcacaaatttagaatcatggatctcattataggtttttattttcaatgagtgactggcctacttgatggaattctttcaaaaaatgttcactttttactgagattatattaaaataatgttggaatgtgttcagtcatgtttaccatctctatagtatgatatatgataatatcgcagattactcagtgtcaaaaacctggcataccttgtccttatgatgttgatgagtcaatggtctagagccttagtaatatgtctttttgtggtagtacggaccgtatctgtccactaagaaatagcctgtgtaagccatatacacatgaacaatttatgtctgattttgaactatggtcccattcctatgcctgtagataaagactgctgagaagagcaccctctggtgttgtcacagaggcaagtgctaccgcacaggcatgctgcagtgaatttaactgatcctctgtccctgcaaccgttgtttaaggatgctattctggtaagggtttacaagacaacgtaaatatatgtataaagagtatcttcaggagacgtaataatgtaaaaatcatgctcaatagaattaagctgaggctcaaaatagtgccaatccttgcaagaaggtgtgagaagtcattaratttggggggtatgggttattccattttgaacttggtaggaagaaacccttgggggaatcttacatcatttgcctctacctacttctaaaggaacttttaaaattcttttatcttgtctttattcttaatactcatacattattagagagaatatcttggtttattttttcctcatggtgtgcttcagaatgttcatccagcaagaggtgtgtcattacacggattatatatatgagttctgtctttcgtaattaaaaaatttcaagtggaccatttgaatattaaacattggccttcaaaatgattacatttacctgttcatacaaaattagtgagcaatgatctattctttccaatgagtgactgatctaatgaggtcctcattaaaactccttttttttttttttttttttttgcctgaacgtactttgatttaaagatgtgacatttagtaattcattgcaatcaactctttagtgattgcacaaatagacaatccttttctattattttattttttggttgctgtgtatggtgttatgatgtttgtggatcattgaggcactactcacaactgaaagactttggcaattttagggaatggcttgagattcagctataggttacccttgattgaaattgaatacaatacaggtagtctgaaatctcatttccttatcctgagtctcactcaggtgtcattagattcattataaagaaatgcatacactatgtatgatgccagttgttactgatatgaagacgataagaagcttttatttctgcagggaaataatcccttaccaggtcatcaaaagacatgatacctatgtgcttggcccttactgtacacggggaatcagtggtctaccacagcttaagtaacgggtcatatttggagtatcacacatctcagtcttgtagaaattaggaacagcaattaggagtcatgcacatataagagatgtaatcccaccctttgactatagcctactcttgtcttttacagaaaagactgtggaggaagaaaaccctttaccctgttgttcagggagaaactgacaccactcaactgcctggcactgaaaatgtggcatccagtccactttaccatcagtgtttaaggaaaccatctctggtaagcatatttgatccaagtgtgcatatgcacatgagtgccatgggctgggtcaatgatgagatgttaccttgaagagaaatgatgacgtaaaaattaagttcagttggattacgctgaggcccagcctaggtaacaattgtgagacaagaagtttggatttcttagtttccttccattggggactttattttgggattctggcaatggaatcttattgcgaaacttgttttgcacgcttctatctgtgtgcttctaagtaaactataaattctgattctttaagtgctatttaagtttcctacaattcctaattttcttggatatttggcactaagacccttgctctttttctctcattggatgatttagtaagtcctactggcactattctattgagtggaggtgagaggctgcctttgctgactgaaaaatttcaaatagataattgaactagtgaagactgagctctataataattagatttattcattcagacaacatgaatatcacgatagggttttcttctcaatgattgactgacacatgtgatgcaatcctcatgagaaaatccttacttttgccctacgattgattgttttcagggttgagaaatatgatacattggaattttgctcaatgcgctacagttatcgtggtctaaatatacagacaaaattttctgtaatgttagtataatattttaacagtgctaggatatgttttgatcattaatgaatctttatgacttaagggtccttgcaattgggataaaaatgtgagtttcaataatatgtgtttgcccatgaaacttgaaattagataaattgatgagcaatctggtgcctgacttttctttctcaagtacctttggcttcgttttcattatgatgaaagtgtgtgctgtgaataatgccaatggtaaataagacctttatggacacttatatgaatgacagtcagggccgttccttcaggccacatgattatcgttatgcattcttcttctcaatgagtgactagcatacttgccaggatctacaagagggaaactttattttttactaaaattgcatcgatataatgttgacaagttttgtgattattggtatcatctctaagatgtgatgctcatttggtctaaatatagaagttaacatattaacttctaatttatatatgtcaggttgctatgtttttacaatgtttgtggtttattgatgatgactcacaacataaagactatggcattatggctacatgttctaattctgatatatacatatcccatcattcattaaattaaatacaattatgagtagtatgatgtctgttttctaaaatctgagtttcacctggctccagtatgatcattatatgatggagtgcaagcaacatgttaatgccaattgttattgatatggcttccttgaatatgtaaacaagactgatcaattgaaggtcttatttctgcattaaactacctgagatattctccaaattcaagagacctgtatagttagtctttattctgtttgatgaataaatggcctatagcctatctaatggatcagtttttccagtactaatcatatctcttcattaagaaatagcatgcataagccatacatacaggaggtaatatttgtcatcttgatctactgtcttatcctcctccccttagataaggatgactgaggaagagtactctttggcttgttgacaccagcacagctgacacacccagatatctgtttggtctcctgtgaactttcaaccaggatttaaggatgccactctggtaggtattttcagacaaagtgaatatgtgattgtagagttccatggcttgtttcaacaataagaccttatgttgtcttgaggacatgagatgacatgaaaactagactggctggtccttatcttttctggggtattctagtttgagcttaagataaagaaatatatttgggatatagtttctctcacctgtttctattagcttctagaagaccacttatcaattctttcctcctgatttagtggaaaacattttggcagttcctcaaaaagttaaagataaaattaccatgtaacccaacaattctgctcctaagtacacactcaaaagaattgaatacaaatgttcaaatgaatacatacacatgaatgttcatagcagcactattcactggctggagttccagaccagcctggccaacgtggcaagaccctgtctctactaaaaatagaaaaattagctgggcatggttgctcacgcttgtagtctcagctactcaggaggctgaggcacaagaatcacttgaacccaggaggcagaggctgcagtgagctgagatcacaccattgcactccagcatgggtgacaagtgagattctgtctcaaaaaaaaaaaagtgaaggtatgatgacaatgtcacacaaaatagtgaataccaataaaaagatagaaattattaaaaagaaccaartgaaaattctggagttgaaaagtacaataactaaaatttaaaaatttattagaaaggctcaatagtagatttgaactgggagaagaaacaagaagtaaacttgaagatagaacaatagagattatgttcaaaagaacagaaagcataaagaataaagaaacaaagagagtctcagagaatgtggaacatcattaagcataccagcatacacatatgggagtaccagacaggcaggggagatacaaaggatcagaaaaaaatatttgaaggaataatggctgaaacctcccatatttgtggaaaacaataactgacatatccaggaagctcaatgaattccaatgaataaatgcaaagattgacaaatggaaacatcacagtaagatatctgaaagtcaaaaacaagaagaaagtcttgaaagcagtgtgagaaaaatgatttgttacttacaagggaaccccaggaagattaacagctgacttcagcagaagcaatggaggccagaagcaaaggcataacatattaaaaatgctcaaagaaaaaagaacctgtcacctaagaattctgtacctggcaaagctgtctttcaaaaatgaaggcaaaataaagacttcctcaattaaaaaaaaaaaagttggagaatctactgctctcaaaacccccttaaaagagttctctaaatacttaaagaagttattcaagctgaaagcaagtgagcctaggtagttatkcaaatcaacaactacaaagcaaatgcttgtaaaggtaattatataaatataaaagacagtagaaatgtaatttttctctgaagtgattttaaaataaattctataaaataatatgtatataatgtattttggggtctataacatataaaagtgtaatatatttgccaaagaagataggtggatgcaaagcaatacaagactaaggaaatgactacagatggtagattaatatttattataatgtctttcttggcttatagcatcaataaatgtaatatgtataataataccacaaaagatggcaaaaagggaatagagctatataggtgtaacatttctgtataagactgaaattaagctagtgtaaattagaaacttatttgggtgagttaagatatatgcagtaaaccctagagcaaccactgaaaaaattcaaaacatatagtgaaaaaaattattaaggaagtttaaatgctacattataaaataattacttaatgaaaaagaagtaaagaggaatagaggaacaaaaacacatgagacacagaggagaagaagaatgacataataaactcaactaaataataaaattacatgtgaatacagtaaatatgtaaattaaaaggcagagattcccaggctggataaaatctccaggtttaatatccctttgccccaaataaactccagctttttttcctatgatgtatttgatcattgtgctggtttacaaaagatttctaacctttctaaaatctttaaaatcagcggcgaagtgttctatctcatttcacccatatatatcagagactcaaatcctgaaaaataccaagttgacctgcccattcttgagttctrctgaatggtgtgttcccagatcactatggatattgctgtttacttgaccaattacttttagtcaacaagatttgaacaatgcttttgattcacacagcgtgagacctagacttccctcatattgaaataggagcattagcatcctggattcctgcaccggcttttgaaccttatgtttcctgcaccccaagaagccatgttatctggacattgtcctctctgtgatgggaaagaasagttttttcaacaaatgttgctaggacaactggatatctagatacaaaagatactgcatttatgttaccagttttctgtgtcagtccattttgctctgatgtaacagaatactgcagactgggtatttgtaatgagtggaaacttattggctcacatttctggaggctggaaagatcaaggggctggcatatgataagggccttctcactctgtcatcctatggtagaagggcaaagagagggtatggatgggacaaatatcttcttttataggaacccacccctgaaataacagcattaatccattgatgagggcagagctctcacagcctaatcaccttttttttttttttttgagacggagtctcgctctttcgcccaggcgagagtgcagtggtgctatctcggctcactgcaggctccgcctcccgggttcacgccattctcctgcctcagcctcccgagtagctgggactataggcgcccgccacggcggccggctaattttttgtatttttagtagagacggggtttcaccgtgttagccaggatggtctcattctcctgacctcgcgatccgcccgccttggcctcccaaagccctgggatcacaggcgtgagccaccgcgcccggccgcctaatcaccttttaaatgttgctttattaaacactgttgcattgagggttacgtttccaagacaggcttttgaagtgaaatgaaaaatttgaccattcccaattatagtttgaaatttcaatgctcctttcttagtatgtgattgaacatggataagataatcagtaacggtggatgtaagaacactattaaccaacttgactccactgtcatatgtagaacacaacacccaacaatagcagaatgcacattatattcaagtgctcataaagcattattttgtatatatgtattttctcccttttttgataaagttagctagtagagtgcctatgtagttaatattttttaaaaaccacaggcttctcaattattaattacatctatggtttttaaaatattatcttcattaatttctgctttgatccttattcctttctttcttgtactttcttttatttttgttcttttttagtgttttaagatgaaaattgaattgtttcattcatctttttcattttttaaaataaaaacatttagtgcaatgaattttcctctagaactgcctttaaatgcatattacagattctcatatgttgtatattttaaaataatatgtaaatatatatttgcataraaaaacatatttacatacaaaatatgtatttacatatttaaacatatgtattttctgtttatatttttccttttactcaggagttaataggatatttttaaaatttcttggtgaaagcgcctttatcttattgttagtaaagtctatgtttttgcattgtgatcagatagtgcagtttttaatatttcttgagttactaatttttctttccaacctaatatataatcagttttttgtgactatgccatgggcacttaagaacaacacagatcttctattatctgtcaagtttaatatgtagccataaaatctaccttatttttatgttgctatttttgcccacttgatctgtctttttctgataatggtgtattatagttttctattatgggatcatctatgtcttgtctccttacatctcatacatctcatgyagttttttattcataaaggtggttattatgttatttggtatataagtctccataagggtcaaatcttcatgtgtattatatcttttagcataaaaaaagtgtccttctttgccttgattaacatggtgggacttgaatacattgtgtgatataagaattactacgcttgcatgcgattggcatgaaaaaaaaaagattactcctatctctttttgttttcatgtgcctgatatactttcgcccatccctttattttcagtcttttagaatccatttgttttagattcatctctcatagaaaacatattatgttttattttgtgagcccactgaaaatatttttcttctagtaggtgtgtggagtccactcacgtgtgtgtgtgtgtgtgtgtgtgtgtgtgtgtagctatgactgatatttattgtgtttgtattttctttatatttgctacgctcttttgtcacggtgtagtctttgcttgcctatttattcatacttaggagagtttttgtttttgttggagtgtttacttttgtacctctcttaattctgttagttctgtgttttcctagttaatcttttacttctgatttatcagtttgggggatgttcttcagcactcccctattctcatgcaaagtgctttcggttttcctctttttttttttttcctcctcctgtgtttagttgtcttatttctactttgtcacaatattagtgacatttgtatgctagtcttctaccctggatagggaatatacacctgtcagatggaaggaatatcatgttgtatgctgctgtcaaatagatcctaacatactttaataatcttttaaatgatataatccaagttcatagttaactcctgactttttatttctatcatattcagtagatatatcagcattgacagccatcccactgcaatatcacttcacattttgcttagaccaaagggttctgagaagcttctggagctgttgtgaaagccagtttcattaaagtcaagtcagacatccacctgtgctgttttctgctataagctgaatgcaggggatacaatgttaggagcatcagtgtggtatgaggaatgtttacttattggtagyagacttgtctggatcaaggataagtacaagtatctgagatgctgaggtgtggctgaatgaatggccatctgttctattgcaacaggataaataacacattcggagcaggcctaactggtgaactcctcaattatctcacaatagcactatcacgtgtctttcatttttcacagcacagtgtattttcataaaatctttattggtagaccacaactttagcatttcccattcaagatacaactactgtgtcacttggatagcttggtagagaggaaattggctattttcagagtaaagaattcaaggaggaaacagattataaatgaaatgacaaaggtgatgagatcaagcaatgctgacgtttgtagcaaggagtagagggctgagatgcctgtatgataagaaattataatggaaccaatcttgtgctttattttttattaatttggagcattctctgatctgatttattttctatgtgatattttgctgcaggttaaaagctgaaacaacttcaaggaaacttcagggaaaagaggtgagcagccactttggtacttttgaaattctttgttctgtgggcaatgatgtcagaatgtcaaagactgtgagttcattatttcagaggcttaaaggagattattcttttggtagatatatttccccatgggtgtccctaccttgttcaaggattccttattattgtttcttctctttgtttaaatctctttttgagatgacctaaacaactgtggagaatcattgatatatttccttttttcactgttcatgttgggtgaaaayaatcttgtagtgaaattcacatgttctaaatattgtttttttacatctttatctggcacattcataacatagatgtttctatacatattagtactgtaatcataccatatattattctgttaccccacttactccttaaacttttagttaattaaagagtttttataaagtcccccaatagattttttttttttgagacatagtctcactctgttgcccaggctggagtgcagtggcgtgattttggctcactgcaacctccccatcctgggttcaagcaattctcctgcctcagcctgccaagtagctgggattacaggtgcctgccaccacgcccgactaatttttgtattttcagtagtgacagggtttcaccatcttggccaggctggtcttgaactcctgacctcgtgatccacccgccttggcctctcagagtgctaggattacaggcttgagccactgcacccggccagattttaatctaattttattagaacaattcagtcatatgttttttcatgctatgtatatgagagttccattattcagatactaaacaaatgtctactgtacatttactgttctcactgatgatgcattagataaccatgcacaaaataagcctggctgtggaaacgcttatttgttgggagggtgcttgtttggatcgatgatgagaataattgtctgaggatgstgagggactcattccagatgtcaatctgaggtccagatgtgcggccctccaataggacaaataagactctcagagcctggctctatttggggatccctcagtgacaacatagtacccctgtgagcgtgccttttctatctcttcgaagagggcagtggcatcctgtcttatgagtcagtgtgyactttagtgtgcctagtgacccaagacttgctttaattgtagatagatacttacrtataggaaatatttcttaagtaacaaatgaaaaactttagaagattgaattaagggtcaagcaactgtgatatgtctgaaaatctcattagtgttgtgctgaaagaaggaaatatggcatgcctctattaaataatgacagtggaaccaagtttattgctttgttatttttactgtggagtattttctaagattatttttgctttttttttctttcatgttttgctgagatagaaggcctggaatctgatcctccacttcaragaacaggggtgagtagctaarccattatcttttgaaattcatatgtcatgtgctctttgctaggtctttaggtcgttttgtacatcttttcagaagcttattggaggacattttcatgatatgtccttttcctcattgagaccctcaccatgtcacctacactattgaatccttatcatttctcttttaattttaactctcttttgcttttatggaaaaatgtagaatttaagagaatttttggcaatttcatattggatcaaaatgtattgtagtgaaatccaggtgtgccaaaatattaacagattttccccatctgtttaattattggggtttcagaatagagactccatggttcataatatctttgtggtcatactacattatatttctgcttctaatttaattattaaatattgacttgaattagtcttttcctcattgttgcaacaaggtaagttatataggaaattttcttctcttgatggcatgtctgagataatcatagatataagacacctggctggtttctagaatgcatgtaatttttatttcttgatctgtgtgttgagtacttgctgtgattgcatcatgcaaatacattgagctttacaattttagtgtatgcacttttctacatgtatattattcttcgatagaaagtaaaaaaaacttatcgaactagtcaaaatattggttaatacataaaaaaagtctcaagtagattgtgtattacatggtgcttgttgattgatgccctcataatagatcaagtgggttctctctttagcacagggctttttagcaaatcatgtcatgagtagttactcaagtatttttattttaacacatttatattttttctatgtatattcttaaattctcttatacttttttctctgttataaaaacatgctgaacaatctcaagtcttaaggattgcagtattgtccccacatattcatgtattttggtactcaattctttatactttctttgacagatcacttgaactggcacatgtctcttgttttgcagagagggaattaatgtgataccttcatgcttttctattctatgtgctacataattgaatatacaagcaaatatagttgttaagatttagtgtgattatttctacaccacatgcaaagaagtttctcatagatcttaatagaggcccacatgcattgtacagtttagaatttggggaaatattgatgaagttgggtaaagtataaagccaaaagtcagaacagtgaactccttgcttaaggatttccttggagattacttagtcaatacacaactgataaatttaagtgcttttcaccttttgagttctcgacatactaaagctaaaatgtgtttcaacttttaatcctgcttccctgattttcccttttttagtctgagatcaaagagtttcagccataaattactgccaagagtaatcacttcattttaagaaagcttaacaatatagaagaatataaaattatttatgacagatgtatttttaaccttttccccatgctttccagaggaaatatgtttaatcatctgccctatattagggaaaaactttctatgctaatacaagtatctatcaatccatttatctttctatataagatgtattgatcataaccaattaactttactgtaaatgagctttagatttgacattttggtagtaatatatgttgtacaatctcctgaggtcctataggtcttgaggtctctatgtcaaaaactatagatgtgccagtgtcctcagtgaatgtgaaggacaccacattttccttagccatttcttgttttcagaataatggttatcaacattttgctactgcaagataccatacatttataatcggaatatgccagtttttatgcactcatgcctctgtttctgtagagcattcccagaatgagtaatgcttgaaaattaggtccatgtgatttctttaatgagttatagtcaaatcatgaaatattcaggttaccattatttcagtaatgtattagaatgtcaaggtaaagttatctacattgtatatatacacacaacatagatataatttatacaacatctatatttatacaacagatatatatttatgtatatatttatacaacataaaatatattttattatttaaacataaaatatattttattatttaatatagattcttaagtgataaatatgtttaatattattaaaataggttaaaataggttatagttagtacagtgaaaattggcagcccttttacaaaacatatgccataactatagcatttatcactgacagtcataccaggatagtcttttatttccaatcacttaaatattcctaattgcaaaagaaatttgaagactaaaattcagaagttttgaaagagccattgcctgggtaaactatacaggtttcagttttatttataataattatgaggccaggcgcagtggctcacacctgtaatcccaacactttgggaggccgaggcgggtggatcacgaggtcaggagatcgagaccatcctggctaacacggtgaaaccccatctctactaaaaatacaaaaaattagccgggcgtggtggcgggcgcctgtagtcccagctactcgggaggctgaggcaggagaatggcgtgaacctggtaggcggagcttgcagtgagccgagatcgcgccactgccctccagcctgggagacagtgcgasactccgtctcaaaaaaaaaaattatgtatatatttataaattaatacttaataaattaawaacttgtgataggcaatgcaaagatgacagtaaaaggacaaaattgattagattgataaagtcctgttaacatgaagaaattgaccaggataccatccacactataaagttagagaaatttatcaggacaattccctaaaatactcttctcaattttaacattgtaacaggaatttttaaaattttggtattatgtgtgtttccttccagataatttgaacagattcatatttggtatttttaaaagccatatctttgtccttagtgctggcaatgtattcttgagaatgaacaaataagagatacgtaaaagcataagagaaggtatcaggttgaagtagtcaatcagttatacagaacacaaagaattttatcttgtataatgtttatatagctttatagaagtgtgctgaaagggctataaaacatggacattattatctcattgaaaggtccaatacgtactgaaatacatgcttttattttgaaccaaccaccctataaacgttgtatggcttatttagatgagagcccaggttgtgtgtgtctgtgtgtgtgtgtgtgtgtgtgtgtgtgtgtgtgtgtgtgtgtgtgtacctgacagggaagcaagaacatcgagttgccaatgcactctgtctatggttagaatcatgctgaaaacrtggctcccccagttctggaatgagcccacagatcaagcattccccraagacatagcaggctcaaatccctgtgtacacaatattttatgattatcttatgtcagtactttcaaagtatacagtttgtgtgaagacaaatccaatgtcatttttcttggctagcctatatgtgtggtaaatccattatttacttacttgcttcctgaaaattacaattagattaacaaactgcagcaaagtgggcatgatgagatagagattgaagtgtaagcttatgttaatgatgcccttggtttggataaacacatctaagagaaaaatggaaaaacacacatggcagggaagccttgatagagccaaaatataggattgtatgtagtaatgcartccatagatgagcatttggcagtaatattatttttcagatatggataaaaattgcttaggagagtaaagagagacaaagttgaaagcaggtttatagtaggtgttgttttagtgttgatccctttttgctccaataatcaaagtgataaatattgaaaattgattcatgcagcattacttactccattctaatttttatatatgtcaaaagtgccatctcccaaactgtgctatccccttcaggagaagagactctgctgaagtttataaggttgacatattgccagcttcaayaatgtaaagatgaagtgtatactgaattcttaatgcaaataacaactctattggaaagtaayccagttatagaagtgctaatttgtcaggagctgccttaccaagatcatgatgagtacagttatctcaggattctgaaagattgttttccgatttcaactagtctagctgaatgttccttgatagaaagagaggacttttagaattggttcaatatgatgacctcctgaattatctcacatagcccgtttgtacatgcctttcttttctctcagaaaatggcactatcataatagctttcttacacagacttcaccttagggttttacattaagggaggggyctggtgtttcatttattttgaagtatttgttgttgattgtgtacagtgcttgagtaaaaaattgaatatagaaacatctagaatatttttttaaaggatcagtgtttataaagtgaattattagtgtcaataatgttgggaaagttttaagagaatataggaaacttgaacattacacaactacaatgggaccaaattgtggggtctcattatagttaatatttatgtatttttttccaattgatttgtgtgctttttttctgcatgtttttggcagatagaatggctataacaagtaacagcatgtcaggtaataaaaataagcagagccctattcctttaaaaatcttcactgatgggagggccataaaataagtcttaatacatttaaagaattaaattcatgtaaaccatgttaatttaattccacaatgatattgaattagaaataagaggaatatctcttgaacatctcctaaatgtttggaaatttaaattagcatttctgacctatttattggttaaaaaagatacaaagaaaggaaaattgaaaagtcttttgaactgaataaaaataaaaatatagaatctaaaactttatgggatactgacaaaacaggatatagggaataatttatagcactgaaatgcctatattagaaaagaaaaaaggttttaaatcagtaaatttgtattttaccttaagaaacttagaaaagaacaaattaacccagacttaagtaaaataaaggcactaataaagataagagcagaaatcaatgaaatataaracaacaaaacacagagaaaaattgagaaaatttaaaaatagcctagtgagaagatattgataaacttgtaaccagaccaatttaagaaaaaaagtcaaaacacaaataccaatatttgaaaatgtaggagggcaaatcattacagattctatgaatactaaaatgataataaggaaaaattatttaaaaggggcatgtcagccaggcatggtggcttacccctgtaatcccagcactttggcaggccgaggtgggaggattgctagagctcaggcattcgagaccagcctgggcaacatgttgaaaccttgtctacacaaaaagtacaaaaattagctgggtgtggtgttgcacacttgtagtcccagtcacttgggaggctgaggcgagaggatcacttgagcccaggaggttgaggctgcagtgagccatgtttgtaccactgccctccagcctgggtgacaaagtaagaccctatgtaaaaaaaaaaaaatgtatgccaacatttttcaataacttaaatgaaatggaaaaattccttgaaagacacgaactacaaaaactcagtgaacaagtaaataacctgaatagccctgtatcaagtaaattgaatttgtagttaaaagccttccaacagagaaaacttcaggtacctatagcttcatatgaaatgaaaaaaaaaataccaatcctctacaagattccagaacatttaaaagaagggaatatttcccaacttattccatttggacagcaatacccaggtaagaaaaagagacacagaaatttaaaaagaagaatatacattattccttaggaacataaatgcaaagaaatstaatcaaaattttggcaaatgaaatgtagaaatactttatgaccaagtgagagttacccaaagaatttaaggttggttttatatgtaaagatcaaccaatataggaaaatcacttctggaaagtcagagtaagaaactccaaaaatctactcctccataaaaccaataacagccttgatagaaatagttgaaattaattttccaaaactttggaaattaaccaaaggcttacaaaattccagagaacattaattcaagaaaaatggctgaatcagtaagaacagccagctttgtggcattttaatatgaccccttcccatgcttttctccctagtgctgagatagtcttaaaaattagcaggatagcaaccactggagaagaaaggtttggaaatttcccaaaaagttccatccccatagaattatcactatttgacctctaaagcccaatctataggatttatattcatttggactgactcagagctcactcagtaaggaaatctcaatttcaaggtattggtcaaaaagaatccatggcaattgttgactatcacaactgcctgaagtcttggtaacagttgggataaacaagaagctgatcaaaaactgaaaactaaaatcttgggaatgagatatctacaggatgcttcaaaaagctttgatacattcctgtttatctagaaagctacatgcaggctgggtgcrgtggctcacacctgtaatcccagcactttgggaggccgaggcgtgcggatcatgaggtcaggagtttgaggccagcctgaccaacatggtctctactaaaaacacaaaaattagccaggcgtggtggcgtgcatctgtaatcctagctactcaggaggctgagacaggagaatcgcttgaacccgggaggcggaggttgcagtgagccaagattgtgccactgcactccagcctgggcgacagagcaaggctctgtctcaaaaaaaaaaaaaaaaaaagccacatgcatgtaattgtttacctctggctttccttttatgctctgggcaagctaaggaagagttgtgaactacytaagtgctgaatgggaaccataacacacacacacacacacacacacacacacacagcaccttagtaaagggtgagaggcatgttagttagaagcattaaaggaaatctctttctagtcattatctgtgcactaacctaactgagcagagacttcagtatccacatactacagggcatataaactttacagaattagtccaggaaaatcatatctaaaaaaaaaaaaaagcagtaacaaaaataaactctgggaaaggggagaatatgatttaaagagttgccacattatacataatatgtctagtgttcaacaaaaaattacgagacatgcaaagaaatagaaaaatatggcacaaagaggataagatgaagtcagtgaaactatcctcgaggaagaccagatgttggtcttactagacacagacattgaaccagctattaaaaatacgtacacagaactaagaaaaacatgtcaaaagggttaaagaaaggtataaaaatagtgtcttrccaaatatagactaccaataaagagatagaaattataagaaaagacaacatgaaaaaatataaagcaaaaaaattagacaattgaaacaagagggcctctattcgcagatttgagcaggcagaagaaagaatcagtgaacttgaagatatgtcaactgagattatccagtctgagcaacaaaggtgggaaaaaatgaagaaaactgagcaacaaagaactgtagaacagcatctctcataccaatggatacataaactggagccctagaaggatgaaaaaaggagaaggaaagaaaacttcccaaattttaagaaaaacattaatttatatacccgagatgaccaataaaatccaattaagataatctcaaagagaccaacacctatacacatcatagtcagcgtgtcaaaagacaaacataaggagagaattcttgaagatagtaagaaaaaaattattcataacatacacaccatcctcaataagtctgacaattgacttctcactgtaaaccatgcaggctaaaaaggcaatgtacataaccaaagtgatgaaataaaaaccttcaaccaatcattctagatccaacaaaactattgttcaaaaagaagaaatgaagacattcctaaacaaaatctcagagaaatgttctctataagacttgtcctaatagaaatgctaaaggaactccttcggtctgaaatagaaaggcactggagagtaaatcaaatccacgagaagaaataaagagaaccagtataagtaactacatgtgtaagtttaaaacaaagtataaatttattttgtttgtaacatttgtcttttcctatttgatttaaaatataatctcaattataaacttgtgttgatggtattatataaagatgtaattttgggttatagcaccaaaatggcagaataggaattttctgtaggtgtttcccacataagtatcaattttgacaaccatccatgggcaagagtaccttgtgggagttcaggagttgacagtaaaacttcagcacaccagaggagtaaagaaatctaagaatagattcattggaaagggtataaacagtttcactttacctgcatcaccaacccccaaaagtggcacagctcagtaacaagagcccattatttcttccacagaggaaaaggagagtataataagtaagtgtccagtttctcaagacatacaggcccctgcccaagagatccactttattttcatctcacccagaatattgaggtgatcagcaaggtggagtggttgggagagggtaaaagcaggaaagagagatggsgactcaaacagcagcccatacttggaactgccatagatcctaccagttacttcatggactccatcaggaacccacctataagccacaggggatgcatccctcccrtcttgccaacaaaaccccgaatgctccaaatgcctcacccactctttggctggctcccaagtgcgctcctgtgaaaagcgagtgagtatctctgcagatggcttgcaagcacatgttgacagctggctccactctgtagaactggaaaaaagctcacatacatgagaatttcaggacactaccctaaaaaaaaaaatgagacttcagcacctggcctggctttatgcaacctagagaaggtgatatgatttggctctgtgtccccacgtaaatctcatgtcaaattgtaatccccacgtgttggacragggacttggtgggaggtgattgaatcatgcgggtggacttccctcttgctgttcttgtgatagagttgttatgagatccagttatttgaaagtatgtagcatgtcccccttcactctctkgcactcctgctccaccttggtaagacttgcttgctacccctttgccttctgccatgattgtaagtttcctgaggcctcccagctatgcttcctgtatggcctgcagaactgaactgtgagccaattaaacctcttttcttcataaattatccagtcttaggtagttctttatagcagtgtgagaatggactaatgcagaaggcatacaacctttagaatttgcccccttgagggaacaagatgtgtgaagcaggttcatccatagaaaatgtctgagagaacctcaaaatccctaacctgactaactgatgaaagtgtttctctcctaaggccagtcagtaaagaccagagggggtgactgtttctttaaatgcaaaggcagcagcacaataattcaagaaacatgaaaaatcaagaaaacatgacaccaccagaagaacacaatcattttccaataaccaactccccaaaaatggagatttacaaattggtttataatgaattcagaacaattatgttaaggaagctcagcaaactaaaaggaacaccaatagactactctgtgaagtcaggcaaacaattcatgaacaaaactagaaattcaaaaaagagaaaaattatcttaaaagaaaacccagaagttatggagctaaagaatacaatgcatgaaatgaaggagcgtatcaacagcaaagttgatcaagcataagaaaaaaaaaatctgtgaaactgaagactggctatttgaaattattcatcagaggattaaaaaaaaagaatgaaaagaaataaagaaagcctacaggatgtataaaacaccatcaagagaactaatataaggattattggagtcataaaggagaagagagaaaagggtagaaaacttatttaagaaataatggctgaaaactctccaaatctaggaaaagatatgagcatccaggtatatgaagctcaaagatccccrtacaggatacattccaaaaagacttcaccaaaacacatgataatcaaactgtcaaaagcaaaatcaagacgatgaataaaccaccaatcactaagagggagacaggattcttatgttgtcattattatttacatataatttcagtaaatgttattggaaaatttataatgttttaaaaaaagaaatttgaaagcaccgaaagaaaagagactcatcacatacagggaacccttttaaggcattcaagagatttctcagtagaaaccttacaaaataggagagagtgggatgaactatacaagtgctgcaaggaaaaaaatgccaaccaacgctttacctggcaaatctgttcctcagaaatgaaggagagagaagaactttcctagacaaacaaaagctgaggcagttcatcaccactagacctgccttacaagacatactaaggggagttcttcaagctgaaatgatatggcaatagttagtaatatgaaatgataaacctcactggtaaaggaaagtacayagtcaaatttagaacactttgatactataatgatggtgtataaataattttactgtgctatgaaggttaaaagacaaaagtattaaaaaaaacccatagctgcaatagcttgtcaatgcatactacagtataaaaagatgtaaattagaacattaaaaacatagcatgcaagggtagggaagtaaaagtgtagttttcatatgtaatcaaatttaatttgttatcagcttaaaataaattgttatacctatgttttatgtaagtgtcatggtaactataaaggaaaaacctctagtagatacacaaaagaaaaagagaaaggaatcaaaacataacactacagaaaattatcaaattacaaaggaagacagcaagggaggaacaaagtaaaaagagcaagaaaaaatttaacataatgaaaacagtaagtccttacgtgtcaataattactttaaatgtaaatggattaaattatccaaacaaaaaaacagactggacaaatggattttagaaacaacaacaacaacaaacaccgcacacacacacacacacacacaaaccacccagccccaactatgtgctgcctacaagagatttacttccactttaaggacacatacaggctgaaattaaaagaacagaaaaagatattgcatgcagatagaaaccagaagagaggagaggcatctatacttacagcatacagaaaagattttaagttaaaaactatatcaaaaggctaagaaggtcaaaatggtgaagcagttaattgttcaagaagacataaaaattgtaaatatttatacacccaatattgaagcacctaaatatataaggcaaatattaatacatataaaaggagaaatatacagcaatacagtaatagtagtgaacttcagtgcctccctttcaaaaatggataatccagacataaaatcaataaggaaacatttaacttaaacttcactttagaccaaatggatctaacagacattatactgaacatttcatccaacagtggtagaattcacattcttctcaagcacacatggaacattctccaggatagattatatgttagctcacaaaataatattacaaaatttaatamagctgaaatatcaattattttgcaccacaatagtataacactagaaatcaataacaagatggaaactggaaatttacaaatatatagcattaacatattcctgaacaaccaatgggtcaaagaaaaaaatcaaaataattttgtgacagcaaagtagaaacacaacataccaaaacatacaggacacagcaaaagcagttctatgaggtaagcttatattgataaacacatttaaaaaaagattttaaataaacaacattacacctcaaggaactacaaggaagaaaaaaaaacaagccccatgttatcaaagggaaggaactaacaaagatcagacagaaataaatgaaacatagactagaaaaacaatagagactattaataaaacttagagttagttttttaaaaaataaaatcaacaaacctttagctagactaaaaaaagagaagactcaaataaaataaaaaatgaaagaggagacattacaactgataccacagacatacaaattaagagaaaactatatgccaacatattagttaacttgcaatgggtaaatccctagaaacatacaacctacaaaaactgaatcatgaagaaatggaagatctgaacagatcaataatgaataagggaattgaatcartattcaaaaatctcacaaaaagaaaagctcaggatcagatggcttcactggtgaagactgccaaccatttaaaaaaattaataccactctttattaagctcttccaaaaaaattgaagaggagaaaacactttcaaattcattataagaggccagttttaccttgatatcaaagatttaaaaagaacacttygagaaaggaaaatyacaggccaaaacccttgataaatatagatgcaaaaatgctcagcaaaatactagcaaacctaattcagcaacacattataatggcatacatcatgaccaagtgagattcatgcctcggatgcaggatagttcaatataatcaaatcaacaaatgttacactactttaacagaatgaaggataaaaatcatatgatcatctcgatggttgaactagtttacagtcccaccaacagtgtaaaaatgttcctatttctccacatcctctgcagcacctgttgtttcctaactttttacagatcaccattctaactggtgtgagatggtatcttattgtggttttgatttgcatttctctgatggccagtgatggtgagcatttttcaagtgtctgttggctgcataaatgtcttcttttgagacgtgtctgttcatatccttcrcctactttttgatggggttgtttgtttttttcttgtaaatttgtttgagttctttgtagattctggatattagccctttgtcagatgagtagattgcaaaaattttctcccattctgtaggttgtctgttcactctgatggtagtttcttttgctgtgcagaagctctttagtttaattagaccccatttgtcaattttgtcttttgttgccattgcttttggtgttttagacatgaagacagtgtggtgattcctcaaggatctagaactagaaataccatttgacccagccatcctgttactgggtatatacccagaggattataaatcacgctgctataagccataaaaaatgatgagttcatgtcctttgtagggacatggatgaagctggaaaccatcattctcagcaaactatcacaaggacaaaaaaccaaacaccgcatgttctcactcataggtgggaattgaacaatgagaacacatggacccaggaaggggaacatcacacactggggatggttgtggggtggggggaggggagagggatagcattaggagatatacctaatgctaaatgacgagttaatgggtgcagcacaccaacacggcacatgtgcacatatgtaacaaacctgcacgttgtgcacatgtaccctaaaacttaaagtataattaaaaaaaataatgctgctataaagacacgtgcacacgtatgttcattgcggcactattcacaatagcaaagacttggaaccaacccaaatgtccatcaatgatagactggattaagaaaatgtggcacatatacaccatggaatactatgcagccataaaaaagatgagttcatgtcctttgtagggacatggatgaagctggaaaccatcattctcagcaaactatcacaaggacaaaaaaccaaacactgcatgttctcactcataggtgggaattgaacaatgagaacacttggacacaggaaggggaacatcacacactggggcctgtcgtggggtcagggtagggggagggatagcattaggagatatacctaatgtaaatgacgagttaatgggtgcagcacaccaacacagcacatgtgtgcacatgtaccctagaacttaaagtataataaaaaataaatcatatcatcatctcagtagatttagaaaagcatttaacaatattcaacatcctttcagaactaaaaactctcaataaatcaggtatagaaagaatgtgcctcaacactataaaagccacatatgacaaacctggaggtaatatactcaatggtgaaaagtaaaaagctttgactctaagatcagaaccaaaacaaggatgtccattctcaccacttatatttaacatagtagttgaaattctagctagagcaattaggcaagaaaaaaggcacccaagttggaaagaatgaagttaaattgtctctgtagatgacatgatcttatatatagaaaacactraagactccaccaaaatgctgttttaattagagcttaaaaaaataattcactaaagttgcaggatacaaaatcagtatacaaaaatcagttgcatttctaaacaccaaaaacaagttatccaaaaaattaagaaaacaatcctatttgtgatatcatcaaaaaataaaatactaaagaataccaaagaaactgaaaataaatggaaataaatggaaagatagcccatgttcatggattagatgaattaatactgttaaaatgttcatactacccaaagcaacctacagattaagtgcaattcctactaaaattccaatgacatttttcacagaaatagaaaacacactcctaaagtttgcatggaaccgcaaaagactcaaatagatgaagcaattttgagcaagaacagtaaagctggagacatcacactacctaacttcaaaattttattaatcaaaacagcatgacataaaaacagacagaaaagaccaatggaacagaatagagagcccagaaataaactcacrtttatagagtcaactaatattcaacgaaggtgccaagagtacacartggggaaagtatagtctctacaataaacagcactgggaagacaatatccaaatgcaaaagaatgaaattacacccttatcttataccatacacacaaatcaaatcaaaattgataaagacttaaatataagacctgaaaccatacaatctttaggcaaaaactcattgacattggtcttggcaatgatttttttgatatgacaccagaagcacaggcaacaaaagcaaacctaaacaagtgggaccctaacaaactaaaaagtttctgcacagcaaaggaaacaatcaatcatcagaattaaaaggcaatttatgaaatgggagaaaatgtttgcaaaccacatatctgataaagggttaatatccaaaaatatataaggaatgcataaaattcaatagaaataaacaaacaaataatccaattttaaaatgggtgaagaacctgaatagacattttttcaaagaagacttacarataggcaacaggcatatgaaaaaatgcttgacatcactaataatcagggaaatgcaaatcaaagctccagtgaaataccacctccaactattaggatggctattatcaaaaactcaaaagaaaacaagctgggggaatgtagagaaaagggaaaagaagatccttatacactgttggtgtgaatttaaactggaatagcccttatggaaaacagcatggaggttcctcaaaaaattaaaaatagaactactatatgatccagcaatttcactattgagtatatatccaaatgaattaaaatcactgtcttgaagaggtatttgcacactcatatttatttcagcattattcacaatagccaagacatggaatcaacctaagtgttcatcagtagatgattagataaagagaacgtggtatatagacacagtggaatctatttagtgttcaaaaagaaggaaatccaacttttaaaatcctttaaaaagttaaactcataaaaacagagaggagaatggcrgtttccaggaactggagggtgggagaatggggagatgttggtcaaaaggtacaaactttcagttataaaatgaataagttctagagatctagtgtacaacagcattactatagttaataataatattttttatacttgaaatttgctaagagtaaatatcaatattctcaatacacacaaaacagaactatctgaaggcactgatatgttaattatcttcattatagtaatcatttcacaatgtataatgaatatcaaaacaatagtgtacatcttaaatatatacagttttgatttgttaatcatacatcaatgaagctagaaaaaatgttgtaatttttaaaacaatagtaatataaattaggggtgaaggaattgacctatgttggagaaaagtttttgtaaactatttaaattaattggtatccattcaagctagattatttttaattgttaatttaattgtaatactaaggcaaccactaaaaaagcctttaaaaaaatatagcacttgaggctgggcatggtggccctcaattatatatataatatatataaaatatatattatatatatagtagatgaacaacaatgggatttaaatggtacactagaaaatatctgtttaacaaaaagaaagcaatagtggagaaatataagaacaaaaccatgtaagatttatagaaaatgaatagcaaattggttgacctaaaccctatcttataattatattaaagataaatgaaataaatactacatcaaaaggcagagattatcagaatagagaagaaaaatccaaaccataattcaaccttatgttatctgtatttagaatatttagagtcaagacacaaatagatagagttccatttgggcgtgaaaatatttaccatgcaaaatgtaattaaaatagagctagagcagcaatactaatatctgacaaaatatactttaacaaaaattgttgctaaagacaaaaaagaacattttataataagacacaacaattataaacatatacaccaaacaatagagcccaaaatatacaaagcaaaaactgctagaattgaagaaagatagaaaaatcaatgattacagttggaggtgtcaataccaaactttcagtaatacacagaacaacaagtcaaaagcaaaaaggaaataaaaaactacacattatcatacaacaccttaatacgatatccaacaatagcagaatacacattattctgaagtgcacatggaatattcttcaggatgacacatattaggctgtaaaacatatcttaataatttaaaagaattgaaataatacagcacatattctctgactgcaaaatattaaaccaattacagaagaaaatgtgggaaattcacaatgatatggagatttaaaaatacttcaaagtaaccaatgaatcaaagaacaaatcacaagagaaattagaaaatattttagatgaataaaactgaagaaacaacataccaaaattttgtggttgtagctaaagcagtgcttcaagggaaatgtataacagtatatccctaaattttaaaaaaatctcaatccaataacctaatttttcaccttaagaaatgagagtgaaagagcagacttaacccaaagtaaacagaaggaagaaataataaagattagcatggagataagtagtgaaaataaaaacaatagagaaaattaataaacttgaaagttggttcttctgatatatcagtaaaattgacgtattattagtttgaccgagaaagaacaaaagagagaagattcaagttactagacataaatgaaagtatagatatcaccttacagaaattaaaagaattctaacagaatattgtgaaaaagtgaatgtcaaaaaattaaattatatgagatacacaaatccctctaaaggcacaaactaccacagctggtgtaaaaacatgaatacaccatttacagttaaaaagactgaatagataaaaattttaagaagaaattgagtaagtaatttaattttcaaactataatcccaagaccagatgttttcattggtgaattctaccaaactttaaaaggattaatatctatttttcatacactctttccagaaaatagaaaaggagggaacactctataactcactgtatgaggtccgtattacccttatatcaagaccaaacatcataagaaaagaagactaaagacttatggtttctgctctgatatgtttggaagtcatcactactattgtcacaaggaaaaatctgaacaaactaaagtcaacgatttcttaaactaaccatagaattgaggtaacgggcgaaaactggagatgtaggcaaatacaaaaaaaatcacagtttatcaggagcagaaactgctgaaaccagcaactcgtatgaacatgttaagtggtaattgacaaatttctggagattgaatgtggactggattgagagttaggaactcctaagtgcccagtttttgatgaccccacacacttttgtaaactagacttccaagagccccagcaagtttcttacagtgaagactgcagaaaaatcccctgatgcttcagataggaggaagggaaaagcaactattttgaaataagcccaggggacaagtagttatttctaaacactctcagagcattttctttcacayggcagggggctccctgcaagggaagctactttgcctgagccttgtctgatgtaggagaaaaggaattggatggctcaagctccatctagcctttctgatttatataagggaagcaaaaaataggttaagaaactcttctgaaagtcacaactcagatttattttatatttatttatttatttatattttttgagacggagtctcgctctgttgcccaggctggagtgcagtggcgcgatctcggctcactgcaagctccacctcccgggttcacgccattcttctgcctcagcctcctgagtagctgggactacaggcgcccagctaattttttgtatttttagtagagacggggtttcaccacgttagccaggatggtctcgatctcctgacctcgtgatccacctgcctctgcctcccaaagtgctgggattacaggcgtgagccaccgcacctggcctcacaactcagatttaaccataagattatagaacacttctcctcccaaaacagagatatagatcaatggaacagaacagagccctcagaaataacgccgcatatctacaactatctgatctttgacaaacccgagaaaaacaagcaatggggaaaggattccctatttaataaatggtgctgggaaaactggctagccatatgtaaaaagctgaaactggatcccttccttacaccttacacaaaaattaattcaagatggattaaagacttaaacgttaggcctaaaaccataaaaaccctagaagaaaacctaggcattaccattcaggacataggcatgggcaaggacttcatgtctaaaacaccaaaagcaatggcaacaaaagacaaaattgacaaacrggatctcattaaactaaagagcttctgcacagcaaaagaaactaccatcagagtgaacaggcaacctacaaaattttcacaacctactcatctgacaaagggctaatatccagaatctacaatgaactcagacaaatttacaagaaaaaaacaaacaacctcatcaaaaagtgggcaaaggatataagcagacacttctcaaaagaagacatttatgcagccaacagacacatgaaaaaatgctcatcatcactggccgtcagagaaatgcaaatcaaaaccacaatgagataccatctcacaccagttagaatggcgatcattaaaaagtcaggaaacaacaggtgctggagaggatgtggagaaataggaacacttttacactgttggtgggactgtaaactagttcaaccattgtggaagtcagtgtggcgattcctcagggatctagaactagaaataccatttgacccagccatcccattgctatatatatatatatatacccaaaggactataaatcatgctgctataaagacatatgcacaggtatgtttattgcagcactattcacaatagcaaagacttggaaccaacccaaatgtccaacaatgatagactggattaagaaaatgtggcacatatacaccatggaatactatgcagccataaaaaagatgagttcatgtcttttgtagggacatggatgaaattggaaatcatcattctcagtaaactatcgcaaggacaaaaaaccaaacactgcatgttctcactcatagatgggaattgaacaatgagaacacatggacacaggaaggggaacatcacactctggggactgttgtggggtcgggggakgggggagggatagcattaggagatatacctaatggtaaatgacgagttaatgggtgtagcacaccagcatggcacatgtatacatatgtaacaaacctgcacattgtgcacatgtaccctaaaacttaaagtataataataataaaaaaaggctacctaaaaaaaaaaaaaagaacacttctcctcccaacaccatatcaccacatcaaccaggactccagtgtaatagcagtgaattctaactgaaagaggtgaaagacactgattgtatttaagaaagatcttctaaggaaatccaaaaatagtaggggagatcaaaacaaagatactagaggaaattgaatatgtgacacctatagctacaaaaaaattaaacataacatagccctaaccatataaacataaaacctcacacaaagacctattatctgagattctgttgcctgatacattgcgttttatttcaataaaaaaattagagggtatgttaaaaagcaggaaaagttagtctaaagagacaaattgagcctcagaagtaggctcagatatggcagagatttggcaattatacctagagtttaatataaatgattaatataataagtgttctaacagaaaaaggcaacatgcaagaacggatgggtaatgtgatcagcaagaaggaaactctaagaaagaagtcaaaaggaaatgctaggaataaaaacctacaagaaataaagaatgcctgtgatgggttcctcagtagactggacaaggtcaaagaatcagtggatttgaaaatatgtcaacaaaaactgccccactgaaatacaaaagaaaaatagaattttaaaaacgtaacacaatctccaaaacagtgggacaattacaaaagatgtaatgtgcctaatgcaaatgacagtaggagtataaagggagaaaggaatagaaaatctgaagtaataatggcagagagttttccaaaattaatgctaaaccacagatacagcaagcccagagaacaacaaggaggaaatttagtaaagcgtctgcaaccaagtatgtcatattcagactgacaaaaccaaaggtgaagagaaaatattgaaagaagacaaagaggaaaataaatatcaagaaaatacatacgaaatacatcatacatacataagaaatacatcagaccatacaagcaagaagagaatggagtgaaatgtttaaaatgttgaaaaaaaaactatcaatttgcaattctgtatccagtgagattatctttcaaaagtgaagagggaaatggcagagaagtcatctccaagacctatggtttcccttcacagaaacactgaaaaatatgaacaaaagtggtcagaattaactttctaagaattctataaaatggtaaaatgtttacaccagtaaagcaaatgctgaattgagaaggcaacttaaaaaggtgaagaaaacttcgtattatttttatgtgtccttgccccacgtccttccctaccttagtcttgaagatggcagcccacatttctactgtggggctctggtttctgtttcctggttcaagagggagaataacagaccttacttttagtcattattatttccttctttctgatttccttgggtttattttgctcttctttctactttattgaaatgagaactaagattatgatttgagacatttttctaatgtaagcatttagtgctataaatttccatctcaacactgctttagtcacatcccacaaatttttatatgttgtaatttcactttcatttagttctatttttaaattttttctttttatacttcctctgactcacagattacttagaattgtgttgttcagttttcaaggatattgtagattttcctgtttctctgttgtctaatagttctgttccattttgtacagatagctcacgctgtatgatttcaattttttaaaaaattgtgctttgttttatggcccagatatggtctgtgctgtgaatattccatgttattataaagtatgcctgttatattattatatatatataatatatataattataaagcatgcccgttttgtattgttagcagagtattctagaaatgtcaatgagatcttgttggttgatggtgcttttcagttctatatctttgctaattttttttttttttgcttagtagctatatgagattctgagagaggaaattgaagtctccaaccataattgtggatttgtctatttctcctatcagttctatcagtttgtgcatcacatatttgaggctctgttgtttggtgcatacacaagtggaatcattgtgccctcttggtggcttattttatgattatatagtgcctatctttgtggtatttttatttgctcttaaatctactttgtgttatattcatatacccattcttttttaaaaaaaattgtttgcgtgatacatcttttccattcttttaatctcagcctatctgtgccattgaatttgaagtgagttttcatatagagaacatattattgaatcatcattttaaaaattccttttgccaatctttttkatactgaggtaaaatygacataaaatttatcattttaaagtgtacaatacagtggcatttggtaatacacatgttatgcaacgttaactctacctggctcctaaatgttttcatcatccccaaaaggaaacttcatactcattaagcagttaattcccattccttctctcggccactggcatccgcaaacctacttttctgtctctatgaatttacctattatggatattttgtataaattgaattatacaataagtgacctttatgtttggcttcgttcgcttmgcatactatttttcgatattcaaccatgttgtagtatgtatcagttttatttgaataactcaattctttttgttgtatagctaaaagttgattcctaggtcataatgataattctatgtttagtttattgaatagctgccaaagtttttccacagtggctctgtcattttaaaatcccactagcaatggatgagagttccaatatctccacatccttaccaatattgttattttatatttttataattataattttcctagtgaatacgcaatggtatctcattgtgtttttggtttgcctttccctaatgactaatgatgttgagcatcttacaatgtacttgttaactatttgtgttctttagagaaatgtctattcaagtgccttgyccattttaaaaatcgagttgtcttgttgacttatgagttctttaatacagtaaacgcttatcagatatgatttataagtattttawcccattctgaaggtcaccttttcacttttgtggtagaccattatgcacaaaggttttaattttgataaatccaatttatccgcttttgttgttgtttttgttgttcgtgcttttgcaaaacctagtgtcatgaggttttctcattatctttggagaattttatagtttgggtctatacatgtagattattgatctaatttccattaatttgtgtgtatgctacgaggtaggggtccaaattcaatttttgcattgaattgaaaattcatattttcagtttcaaatttcaactgcatattcagttgttgcagcacaatttgttgaagagatcattctttaccacagggaatgatctgggacccttgtcaaaaatcaattgatcatagatgtatgggattatttcagactttagatcttgttccatgaatatgcctatttttatgccagcactgcagtattttcattactgtagctttatcataaattttgaaatcaggaagtatgtatcctccaagtgtgattttcatttgctagagtgttttgactatttggggtctttgcaattccatatgaatttcagaattggcttttcatttaaaaaaatggtagttgagattttcataggaattatattgaatctacagatcactttgggtagtattgccatcttaacaatattgtattccaatccataaacacggatgtattgccattcatatctttttttcttttctttcggcaacatttagtatatgacacttgtaactccttggttaaatttatacctaagcattttatcctttctgatgctgtttaaatggaattattttattaatttctcttttagatggcttgttgcaggtgtatagaaatagaactgattattgtgcttttattgaattatctgaaactttgctgcatttattaactctagtaggttttttttttctttaaagttgtctatatatcttgctctgtgaatagataattttacttcttgatctccaatatggatgcctttctttctttttcttacctaattgctgtagctagaattttcmgtataatgtatgatagaagttgttcacaactatccttgtcttctttctgatcctaggggtatagctttcagtctttcaccattaagcacaatgttagctgtggggttttcttagatgccatttaatatattaaggaagtgctctgctatttctaattggttgagtatttttattataaaatggtgttagattttatgactttatgtactgcataattgagattatcatgtggtcttttcattcgattaatgtggtatattttatgattttcatatgttgatccacctttatattcttggggcaaatcccactgtgtacacgggttttttagggtctcctaattttcttcattctttttcttttctctccctgagactgaataacgttaactgacctatcttcaagtttactattttttcttctgctgttcaaatctgcttgaacctatagagtgaatttttcattttacttattgaacttttcagctccaaaatttctctttggctactttgtataatatctatctctctatagatattctctatttggaaagacatttttctcctggttttctttacttatttgtattttttaaagtctttaagcatatttgagacagttgatttaagtatttgtgtactaagtccattgcctaagcttttgcatagagattttatattaatttcttttttttctgtgaacaggtcttttttttttttttttttttttttttttttagaaaactggacattttgagtagtataaacgtggctattttagaaataattttcctccctccttaggttttgtttccacttgttgcatgttgctgttgtttgctcattagtgacttttctaaagtattttgaaaagtctgtgttcttgatcatgtgggtccattgaattctgtattctgttaatttcatagtcagctagtgttctgaaagttcccttaagtgcatagagccaataaaagaaaaagaaaagaaacacagaaaaagaaaagaggaaaaaaggagggaaagagatttaaaaaaataatgtcggttgggcatggtggctcatgcctgtaatcccagcacttttgggaggccgaggcaggcaaatcacttaaggttgaccatcctggccaacacggagaaaccttgtctctactaaaaatataaaattagccgggcatggtggcacatgcctgtaatcccagctactcgggaggctgagaggtaggagaatcacttgaactcgggaggtggaggttgcagtgaactgagatcacaccactgcactccagcctgggcaacaagaatgaaactccatctcaaaaaaaaataataataataatgcctttgccgatttgctctgtgtttgggccctcattcaatgcctagtcaggccatttacaactctctcttaactttcactacctgcttgtgtactgactgaaggccacctataggtgaaagcttaacatcatctcagatctttttggaccatgaatcctaccctgggtatgcacatgatcttcttaatttcccagtagatgcaagagttttagtgttttaaaagtccttattccctcatctatcttcttttctgacctttttcagtctgcttattgttcatctgaactgacatcctttgccccaagcggctgtggcaaaaacttttacctttaaatgctttcaccacaagccacttgggaagctgccccagacctgggactgctctgaccctgatgaaacaaagacaagaccttgtacagccaggcagccataagacaagtccatacccaaaccacagttctttcagaataaggtctatattggattctctggccctagtaaccagcatgagtctgggcttgccatcttcatggccacttgtcttagtttgctagggctgccataacaaaatatgagagactgagtggcttaaacaagagaaatttattttytcacaattctgaagaccagaagtccattacyctgaaatctctctccttggcttgcagatactgccttcttgccgtgtcctcacacagccttttctctgtgtacacatccctggtgttttttaagcctgtccaaattttctgttcttctgaggacaccaatcagattggattagcgaccacccatatgatcattttaccttaagtacctcttcaaaggtatcagagtagtatatttgctacagttgatgaacctgcatacaacatcatcacttgaggtctgcagtttacattagagttcatcgttagtgttatatattctagggtttgttttgttttgagacagaacagagtcttgctgtgttacccaggctggagcgcagtggtacaatctcattgctacctctgcttcccagattcaagcaattctcatacctcagcctcctaagtagctggaactacaggcgcacaccaccatgcccagctaattttcgtatttttagtggagatggggtttcaccatgttggccaggcaggtcttgaactccttgcctcaagtgatctgcccgcctcagcctcccccagtgttgggataacaggcatgagtcaccatgcctggccttattctatgggttttgaaatgtataatgacatgtatccatcgttgtagtattagatagaatagcttcattaccctaaaagtcttctttgcactgggttgagttttaaaagctctttgattattttatgacagttccttattagatatatcttttgcaagtatttttatcagtctgtggttatcttgtcttttacagagcagtaatttttaattttaataaaatccaatttgtcaattacttatctcatatgactctggtgttacatctaaaatgttaccaccatactcaaggtcacctaggttttctctaggaattttatggttttgcattttacatttggtgtatgacccatttgaagttaatttttgtgaggttgtaaggtctgtgcctagattcattttttttttttttggcatgttacttcagtattcataagaaacattgttctgtaatcttctttcttatagtatcttagtcttgctttagtttttgggcaatgctggcctcactgaataaattcaaagtgttccctcctcttcaattatttggaaaagtttgagaaagactattgttaactgttttctaaatttttggtggaatttaccagtgaaccaactggtcctaggcttttctccagtaggtggttttgattatgctttcaatctctttacaagttacacatctatacagacttttataattcagtcttggtaggttgtgcgtatttaggaatctgaccacttcatctaagttatccaattagttggcatgcaattattcgtagttctctgaataatcatttttatttccacaaaattggtaatatcccagtttccattttttatttcattgaatcttcttttttcttagctaatctagctaaatgtttgccaattttgttgatcttttggaagaaccaacttttgatttattaattttctctactctttttctgttctttatattatttatttccacactaatctttactattttcttccttctgttggcctttaattttttttttttaatttttaaggtgtaaatttaggttgagaaattttttaaatgaaagcatttagagctataaattttccttctggtgttcctttcactacctgccataaattttgatatgttgagtttttgtttgtcttggagtattttctaatttgtcttctaatttcttccttgacctattggttatttaaatgtatttaatttttgcatattgtggatttcccagttttccttctgttattgatttctagttttattccattgtgatcacagaagatattttgtataatcgcagtctattaacatttattaagtcttgtggcctaacagaggatctatgttggagaatgttccaagtgcaattgagaatactattctggtgctattaggtgaagtattctctatatgtctgttaagtccaattcatctatagtgttgacgtttcctgttccttactgattttctgacttattattctatccattattaaaagtggagtggtaaagtctctattattgtagaactctctgtttttcaagtctatcaatatctgtttcatatattttggagctctgtttgctgcatatgtgtttamaattgttatatcttcttggcaaattgaccagtttcatcaacataaaatataattcttattgtcttctaacagtttatttttctttttacataaagcctattttatctgatcttagattccctcacactccaccccagcacgcttttggttacatttacataatatatcttttccatcctttcattttcaacctgtttgtgtctttagatctaaagtgaatgtcttacagacagcataagctatgtcattaaaaaaatccattctgcttatctctgccttttgactggggagtttaatccatttgcatttaaagtaatcactgatcattaaatactttcagtattttgttgttttatgtatgtcttataactcttttgctcttcatttccttcaatattgcctttgtgtttagcttatctttttgtgtcacactttgatccccttctcatttcttttttatattttctttgtggttaccaggaggacaatgtatcaacttttaaagttattacaattttatttttttaaatctctcccattcggggattttaggaaggttaaataataatgtaaatgagatacctagaacaatataagcattcaggaattattaactcaattccaatccttcctccacctccacctctttctctgtgagattayagaaaagatgacaaaaaggatgttttctgagccctttaattgttgagaatgatctttgagaaaaagaaaaaaaatgaaagcactaggaatgtacaacagcctggaagtataattaagtgtaaattaaatagataaaagttataagcagaggaaagtatagtagaactcagtatttaaaagagaatcaatgtgaaaattatataaatttatgtaaaataaaactaccagacaaatctgatatccttaggatttttctttctttcatgtgatttctaattgctacatatgacactaaaccattgatctgagctgtaagagaaactggaaattgttctgttatcttttgtaagatttctagaacattttgccctcagacttaaatgccaacgtatttctcacttattgtttactgcttttggatttacatatgatttgattctttcttatctcttatccttacaatgtaattcaaactgatgccaatttaagttcaattgcgtacaaaaactctactcctatgcagctccgccccatctaatttacattattgatgtcgcaaattccatctttgtacatagtttacatattaacatggatttatacatttttatgtatttgktttttaaatcctgtagaaaataaaaagtcaacacaccaawattaaaataatactggtttttatatttgtccatgtgcttacctttatcagtgttctttacatctttatacgggtttgagttactgtcttgtgtcctttagttccaacctaaagaactccctttagcatttttatagggcaggtctagtggtaatgaactctctgagtttttatttagggatgtcttaatttctagctcctgtttgaagtaaatttttctggatatacaattctctgttgattgatttttgttcattttcccttcagctcttttaaatacattatcccactttcttctgccttccaaggtttctattaacaaaattcagcttataatcttattaaagatctcatgtacatgagtggcttctctcttgctgttttcaagattctgtgactttggtttctgatagtttaaatataatgtgtcttattgtgggtctctttggatttatcctagagtttcttggtcttcttacgttggtatatccatgtatttcaagacatttgagtagttttcagccattatttcttcaaacaatctctcctctttggggacttccattttacctatattggttcttttgatggtgtggcaccagtcccctagactttgttcacttttttccagtcttttatttctgcttctcagactcaacagcttcaagtgttctgtattcaagtctgctgactctttcttcttccagctcaaatctgctgttggatccccccttgtaaaatttttaattccattttagtgtttttcaagttaagtatttttattaggttcctttttataatttctttttgttgatattctcattttattacacataatttgtctgatttccattagtttttttctttgttttcctttagctctttgaaaatatttaagacattttaaaagtctttatccaagttcaatttctatggttctgtagagatattttctgccagtttatgttcttcttttccatgggccatgttttcctgtttctttgtatactttctaatttttggttgaaaactgagcatttgaaaatagagccaactttcccagtttctgcagagagtctttatgccacagtattcgttcactgattaactgggtatatctaagcttagggagcagctgagtcaaaagtttaaggtcttctcaggtcttttctgagtatacatgtttcctatgcctgtgtgaaatgttctcaatttccctatataaacagctacttcttcttttttttttttttttgagatggagtctcgctctgtcacccaggctggagtgcagtcatctcagctcactgcatcctccacctcccaggttcaaacaattctcctatacaggtgtgtgccaccacgtctggccaatttttgtatttttagtagagacagggtttcgccgtgttggccaggctggtctcaatctcctgacctcaggaggattacaggcttgagccacagtgtccagcctaaacagctacttttgaatgctttaatttcctgaatagtctcaacccagtttttccttgaggtcttaggtggtccattgtatgtctccacccatagttgcttgccccaggcatctgtgggtctgtggtaccactgcagctttcaccacctgtagctgccacctttccctatctgagatccaggttaggtgagagagatcattccttcacgcagtcccatgacaggttggaacatttcaaataaggtctgttctgctcctctggttgaagggagaaaattgggaaccggtttcccaccttctacaaaccaagatctcatgttgccacgggagtggcagggcaagtgcaagtgaaaatgccatacaattttctaccattttgaacgcgggtttttcttcaatggtcatttgcttggttgctgtaggcctttcactgttttccagagctcccataagattactttagccagttttttgttctttcctgatgcttccctggcagagtaagggttggaacttccaccattttgctgattcataactctgtagtcagttttaaatatattgatacttgagtttgttttatggcccagaatatggtcttggtaaatgtttcacatatactcagaaagaatgtgtattctgatgttgttacatgggctgttctataaatgttacttaaggtggttaataatgttgctcaagtcttctatattcttgctgattttcttttatttatttattttattttttttattatacttttaagttctagggtacatgtgcacaacatgcaggtttgttatatatgtatacatgtgccatgttggtgtgctgcatccattaactcatcatttacattaggtatatctcctaatgctgtccctccctgctccccccaccccatgacaggccccagtgtgtgatgttcccctttcctgtgtccaagcgttctcattgttcaattcccacctatgagtgagaacttgcggtgtttgtttttttgtccttgtgatagtttgctgagaatgatggtttccagcttcatccatgtccctacaaaggacgtgaactcatccttttttatgactgcatagtattccatggtgtatatgtgctacattttcttaatccagtctatcattgatggacatttgggttggttccaagtctttgctattgtgaacagtgctgcaatgaacatacgtgtgcatgtgtctttatagcagcatgatttataatcctttgagtatatactcagtaatgggatgggtgggtcaaatggtatttctagttctagatcttgaggaatcaccacactgtcttccacaatggttgaactagtttacagtcccaccaacagtgtaaaagtgttcctatttcttcacatcctctccagcacctgttgtttcctgactttttaatgatcgccattctaactggtgtgagatgggatctcattgtggttttgatctgcatttttctgatggccagtgatgatgagcattttttcatgtgtctttggctgcataaatgtcttcttttgagaagtgtctgttcatatcctttgcccactttttgatggggttgttttgttcttgtatatttgtttgagttctttgtagattctggatattagccctttgtcagatgaggagattgcaaaaattttctcccattctgtaggttggctgttcactctgatggtagtttcttttgctgtgcagaagctctttagtttaatgagaccccatttgtcaattttggcttttgttgccattgcttttggtgttttagacatgaagtcctcgcccatgcctatgtcctgaatggtattgcctaggttttcttctagggttttttatggttttaggtctaacatttaagtctttaatccatcttgaattaatttttgtataaggtgtaaggaagggatccagtttcagctttttacatatggctagccagttttcccagcaccatttattaaatagggaatcctttccccatttcttgtttttgtcaggtttgtcaaagatcagatggttgtagatgtgtggtattatttctgagggctctgttctgttccattggtttatatctgttttggtaccagtaccatgctgttttggttactgtagcctcgtagtatagtttgaagtcaggtagtatgatgcctccagatttgtccttttggcttaggattgtcttggcaatacaggctcttttttggttccatatgaattttaaagtagttttttccaattctgtgaaggaagtcattggtaacttaatggggatggcattgaatctataaattaccttgggcagtatggccattttcacgatactgattcttcctatccatgagcacggaatgttcttccatttgtttgtgtcctcttctatttcgttgagcagtggtttgtatttctgcttgaagaggtccttcaygtcccttgtaagttggattcctaggtattttgttctctttgacgcaactgtgaatgggagttcactcatgatttggctctctgttagtctgttactggtgtataagaatgcttgtgatttttgcacattgattttgtatcctgagactttgctgaagttgcttatcagcttaaggagattttgggctgagacgatggggttttctaaatatacaatcatgtcatctgcaaacagggacaatttgacttcctcttttcctaattgaataccctttatttctttctcctgcctgattgccctgrccagaacttccaacactatgttgaataggagcggtgagagagggcattcctgtcttgtgccagttttcaaagggaatgcttccagtttttgcccattcagtatgacattggctgtgggtttgtcataaatagctcttattattttgagatatgtcccatcaatacctaatttattgagagtttttagcatgaagggctgctgaattttgtcgaaggccttttctgcatctattgagataaacatatggtttttgtctttggttctgtttatatgatggattatgtttattgatttgtgtatgttgaaccagccttgcaacccagggatgaagcccacttgatcatggtggataagctttttgatgtgctgctggattcagtttgccagtattttactgaggatttttgcatcaatgttcatcagggaaattggtctaaaattctctttttttgttgtgtctctgccaggctttggtatcaggatgatgctggcctcataaaatgagttagggaggattctctctttttcctatttactgtacatttattccaccagtgactaaaacaggtgtatcaataaaatctgttccctcaggttttgcttcaggtattttgagggtctgttatcaggtgcataaacaagattgttatgtcctattcttaaattaatctccttataattatgaagttaattttttttttcttgagatgcagttttgctctgtcgcccaggctggagtgcagtggcacaatctcggctcagtgcaacctctgcctcctgggttcaagcatttctttgcctcagcctcccgagtagctggggttacaggtacctgccaccacgcccggctaatttttttgtatttttagtagagatggggtttcaccatcttggccaagctggtcttgaactcctgaactcttgatccacccaccttggcctcccaaggtgctgggattacaggtgtgagccactgygcctggacctggcccgaagtaaacttctttacccttgctaatgatctttgctctgaagcatgctttgctggtattaatatagtcattccttctttctttgattcatgtttgcagggtatatctgtttccattcttttacttttaacctattgtctttatatttaaagtgcatttcttgtaagtataattggtttcttaaaatccaattatctgccttttaaatgtcatttttatatgatttgcataaatatgattattattacagctaaattgaaatctgtcatcttgctatttggtttctatttatcccatttttttcccctctttttttgctttccttgagattgaacattgtattagttttctagggttgctgtaagaaagtgacataaagtggatggcttaaaacaacagaaatttattgtttcagtttggaggctagtcatctgaaaccaaggtgtcatcagggccgtattctctctgaaacctgtagggaagaattctttcctgcctgttctagcttctagcattttccagcaattcttggcattcctttgcttgtagatgtatccctccaatctctgcctctatcataacatagccatcttctccctttatctgtctattcttctcatcttataagaacattaattactgaattggggcccagcatagattaggcctaatctcatcttgaataggttacatctgccaaagattcttcttccaaataagatcacttttacagcttttacaggtactgagagttagaacctcaatatatcctttggtggggaccgacctcttacccataaaaagtattttatatgattccattttatctcctttttaggttattaactacaatttttttttcttttttttgagatggagttttgctcttgtagcccaggctggagcgcgattttggctcactgaaacctctgcctcccgggttcaagtgattgtcctgcctcagcctcctgagtagctgggattacaggcatgtgccaccgtgcctggccaatttttgtatttttagtagaaacagggtttcaccatgttggctagggtgggtctcaaattcctgaccttaggtgatccacccacctcggcctcccaaagtgctgggattacaggcgagagccaccacgcctggctttataatttttttttaattcagtggatgttttagggtttatagtatacatctttatcacagtctagctccaagtgatatatccctttatgtatagtacatgacccttacagtagtgcatttccatttttcctctctggcatttaggctattgcacacacatacactcaattcatccctttgtgtagatccgtatttccagctgctatcttttgcttctgtctgaaatatatgtatgatttcttttatgactattttgagaaatttggttatgtgcatttgtctatttttcttatgtacttttagctcatcaatcttaagtctgtgagtttatagtttttaaaaacaaatttgaaattatttggctattatttcctcaaatatttttttctgccgcccctgctttccctttccttagggatctctgatttccacctatattactctgattgaagttgttccacgtctcttttgaaaatctctgaaaaatcttttatcatttggataatctgtatttgtacatcttcaagtacattaatattttcttttgcaatgtttaatctgctgttaatcccatgtagtggattcttcatctcaggtattgctgttttaatctctagaaattccattgaagtcttacttgatgaaaaaggcagataaaaacaaatgttggcaaagatatggagaaatcagaatctgcacacactgatgatgggaatgtaaaatggtcaaggcaatttggaaagcagtctggcagtttctcaaaaggctaaacgtagttcccatatgacagcaatcattcatctaggtatatactccagagaaataaaaacatatccacaccagaacttgaacattaattttcatagcaacattattcctaggggtttaaaattttttacattatttttatttaaaatagagacagggtctcactacgttgcataggctggtctggaactcctggaattaagcattcctcctgcctttgtcctgttttctccactggaaaagaataaaactttgtacacttggactaacaactcccgattccctcctttaccaacatgccccacagcctctagtaacttactctctactttcatgaattcaacttttttaagattccacatataagtgagatcatacaatatttgtctttctgtgcctggcttatttctcttagcataatgtcctccagattcatacatgttgtcttaaatgacaggatttaccttcctttaaaggctgactagtacttcattgtgtatatgtatcacattttctttatccacttatctgttgatgggcacttaaattgtttcaatgtcttggctactgtaagtaatgcttcaataaacatgggaatgaagatatcccttcaacatattgatttctgttcttttggataatactcagaagtgagattactggatcatatggttgttctatttttttcagaaacctccatactgtttttcatagcggctgtactaatttacattcccactaacaatgcatgagttcacttttctggacatcctccccaacacttgttatctttcatctttttcataaaagccattatataataggtgtgaagtgacatctcactgtggttttgatttgcattactctaataattagtgtgagcatttttttttttcatgtaccgaatgtcttttgagaaaggtctcttcattcctttgcccattttaaaatcaggtggttttcttgctcttgagttgtttgagttccttatgtattttagatatttacccatttccagatatatcatttatattttttcctattctttgagttccctcttcactgtgttgtttccattgctgtgcaggtcttttattttgatgccaccccatttgtctatttttgccatgcttttgcagtcatatccaaaaaaatcattcccaagaccaatgctgtggagatttccccctatgttttcttcagtaggtgtacagttttaggtcttatatgttaagttttaaatctatttttttatatggtgtaaataagggtctaatttaattcttttgcatgtggatatccagttttcccaacaccatttattgaagaccctgtccttttatacttttcagtatgcagatcttttacctccttaaatttacacctcagtatttaatatttgttgctattatgagattttcataatttccttttcagatagctcattaatagtagatggaaacactactgatttctgtaagatgattttgtattacggaactttactgagtttgtgtatcagttctaccaggttttagttttgttctggtggagacattacagttttttgtatatggttatgtcatcagtaattacagatgatttaacctrttcctttcctattaggatgccttttttttctttctcttgtccaactgctctggttaggacttctagtactatgtcaaaaagtgatgagggtcgtacatggcctccatacctaatctgttgagagtttttaccatgaaaccaggttgaattttgtcaaatgctttttctgcatccattgagatgatcatatgatttgatttacaccctccattttgttatgtggtatatcacactttttgatgtgcatatgttgaaccacccttgcatcctaaggataaatcccacttcatcatggtgaatcattctttgtattcgtgaatccagtttgctaatatattgttgaggatttttgcatccatgttcatcagggatattactttgtaagtttctgtccttaaagtgtctttctctggctttaataacagtgtaacactacccttgtaaaatgaatttagaagtattccctctgcttcattgttttggaaaagtttgagaatttttattagttctttaaatgtctggtaaaattcagtagtgaagctgcctaatcctgggctttcctttggtgggatactttttattactggctcaatctcttttcttgttattggcttattcagatttgtttcttcatgattcactctttgtaggttgtatatgtctaggaatttattcatttctttaggtcatccaatttgatggtgcataacttcatagtagtttcttataatcctttgtattttggtgatatcagtagtaaatgtctcctctttcatttctgatcttatttgagtactctttttttctcctagtctaggtaagaatttgttgattttatctttcaaaaaaaaaaaaaaccaactcttagcaactcttagttttgttcatttttttccagtctttatttcaactgtgatctttgttacttacttctttatgctaactttcgggcttagtctgttcttttcctagttcctttaggtgaaaagtgagattgtgatccttcttctttattggcgtaggtttgtatcgctataaatttccattaggactgattttgctgcatcacataagttttgtttccattttcatttgtctcaaggtaattttttatttactttttgacttcttctgtgaactattagttgtttgggagcatattgtttaatttccacatattgctgtattttccaccagaattgattcttgttcttgatttctagtttcacgccattgtaatcagaaaagggatttgatatgatttctgtccacttaaacttaagattagttttgtggactaacatatatcctggagaatgttccatgggcatttgagaacaaaatgtattttgctgcttctggatggaatgtttcatatatgcctgttaagtccgtttggtctaaagtgtaattgaaatccattgtttctttattgattttctgtctaggtgatcaatctgcccatggtgaaaagtagagtattgaggtcccgtattatagtattgcagcctatctccctcttcacatcatttaaaaattgctttatgtatttaggtgggtcaatgttgggtgcatatacttttacaattgttatgtcttcttggtgaattaatccctttatcattatataacaaacttctttctttttatagtattgacttaaagtctattttgtctgatagaagtatagctacccctgctctcaatttccatttatatagaatatctttttccatcccttcactttcagtctatgtgtatgtttagtagaaaagtgaatctcttgccgggcgcagtggctcactcctgtaatcccagcactttgggaggccaaggcggcgggatcaccagaggttgggagttagagaccagcctgaccaacatggagaaaacctgtctctattaaaaatacaaaattagccaggcgtggttgtgggcccttgtaatcccagctactcgagaggctgaggcaggagaattgcttaaacccgggaggtggaggttgcggtgagctgagatcatgccattgcactccagccttgmcaatagcaaaactccgtctcaaaaaaagaaaaagaaaaagaaaaaaaagtgagtctcttataggcagtatgtggttgtgacttaaaaaaaaaaaaaaatccattctgtcattctatgtctttttgttggagaatctaatccgtttacattcaaggtaactattggtaagaaactgctagtgtcattttgtaatttgttttctgattgttttgtaggtcccttgtttcttttttccctattgctaccttcctttgtggtttggtggttttctgtggtggtgtgctttgaatcctttcttttatagtatatgcgattaccattgtatttgctgtaaggctaacttaaaacattttatccttaggctactttaagcgataaaaacttgcctttagttgcatacaaaaactctacgctttcacaacccccccgcctttcgtgattttgatgtcaaagtttacacttttttaaatttgtatctcttattgtagctacagttacaattacttcttgtagctacaacttattgtagctacagttgtytttaatagtttcatcttttaaacctcctaataggaataacattgctttacctgccacctttacaatactagagaattctgactatgaattacttataccatttagttttttacttttatgtttctcattaactagcagtcttttatttaagcctaaagaactcccttttagtaattccagtagagcaggcctagtagtgacaaactcccttaggcattgtttatctggaaaagtgtttatttctccctttgccaagtaaagtattcttaattaacagctttgtttccttcagcactttgaatataccatcccactctctactggcctgtaaggcttttgctgataaagccactgaatctgtattggggctaccttgaatgtgatgtttcttatctttgctgctttcagtattctttgtctttgatttttgataacttggttgtgatgtgtcttggtgaactctttaggttgaatctgatcggtgacctcagcttcctgttcctgaattttgtcatcttttctcagatttgggaatttttcagctattacttccttaaatatgctttctaggcctttttctttcttttctccttaaggacctcctattatgcaaaagttagctagcttgatgtgtcctgtaattcttataggcattcttttttgtttttgtttctcattggataatttcaaatgtcttacctttgagctcattgattcttctgcttgatcaagtctgctgttgaagcgttctacttagattttcagttcagttactgtattctttatctttagaatttctattgtttttgtttatatttgttaaacttctcattctgttcakatgttgttttccaaatttcatttttctatccatattttcttgtactttgttgaacttaagaggattagtctaaattatttgtcatttcacaggtctccatttcttctgagtctgttactggagctttsatatccaatgtacaccagaaactttgctaattccacagtaaatgttagaaatgggtttttattgataaaatcagtggcttgctaattagtatgttagaagctggcttgcattggtgaagttgagggtattcgatatacgtatcccggctaaaatacttctaaagaacctctccagctttgcaagaatagagtataggaatctgaggaggcctttaacatggccctcagaaaggacacacagggcttgacctctaaacatataaacatatacagaaacgaggtcagaacatgttttgactgatgccagtagtaacacagcagagcctattgctggtcactgttaccaataccttgtgtaataaacctttcatttaaattgagaggttgtaagccccgaaaaagcaaagggcttacagtacctcttgcctgaacactcctgtgtgtgctttctaagaaatgcttttaaaataatgcctgtggcacaaattgatttgacactggctctctttataagctgctatcaaggttgtggggaatagctaactcttacccactttccctgacaaataggaacccgtagttacctaccaaaagtatgtaaaagctatatccgacccaaaggccagttaggtcaaaacaccttgaaaggagctcagtttaaggaaatcagtggtgtcacagtgccccactagcrtgtaaaagttttcatagtttgactatcggatgygcttagtttcacagctgagtcttaccttgtgatacttttagagcaaaagtcaaatcaaagatgatttaaaaaaacatttcaaagattcataaagaataaatgcctcctcaggaagtcttctggagttctgcccacttcccttaggtggctctttactgtgcccatctcatagcctgtctccttccacttggtgtattgcagagtaaagctcactgtttacaggggtggtagaaagtgtggtcctttcccagactcctttttcccttcctcttctcatttttcagaagatgtgtttgataataaacgaaacaaaatgactaacacattgagctgagctacataagcagatgtcagtttgacgtgaagagtttaaaagatctatgcattatctggggactcctcccccagacctgaaggatcaggtgctgccttctatgccacctgtgcagacagcaaaagaggaaaaccatacccacgttcagtatgaacaaaggggacatttgaactctgtgtggacccctcattggaagggtgtttcttctcctgctgcatccacaaagagcactccttagccttgccttttgtcagttctctctccaataaggcttgagcagagacaacccagtgcagttcagagagactgaagtctggtgttccaggtctgagtcctagctctagctctctgtgtaactttgggatgtcccaaagtaacttttcacaacttgataggtgttaacttgaattttggatacaggtgactcttagcccatcccctctctgtgcttcagatatgtcatcacttgggccatatgacctctggacacctttcctactttccacaatttcagagcagcagagcagactggagctcctgctgcctctgagcttcagtgaattatcactcgttggagggaagcttcaagcattttgttatctttcaagagcaaacacagtgtctgtcagcaagaatatgtagcagatgctagtgaacagcagtgattagggttgaatgctggatttaaatatggagcttaggctgtgaaggaagcctgaagaacctagagccccatgaagctgccctctgtgagatctgacaccatttcccactgatgagccatgggtctaatgggtagcactgattccacatacagtatgtgagtgcaatacagtgaaagcaaagagaataaaatgatggctaacatgatgttccaaactttaaacaggagaaaaacacacaattccattatgtataagaacccacacagagatcaggagaataacctcattggagaatgaatgacctgtgtggggaatttagggtagagttgagattgaaaaaatgggccgaagtcaggtggccaagggccttaataccttgtatacaagatgtgtagtcaaggaagaccatgccttacttatgcatcaattcccttgggcctacaaagagctgcctagcctgggactgttgtagagaaaagctacagtgttccaatgacacagggactcctccatgtatgtatgagtgcccagctggctctgtaataaatcttatttttatttattaacttttcttgygcattggcttgatgcatcagttggaagtcagaggccaaacgaagtgaacactgagccaaaggaagttctcagcctttagggaggcagaattcactttaaacacaataaacaaatgaactcacattatacaggagagagtcagaagatcccagtggctggtgtcatcgggccatatttgcccgaagtgcctattccttataggaacccactcccagggytgatgggctacatccttaggaggctttatgcctatgttctcctgaccactggctcctccagggctggccttttttagtctctctgtagaggttcctgtagctggttggatataggctttcacagaagggtcagtgccttgggtcwggttacaggactgttaatcttgctttgttaagagtaatgttatttccccatttccaaattctccagggagatggaatgtcaaagatagtatgactgtagcacctaaatcctgggttccagaagcagagaagagaatayactgaagctgtagaaaggcctattagtccatgtcagagattaactggatgcgaggaccatttctgggatggtgtatacagaactggagaactggatagggagtcagaaacaaagagctgaagatgatgcctttgaagtttccaacgtggataactaggtcaacagaatattactcaagaaagtattaacataggattgagatgcagtcagtagtaatggaattgaaatttcaaagtatatacctcatggatctcagggggtgttgagctgatcacctgggctaacactcctatgaccctggggaaaatcaaatgacctggtactgtagccatggtaggggtgtcatcaccttaatccaactgggacagtgctgtttgatattcatctggaacttggtgcagacccacattttgctgggtttcaccacaaccaaggcttttttgattcttttctcttttaacatcagtacatcactgcaaagttaatcctcatataataggagatgaaactaattgcttataaaaacaagatttttacaacactaaaattgttcaagcatatgggcatatttatagttgcaggcagtgtttcagatgcagactgttcttggctgcagtggttgtttacaggcagcatctgttctgattaaatatttgatgattatccccgaatgttttaaagcatagtactgggctctgctgactgtacaacaaactggcatttttgacctatagggcactgggctaggagatacagttctgagggaagtgaaagatagttaacaactgcacaactgaccctttattagttgcaataaagcaatccaaccacccaacccactgtgatggctttcctactatttaaggttggtggtgtcaaagagacaccctcctgtacagtgtgcagtgaatcaacatcatttccacaaaacctscttcctgcacaaaggaattatcatactttgttacgaagtaaaattttcctgtatcagtcacaggagttcaccagttaagatactgttagttgaagacttctggggtgacttaatgaaatagctcagccatctggtttaaaaactggattcttctatccctccacacagctgtccatgcacctgcatcatctcaaggctggtctccctggtggtagaaaggctgacagtaaaaactggagccacatgattccttgcttaggcagtgtttcttcatactctcacatgagagcaggcatgttctttccctaggctcacagtaaacactctgtcaaatctcacaggcccaaagtgcttttggttatccccattccaagccaatctgtggcatggaagatagcattaccctgactgccttagactaatatacctactccacttctggggctgggaataattttgaggtcaaccatccaaactgcatgacagccattccatggaagaggtatggcctaaatctttggggcaacctgaattcatgaaaactctcttagatttatgtaactatttttagaattcacttctgtatcatttaattttactaataaaaataccacctttaccctaaatgtcagccaagcgtaaggctccgttgggacagaaggaactatcaaagctttgtgtttttatacattagcagcatttgacaaagaaataactctgaaggaaggagaataaccaggcagagtctagatgcatggaaaagaagtctttgagaaggcttcgcaggctgaaggaaagggcaggactacttcaggaatacaacgtttaagtaaaagaggttggggtctgttgatcttgaggagagatgaggatggactggaaaataggagtgagatatagtaggagaggaaaggatatggatgatgtatatactgtatgggtaaccatcagtcgaccctaagaagataatagttgttaaatggttagctatttaatgaaagaaacctgaacaagtaataatcttgagttgcaaagtggctggagtcacacaacagactaaatttctggtagaacaaatccagcagcttatgtgaaggttaccatgtctgaagctggatagaaaaggtctaacttccaaccaaagtcacagttcttgagctcggtacacagagacagactgctaacagctgatgtgtcctcagcgagagtgtcctcatttatatcctcgttctcttctgcctcctttttttgttttaaacttttgggaagtctcatcattcaatacagttctaatatatcacaataacagaggcggcccaatttctacaaattgactaattctatccctgaaaagttcatacaataaaactatacaaagcatcattttcaaccatcctatagaaaaatttccctattaaattttaactctaaatcctctatctctgttaataaccttactaaaaacttccccatcactgcctgccagggagatcaaaagaaaccaaatttaagaaacctccaacacctgtacctgactgaaaagcaaacatacagacctttcagtcctgcccctactattcagctcctatcacagagacatggtggatgtccccttgggaagcggatagctcttaggtggaagctaggcctgcaataagcaggccaggaaacatgtctcccaggccccatactcttggcagaagcacttggccaccagacagcatgtcctgtcaacctacagagttcttaaaaacaaacactgggacccagaatagtaccctgtggtyatagtgcccacagttcactaagcaccctcacaggtctttgacagaacactgactgccaggtcacctggtgggcagagaaatggaagattcccaggcccaactagcatctcagggaagaaccacaagcagagcaactttcagagctggtcggccagcgttggcacccagggaagcaagtgctattccatatttggagagaacataaaactcaaggaaayagagaagtcctactcaataccgttctcaactgaaaacaagagaacttgcaaaaaagaaacccagttttctggagtccatggagaaatatgaagccaatgctcggctaacagagcagaaagccttttataaataatgccagtcaaagctccaaaggtcagagctgatgcatgccggattgttctgacaatttcttaggtttctaggcaacaaggagctggtcaaacagctcacctccaaggacatactttataataccaccctggtagacgagagcgaggcagcagtgaaggcaatagtcaagaacaggagagggaggtaaagaacaagatgctcttcagacagtctggacaaagacagtccctacccagctctcaggagttgcctccttaagaaggtggaggcccaggcagctcccagggtgaccctaaagacagactccaaggaaaagggtgtgagggcaatggtgaatataaggaggtcccctttcagtaggcagagcaagtcagttcaggtcttatttttagagtctctgaacagtgaagagaagctttctgtggacagcattccaccaccatgggaggggaaaggtgccatgagagacttctccagtggggcatacaagcattgtgcagtgatccccaagatccagccactggcaggaaatcgaaaggcaagcttcttaaatacatagtatatggagacagaagtgtggagcactcccaaaatgaaaggccaagacccaggaacaacctccacaacctggagtatatacaaatgaacccagccctgctgactcagatccacaccatcctaaagcaggggtttctcatgaatgaaagggctaagtatttggtggagagaatgagaagtctcccactgcccacacattttttcttcagagatttcttttccaagagccccttgaataaaggaagggagggagcactgaatgccccasaaatcagaatgcatggtgcgggaagacgacaggaaatagttctcaaagagatcagaaaataaattggaagcaatttcattaccacaaagaacagacattttttctaaggcacccctcccctttccacccaattgtcattcagcaactactgaatacttaccaatgaaaaacgttacccctgacctcaaggctgctcctgagctctggtagaaaatgctttccttgtctataaaacatggcaagcaaggcaggatttaacagtaagggcacagtagcactgcaagccttcaaatggaaacctggagacaagcagtgagaacaggaagcaaaagcagggcaggtgaagctaggaccagggcatctggaactttccacacaggttggatctccatgccagacaacagttttcaaggaaaaatatctaagaggaacatgactttgggaaactttttggcagtactgcttactgtatactagagagtaaaagaatttggggaacattcaccaatttgcttcttcaggggcttgggtagggaacgtgaacaggaacctggctctaatttctgaacttttttatcagtaaaaacaatccaacaaacgaaagctagtcagtgagagaactgggagggtctgccctccttccctgagtcaagccttctggggggacctcctgacatttaattaagcaaagacaacgcccactgaaggaagctgacctgaaagtgacacgctactgtgaaatgagcatgaagtgggagcttgttacatatatgaaatggccagcgatcctgagcaaagcgcttcagagcttgagacctaagtcttctcatctatatactgagggctggacaagatgatctgtcaagccatttttatccctaatccaccaaaatccaatgctttagtttattgtcacaaaagcaggtatcgaatggctatcctgcagtgcctccaatcaacattcagactttttccctgaggcaatataagataacagttaacatgtttttatcaattaggtggtcatgagataaatatatatgggaagtggtagtttttcacttaaatgcatataataatggtacagctctctttgaatagtatttgtttatttcttaaatatttaagttcctaaagacggtaagaataacccaaggaagtgaaatcaatgtcacaaagcacatggctaaataactgcaggtttgcagtgccatgtgtgagatcagatgacagaagggagaactacctttaggcagaggcttctcatgtcccctggagtggccatgtgctgttctacatgactacttccacttyggttatgtagaagctatttaaagcacacagatgtttgtgatgagaaaaaagccacccttaattgaataatggaaattataagcatgatttgagggtgggggtggaggtgggagtagagatgggtagaaaggagtgcaatggaaacaaaggagccttcataaaattcaagtcacttcttaggataacgtgattgatttactcaccaccttcttaggaacataaagcaaacaagtgggttttccttttactgcttttctgaaatgagctacactcaagaaagcagcacgggggttgtgctgtccctgcacagtggcaggagagtatgaggagcaggtgaatgccacaacagctccatccaagatcatttttcacatgcaggaaccattcttatactaccctttactggtaatttctgtagaaatctggaagtctggttgacaccctcctgtacagtgtgcagtgaatcaacatcatttcccttggactttgcaatcacggtggcattcatacattcattcaacaagtatgtatgtacaggacagtggagtaaagaaaacagatagttcttactctcaygaggcttaaaatttcaggagggaactaggcagtcatgaagtaaacataaaaacacagattgtaataggcactagagaataatgaagactttggggaacacaatttaaattggaaaaatatctcagttccgttaacacatgttgaaggggaatagcattgttttgctggatttggggcctggatgcaagcatgttgggtatgcattgtagggtaatgcatttccttccatttgggcccaagtgtatatttaccacccagttgtgatgagctgggatcctcctgctcaatctcagcttgaagcacttggaggttatctgcctgctgtgggtgattattttggagcaaggtacttcatttgcctcaagaaacagatttgataccactactgtgcccttttggaacagagaagtaggcaagaccccagtgtgaggcagagtgatgggatctttagggacataattgatgatgtaactgatgatgattttggagtttatacatttccaaagtttcaaaatattttcacttggttgatttatctttatggtgatgacactamgtagatatatgcccttcttaaaagttacagtaagaggctgggagcggtggctcacgcctataatcccagcactttggaaggccgaggtgggcagatcatgaggtcaggagattgagaccattctggctaacacggtgaaactccgtctctactaaaaatacaaaaaaattagccgggcgtggtggcgggcgcctgtagtcccagctactcaggaagctgaggcaggagaatggcgtgaacccgggaggcggagcttgcagtgagctgagattccgccactgcactccagccwgggcaatgagcgagactccgtctcaaaaaaaaaaaaaaaaaaaaaaaaaaagttacagtgagagttgacattgagaaaagggaggcccagccagggttatgcaaagacacagtagggaggaggatgggaagtttctgagacaccccagtaactgcatgggtccacaaagcacatgtacagtctgctctatgcactgcaggtacagccacgaataagacaaagtctctgccctcatggagcttggtgtctgtctactggagcagacaaaaacaaacctgctttttctcatttgcctctactgtgggttccgtgtataactctcaaatgctagcatttccatgcattccatccttgtccttctctcctctctgccttttccaggagaattttcctagccacaggttcagctatggtctatgtgctggagtcatacatttttatcttctgtgtacgtttttctctagacccatatttttaattgccttaggacagctctccctggatatccctcagacacaactaaaacatcattcarttgtactattaataattttcccttcaaaatccactcctcttctctatagacctaacagcaacactgtccgtccagctctcaaaacctgaaatgtgggagttgtctttgactcttatctttcccatgcatgagcactgaatcaatcagagtccctagcatgtcttggactgtggcctcccttctatcttcagattatctgcctttttagaattatggcaataacttaactgcaaagaccacatgtgcacttgtsstctttcagtttgtaataaatataaaatgaaaagtgattatgtctttgcttaacgtctgcaaaataaaagtccaaagtccttggtatggtctataaggccctcattatctgacctgcctgccttcccaatctcatcttaatcccttacagcctgacactcagacatactagactttccacctaactcactcacatacacctatcctgtatgtcaagattcggcttgaccttcatcacctacctatctgcagtatttttggatctgaattctctgcccacattgtactttcacatacttcttttacccttagtggtttgtacttatgcctggtctaactagattgtctccctgtaacagacttcttgattcaacaaagcagctctgaatcagcctgaaacctatggcacactgcaaaatggcaaacattcaataggtatttgcccagtaaatgttaatgaaaggaaaaaaattcaaacttcagttggaataggattagagacaagttaaaaaaaagtttcccatagaaatcttcctcatcgtaaatatcatcatcctaaatgtcccgagtctttccatgggtctaatttaccaaatcatgaagactctstttctcactgtgtatgygtagtgggagaggcagagacagaacggtttttttttttttttgcaagtctgctctctggattcgtttttctggggatgaaatctcaggctatgtagcttttctggtccctttttggtaatcaacaaatcatcagtttctctaggtattaaaaagcctacacttttgaaacaccaagaggccaaactctctcttaattgaaaacataattctgcctcttactgaggtctttgggtgggaagcttaaagacagcagtgttggggcaattggtttttcttttcctccctccaccttctttcccattcaagagctgttgctgccctttctggaggggagggaattagaaaaaaagatcctgccttacccagtcactgttaattattactttgagccagggtggggaatgactttctttcctggaatacaccctgctggaaaccacagctgagattctctaagctggcagcttccaacctctcctccctcaacagcttcaacattatatggcactcagctgcagggtgcctggctccaggccggcagtccatttgtgcagggtagttttcaagatggctcatagcccatctctttcagtgaccagcgtggcctatgggaaacatacatcttgactccattattggtaggagtactctttagttaactgccacaggccagttcagacacgtcttaccctgagagccttttcagagtcaggtaccatccctgtgtcccccagcatctgaagatcacaggtgaaggtctccaagtagttcacttaaaaaatacctcagtaggtttaagaacagggaaagctcccaattcattctgtcaggagtatgactctcatccccaaactggacagatatataatatgaaaactacagaccaatattccttatgaatatagatgcaaacattctaaacaaaatactagcaaaccaaatccagcagcatagaacaaggtttatgtagcatggacaactgagattatcccaggaatgcaaagttaattcaatatacaaaagtccattaatacaacatattaataaaggacaaaacaacatgaaaatcttgatacagaagaagcatttaacaaaacccacagcccctccttttttttttttgattaaaaaacactcagtaaactaggtttaataaaagaatttcctcaacttgaagcaaacccacagctagctaacatcatactcaatggtgaaagactgaatgctttccccttaaaatcaggaacaagaaaaagatgtctgctcttgtcacttctatccaatattgtactggaggtgctagccagcacactaaggcaagaaaatgaaataataggaatctagactggaaaggaagaagtaaaagtatttctgttcacagatgcatgatctcatatgcaaaaaatactaagtgacaaaaaaagaattttagaaaagctacaatatacaaaatcaatatacaaaaattaattttatttctaacaccagtgatgaatacaaaaataaaaattagaaaataatcatataattaaagtggcatcagtaaaatacttagaaaaaaattaaagacgtcaagacttgcacactgaaatctctaaaacatcactgaaataaagacctaagcaaatgcaaagacatcccacagtcatggaacagaaaacctaacaccattaaaatagcagttatttctcaaatttatctaccaattcaactaaatccctatcaagatcccagctgttttgcaggaattgacacaatgatcatataaaaattcatatgcaatgcaagggacscaaaacagacaaaatgattttggggaaaaaaaaaaaaaaatggaggacttgcacatcccaaatctaaacttactaccaagctacagcmatcaagacagtgcggtgctggtataacgayagacatatagggcaatggagtaagactgagaatccagaaagtcttatatttatggtcaactgttctttgacaagggtaccaggaccattcatggggaaataatagtcttttcaacaactggtgcttgggcagatggatatacagataccaatgcacttatgcaaaaaatggatgaaataggaaacttcactacattctactgcatgctcggtcattttcaatcatttaggtggcaacactgacaagataacagaaagatggaggtaataacatgtgaaaggcaaaatggtttktttttttttttaaaaatgacagtctctatcatgaatttacttacactccaggcaaaggttattagaagaaaaaaagatgtaagaaaattccttaactgaaatgtggaaagagtatcaagaggagaccctaagacactctgtaagaatcccagtgactcctcactgttcaactaagaaatgtaccccattatgctgtgctaccacggaagcattggaggcactttgggggttgatgaagtcttcatggatgaggtactttaaatatctggtcatgaagagtatttgagaaatatgacaagtgaagatgctgggtaggaatgcagcgagraaagtgtgtaacacaaggccaaaytggaaaggtcagtgagggggcaatctgtggaggcactgaatgcagaggatattaaaattagcaagatagtgttctagcacaatgaaaaggattggaagagggagatgagagtcagggagtgaaattaggcagctgctaagaatgtccgggtgagtcagaggatcaggacctgtaagggcagtataaagaaggaaggaatgatgggagaggtttagggggaaagaagtgacaacctgtgacaattgaggaatgagagattttgatgattggggtgaaggttacatttcttaaaaagaaacaaagaatggtcggtcgatagagatgcaagatgaagaattttgtttttaggactactgactatgaggtaacaaagaaatcccagagacagaggtctgagcaaaagatatgggattggggaagaatctttgggagtgactgaggttgactagagggaactgggcaagaacaggtaaggactttaagcagaattggaggagtatccatctaaaatctgggtaaactgggatggaaaaacaagtagccagagaagcaacagcccaagctagggtgttgtcaaggttatagatgttactgattttggcaatgaggagattataaggatccttgaagactgtactttcggtgaaactaccatgcattagtagcctttcacagtgatatctaccccacacctgcatcaaaatcttgcagtgcctattaayaaatgccaacccactaacggggaggggagaaaagacttgggactctgtacttgtaaaaccctctaccctccccaggcaattctttacacactaacactgttgaggtaaaaggagacaagtgagggagcaaatggaaggtgtgtttttggattatacagtggctcatggaagggtgggaggggtacagatggcccttagacactggcggaaagtcagagaaaaaaaattacagtaagcaggtaaagggatcaagactacacagggactagtcttgggacgacatttcttcctctgacagtttgtatggaattcttgagaaaaattcctcgaaggggcctgaaatctcagaatggtcatgtttttaatgggaatagggagtgatgctgccccattacaaccatctgttcwaacagaatgtctgtaccgaggagggatgagtaacatcrgcaagttctgttcgaagcctttttcaagtttctttttgatatgtatctatctatctatcatctccctatacaagcaagcatccccaaaagtagttgtctcaggaaaccagggttaggatgaccagctcatttgctggagctgccaaggtccagaaaagtttggctgcaggctgttttcatgttttatgtatgtttgaaatgttctataataataaaaggttraaaaagtttacatttatttggaaaaccagttactttagtttatggttcctttttttccctccagagcttcctggagattgaggtctaattcaaagaaaaccaaaatatataatagagtacctgggcaaaaaaagtacttttataacataacatttggggtagaggaagtatccactgtagtcaaaatgtctatgttttgctcttccttattgttcagggacattccattaaatagtaatgaaaaggcagcaaaagtaagaggagtgacaacatgcccggcataattaagcaagcyagagcagctattctgtgcaaccgacgattttttttctctaaaattttaagggtaggttcattctgactctgttaaaagtctacttgatgtgaacaactctatatctgataacctatttcaattaccactttaaaacttgtcatatggatacgttattacaattgtagaactttaataaataccataataataaaacttgagaactgaagagcacacatttcttcacgaatttattatataaaacgccctcagagtatttaatttctcctcactttaattacacattaagaagcacagtggatgagaagcctttaagatgactacagttgcacgaaggtccctttcatcaaggtagcgtatgtaccctaacagtgttctaaaggctggcccagaaaaaccccatgttaccttatcacaatatggaaagcattgtcttctttttccactaaattaaattatggtgaaaagtgccacagttttatttagcattatggtacataacaaacagttctgtctcaattatgaaaaaaattaattaaaataatcctgaaagacatcctttttctccccccaatgatttgaaagctgcatttttcctgccaatttcaaacaaacaaatcatcaggttgatctacagtaatcagttaaaacaatcagtcaatcaatcaatcaatcaccaaggcacaagctcagcacattagctatagcttgtagcaaaaggatatatcaatgtctcaccttagttaaaaatacataatccttttattttataatgcaataaaagaaattaacaacatcacatacacagaagactaggaaaggggaaactacttacttctggaaatcagtaatgtaaacytacttgtacttttccatagtacatgaaagtaacgtttaacatgttttgaattaattaattaaatttaatctgtggggctatacaatgtaattcttaggagtaatagtttcattcatttccaggtcagcttactgtatgattaagtaacacaaggcacagtagccatctttttcattatgttgcaacactgatcacgtgcctcgataaaatggctgattcaacaagatgatggcaacacgaaggggagactttggattgtctatttaaaatctaggtaataagtaagtaattaataaaaactctatcttaagtgcactttcacatgctttttgtttataataaacaaacaacaaacttcctaactttgttgcaataggcttgactaccatttcatttggccaaatgcactttccccagtaaacttaaaacaacaacgagaacaacaagaacaaaaatccctgtcctttcatatactaagaaagaggattggctactgaaacagttcattgcaagacacatgaagacgacatactgtggcatgagttgtttttgtttttaatttgttgtgctgttactaaagttctgagggctgcagttaaaacattccaatttctcccttccttccatctttctttattgattgattctcaagattttgcacagaaaactctttgggggctagaacagcagtaattgcatcacactgttttcaagacttcaagtttcaaaagcaaatcattaaaaaaaatacagttcctgatttgagttagatacagggacaaaaaagtagcacatacttgaaggttacgtggtctacaaatggtggcaatattttccttgggagagtagttctgttggtatatattttttaaatactcaaaaggctcaacctcaagcagtaataaacacaagcaaaagtgatttaacccttaaaataaatattcagaaaaacctctctgtacatacaagtgaaagaatatgtaacactttcacgcaaaaaaataattataataataataaaggatttgttcatatatgtagctgaaatctgctgttccagcccacatgtccccaataaagaagggaggcacagacataggtgactactgtggttgactatcttacagcctttttgtactgggacactatcaccaccaaaaatttatccctcgttatatttttaaaattttttaaattttttctttttttttccttccttttttttgttttattttgttttgttttgttttacagcatgccaaatcctttggcatacgtgatggccttcaacaatctctctttaagtttttctttgcttgagtattccggaagtaaaagcacattaaagcaagtatgagatgtaggtaacctaaatagagaaaaggggaaaaaaacaggaaaactgtaagtcatgggaaatacacttagaattaaatgctcctatttttagattgtatatagttgagacggtctgcaatgcaaactatacattaatgcaaatcataaactttttgttgtgtaactaccaagttgcctttatcctataaattactcaaagctagtgacgatgataagatactgtatccattgagtttttactacataacagataccattttaggtactgaattcttacagttcatttaactaaatctttccacaacaaaaccacagagaggacatcagtaaatgcactttagaggttaggtcactgagaagtcaagtaacttcctctaaggtggagaaaatactcaaacctgttttacaagactgcaaagtgtgtgctcttaaatgcttattagaaacactgctggcaatatgactaagaaaatgatttgataacaggattctagcacaatcaaatgataatcttccgagcctcaatgtaaccattctaaatagatgatcatgttatatggctttcaattaacaagctgggaatcaaaaaagtaaatgaatcacactaatttgattccaaaccaatgtgagccccataataatttttaactagggcaatttcttaaaagtttcctcacacaatgacagcaaagtattttctcaattgtctaatatgatttggggatttgtatataaaatcacgaatgtgctcagaaactataaagacagttcatatgtatgtgacgaggaatgcaaggttttcggtaggtatacagtcacaagttaataattacctacctttctgtgtctgggccatttttggctataatcatctttaattttcctagtcctcccacaggtgctctgtctgtgcccgttgtaaactgcaagaagagtcttttctgttcatctgtaaatgaatgaacgatttcccagaactccctaatgagaaaaaatacaatactggtttcagtttggcattcattatgactggtactaacataagcttatgatttgcattaaaactatattaagagacaacttggaagttaattatcaggatagtatcacttctggtgatttaaaaatttccaagcaaatttatcctgaacagctctgaatacgtaaaaatttagattagattacaatatagtaaaatattagtactacaatagtaaaaaattgagaaaacccaagtgtgtagtaacaggaagtgactatttaaactatggtataatcacattatgcagtcagtaatgagcaaaagacaaaatcctatgaattgaaaaagactgaaatgaatatttggaaaaattaactccaggtgcctttgggtatatattttatttatcctttctcctttattctcctggtctactcatcctttaactcaactttgggaggaaaaagtgatacagattaaggacaaaagaaaaaaagaccccctgccccaaccaactggccccaaatgcaaacaactacatacctaatagcagtaatacaaaagttcaatttttatatgaactagaatactttaaacaagtaatatgtgctgtgtatggaggaggagaattattctgacatttctgccacctgcagttattttaagagaatgatttatcctgtggcattcctaaaatctatgtaataaaagctatgttttaatgacacttatgttagtttgagttctaaaaaacgaaatacaagctcataaagtgcaatcttgaagtttatttgaataatcaggcatctataaaacatatatacactagttcatagctaaataaatttttttttttttgagacagagtcttgctctgtcgctcaggctggagtgcagtggcgcgatctcggctcattgcaagctccgcctcctgggttcgcgccattgtcctgcctcagcctcccaagtggctgggactataggtgcctgccaccacgcctggctaattttctgtacgtttagtagaggcaggatttcaccatgttagccaggatgggtctcgatctcctgacctcgtgatccgcccaccttggcctcccaaagtgctgggattgcaggcatgagccaccgcgcctggcctatagctaaataatgttaagattaaaaaattaaaaaaaaaattaaaagtatttttagttgcttatataatataaaatgcattttaatagttatttagaaagttctttccagagccaggtgtggtggctcatgcctgtaatcccagcactttgggaggctgaggccagtggatcacctgaggtcaggggttcaagatcagcctgaccaacgtggtgaaaccctgtctctactaaaatacaaaaattagccgggcgtggtggcagatgcctgtaatctcagctacttgggaggccaaggcagaagaattgcttgaacatgggaggcggaggctgcaatgagctgagatcacaccattgcactctagcctgggaaacattttgagccatctcaaaaaaaaaaaaaaatttcatctcaaaaaaaaaaaaaaaaaaaattccagaatgttagcagagaacatcacacatcccaaaccagtaattacaattttctaccttttgatattctaatatcccaacatactatttttattaccaaaatgctggcatttttggtgctgcaacaccatttatctgaaataacttaaaagttttattagaattcttggctttctccaatctcttgccacttcccttccctgcccctttacaaatccaccagtcagcaagagaaaacaaaaaagaaacacacaacaacagaaaactggacatgaaacttgcaggagcatctctcaggtaaggaggagaggaatcggaccccagttcatgatactccttttggggaggctgacaagagaaaacaagtctgctgtagcacagaaccctccaacatagcagaaaagctgccctgcagtgggtggtaataaagcctcctcacactgcaggagggctctgaagcttaactgaaccagctacacctaaggaggtagaccaaagagcaccaccgaagaacagagacagaccctgcaggaagtggcagatcagcagtggtcacaatgaccagtctggctatattattacggagctgtttctttggacttttaaacgaaacctttaaaaattttatacaatgaaaacagggaacaaaatgcatctctattcctataagtgttatgtgtgttacattaacattttgaattaaacaagaatgcatatatttagaaagctgaagaaaacacgaagaagcttccaggtttccacataaaagtggtggctgtatcgatcacatcctactcacatctctaaaaatctacccggatcaaaaaggggaaaataaaaaaaaaacctatgacttaggtctagagtaaaactaggagacagaacaataaactccaaataccaaagaagtggggaaatgagcagggtccagcaggagctacatcgaagagtggcttgtgcggaatcatactgattagggatcacccaaggccagaccccaccccctccaccacctgcccctcaacagagcactactgagtgtaggttagagcactggcaacagggtggttaaaggaaggactacagaaaagtacttgggtccagcaatggcaggctcaggaaggcaccatgcatgaaaggaaggggggtaccttcaaaagcagaagtgtcccttaagcggctgtaaaggggtggaagcagctaatgaaaaagagtcttcattaagctacatggagctgaaaaatcagaaagtggtgattctgcccttactaaagcaacagaagagggatcccttcaaccaagacccctaaagccacacaattcctccctgctccaccatgaggtctagtaataacaggtccagaaaaaagtaacatctgttatagaaacataaacaagaaaaacagaattcggaagtctaaataaagttattatgggaagagtctggcgaatgagaagcaaaactttccggtagacaaaagtagaccagaaaaattcagtcataaacaatgggaaactagtaacaccacattccaacacaaaaggagaatgcagcagcagacaagacagaccaccagtgatgagaaatacaaattcagaaagaaatgagcacatcttaaataaaaataagaatactaaaaaatactgaagaaatatgcaaggtaactttggaaataaaggctaattttattataaggtgaccaaagaagaagcagtatgactaaaatttctactgaggacagactctagaaaattaaaaaacaaagaaaatgaataaaataaacataactaaagaaatgcatatcaaagcataataacgaaaaagattaatagctaactacataaacataaaacctttcatttggcaaaaaaatcctataagcaaggttaaaagacaaatgacaaactgggaaaaaatatttgcgaatttaccagcgttaaaggactaatctccttaacatataaagtttctaaaagtgaagaaaacgaccagctgagcagcaaaatgagcaaaagactatataaaactataaacagctctacaagaaaaaatgtccattatcattcataattgaggtaagctcaaaaattgtaactatagtaaaataccatttctcaattggcaaataagtaaacatccacatttaacaacacattctgtttggaaagttttaagaaaagagatactgttgtaaactgctggtgggaatgcaaaatgttatttttctgtgaaggaggatttggcagtatctagcaaaattacacatgcatctaccatttgatgcaacaatcccacttctaacaatttatcttaatgatactttacatatgtacggaataatgcatgaacattaagaggattcactgtgacattagtactaacagcaaaaggtt

SEQ ID NO: 96379 - DNA, 58415 bp, Homo sapiens
  misc_feature (1)...(58415): n = A,T,C or G
tttataatggagagtgggagttacgagaggacccatatagtcaaggcagcataaaagagccctgatgtccagcagggagaaaagggggaggaaatgctggtggctggagctacctgggcagaaggaggaggacagtagatggttaagcatattggctctcaagtcagaaggtctggggtcaccactcacgtgatggtgaccttggaacagtgagataactatgtaagtctctgtttcctcacatgtaagagggatgagtagtagtattactcatgagactactttccaaagatgaaaggaaatagttcgagtaaagtacctatcctacagtaaagtcttgaaaacagtagatgctgttattaggaaggggatgtggattaacctccccttcttggcctttatgtgttcctaccaacaccactaattgctctggaaggtttatgagtctttacacacagagcgacagcatgcctcctggtaccctcagcgttactttgcttacccctggcttaaaggtatagatctttattaaagtacttaggccccaagatgaaagggtataaaattgaattattccacctgaagaagatcaaattaaacttttataacttaaaaagacttatcttgactagttgttctttattctgcgcaaaatatgtttaagtttctggttgatcaatatttagtctagatctaaggaaaaaacatgagggcattaagaaccctaattgactgccaaaagaagttatgaatgctctttctctgaaagtatctaagtgaaataaccacctataagtacacattgggttaggctgcagtgaaaagatatttcttttttctttttaaatattaggaaatactttagggactatgatataacaaatgtaaattgatgggcacgataactcaaggaatttcagtctgttaacctttagaaccatggcttttatattcagaattgtgctctctctctctctctctctttctctctctctctctctcaccagcatatgtcaaactctagtctatagtctgcaaaagaatcacattaagattaagattcaggtgggagcagtggctcacatctgtaattccagtactttgggaagctgaggcgggcggatcacttggccaggcggatcagcctggggtacatggtgaaaccctgtgtctactaaaaatacaaaaaattagccaggcgtggtggcacgggtctgtaatcccagctactcagggggctgcggtgggagaattgctggaacccgagagtgagctgagtgagccgagatcgcaccattgcactccagcctgggagacagagcgagactccatctcaaaagaaaaaaaaaaaaagggattcaacgtagtctacaagagtttcatatgaagatttttaaaatgcagattcaacccaaacctcctgaggtctgggaatctgtgttttaaacaagctcctgatacaatgtatgagaattgctgcttccgaactcggagttacccagggaaaaaagttttatataactccttgaatgccaagtcctgtccctcaggaggcaggaaattagtcctgagaatttcatcctccctttctcagctagttccaaaaacagtcctgggcccaggctttgaggctcagcccaggtgttgtgatgatgtataagaagccagttaaagaagccagctcctctctgcagctgcagccctggctgttgccatagccactggctgaccagtagcatggtcagttcaagatgatcccacaaggcaatcacaggatgaaccagctggattcttgaagtgtccttctaggtctataaattccactgctaaattcctattgccctgaagtagcagcttctccacttcttatgaactacattctacttacagttactcacctatacacctgccctcaaggcaaatagaaaggaaaaatgaagcacaaataacgtggctactaggcaagtaggaaaatgttaagttttctctttcaaatgactgaagagcacctgctgtgtggcaattccaaatcttaaaagaaggactgcaaaggcctgagtatctctctgttggctactctcccctgccagggtgtacaactatcagatatgccaaaagaacacatcagaatgggacaatgcagggctttggtaatatatcatctttccatggctgagttttgtgtggttggatgggatggaagcaaaaacaatccacttgattaacaattcagcgtcctgagaagacccctccagaaggggatactttccatccttcccatcattatgaaattcaatcatatagagaaatggggacctgcataaatttaacaatgcaatatagacacatattttcaacagcaaagggggaagtctccttttcttttttctcgttaaagacacatactaacactgcttgataaagagcccatcacaagtgttaggtggagaaaggaaaaagcttaaatgtttgtacatcttttaccaactttctggactcacaatcttttttaatctcccaaggaaaccccagcacacctgtgttccatataatagcagctctcacccagcaggtacattgagagaaaggaatctgtcagcacattaataagatcctgacaaggcagggaggaaaggctgccagtgccataagaaatactgtctccaggaaattaaaagtgttccatagtgcgcttggtgtacatctgtttatgttcttgtttcctccactggcaattgctcctgtcaatccatgaattctgtactatgaacgaaacagaaaattgcttcagtagtacacagtcccagctgggtgttaaaccagcagtgtggtgatattagactcaagcttagatgctcttgctttacacttctttgagctaaaaagaaaataaggtaatgtcaacaacaaaaaaagagacaagtggtacttaggagaaaagtgaaaaaagtaaaaaccatttgcttgattttgtatgtgtgtgtctgtctgtgtgcgtatatgtgtgtttgaaagcaggtggggagtttctagaaaaaatataggatatggagtctcaagatctctcttttaccccaaagacccaccagctaacaaggatcaagggaataggtaggaagaaacagagaaggcatggttgctaggaggttagaggcaaaaggaacaccacagacactatagcatgctgcgcctttgctggcagacaggggctatcagttactaaaactgccatcatgtattggaggacattaactgtccaccaaagtcagtcttccccttctttcattgtagctgaacacatagctgttcagcagagaacttcatttcacagcctcctgggcagctagaggtggccaagtgactaaatcctcaccagtagaacacgagggaagtgacaaatcccacttcctggtctgtgcacttctctgggtgtgcctgaccttctcacaagctgcaataccgacacacctatgaccagcatggacttgatgagagcatcacactctgagggaggtgggaacagagatggaaggaatctgtgatcctgaatggccacatggagcaaatctaatctgaactaagaaaaatacatttctatgtattttggagattatgttttgaggcctctttgtaactaacatagttttcaccctaatatacattataacattttgaaattaaagtctgagaatggaactaaaatgccctcagaatatagttgttttctctgttatcaatcatcccagatttccagaagtattcagttttagaggcaataatacaatgattatttcctgaaagttcacacaagacagctacagtgattaaaagaaggaacattacatttttttaaaaaatcatcctaaatttatcaaaagtagaatgatccataaaaaattataactgtcaaatttgtgttagccacaaatgtgttcagccaccatagccacaggtgaaagcataggtactatttggggctaaaattgttgccccccaaattcatacgttgaagtcctaactctcactatctcagcatgtggctgctggagaagggtctttaaagaaaagtaaggttagccaagtcaggcatatcacttgaggtcaggagttcaagaccagcctggccaacatggtgaaaccccgtctctactgaaaatacaaaaattagctgggcgtggtggtgtgtgcctgtaatcccagctactctggaggctgaggcaggagaatcgcttgaaccagggagtcagaggttgcagtgagccgagatcgtgccactgcactccagcctggcaacagagcgagactccgtctcaaaaaaaaaaaaaaaaaagaaagaatgataaggttcaatgaagtcataatccactatgatggtgtcgtaagaagaggaaattaggacacagacaacacagactgagggacaaccatgtgaagataggagaagacggcatctacaagccaacaagacaggcctcagatggaatcagtcctgctaacatcttaatcccagacttctatccttcacaactgtggaaaaatacatttctgttgtttcaggccacttgctatggttctttgtgtggcagcctgagtagataaatacaaacaataaatgttaaatacttttcttttgtatcagaaccaaggagggattctctgggttggttctctgacaaaaaggaaggaagaaagagaaggaaagcagggagggagggagggaagggaggggggaaggggggaggggggaggagggagggagggagggaaatattatttccagcaattaaaatctttgggtgtttacaagtcacatgctttgattatatttaaattctaaataattctacttcccttccgtttagacgcatgcttcacatcatcttcagaagtaaactccagataaagacttaaatataagaggtaaaaagctaataaaataaaatgtgggaagtcattgcagtctatgagtagacaaagacattttgaatatgaagctaaatcctcaaatcacagtgtcacaattagatgggtttaacttcatcgaaatgaaagattgtgattcaataaaggatatcctagaaaatgtgaacaaactaaagaaagtatctacaataactaaagtgaaaggagattaatatacagaatataccccacaaacacgggaaaaaaagaaacaaaactctttcaaatcaacaggaaaacaatgcaatcactaatagaaaaataaataaaggaacaggtaaagcccaattgtctaacaggtatatgaaggaaagttcaacaccattagccacagaaaaactaaaagattaaacatcagtgagattctacattattcattagaatggcaaacattagaacactagataataccaagtgttggagaggagatggaaatgacagaaacaattgatatgttggagtgaatactcttggagtgaacaatagatactgttagagggaatataaactagtccagcagttttggaaagcaatctaacaacattggggaaattaagtacagaatctcatatgatccagcaattgactgctgggtgtatgtctcagggatactcacacagattcataaaagcacatgttccaagaatattatttgtagtatggaagttagaaacaatgtccatcattaggggaaaggattagtaaaataagatagaggcatactatgaaaatatacaattaccatcctgccttgcttaacaacagtaatatttaattgcttaaagactgtgagtgggataaatggatagcctttaatcattaaagaaaaaataattgataaaatgtctctcgttttccttttctctcttgtgagttgctccttcaaacacccatcttttaaaacatgagagatatccagcttaagactcaccatgggcctcggctaaatcttcatgaatttgatgaggttaagaaagcaactacatttcctaagaaagcaactattttaaaagagcaaacctgggtgtggggagggattaggagtagagtttgggatggcagcctcagaaggacaaacttaggccaaggagggagggrgttggggtggagactgagcttctccagttggaggtctggagctaggactcttcattgaaaccggagagaaggaaaaggagagagtgaggctgactttttaactgaactccaaaattctctgagcaatagaatgggcctaatatgtaccaggtgggatttaattttaaatgaaagaaaaatgtttcmgatagcagggactgttaaaacattgaaattgaatgttgtggatctcctgctgtgttggttttcagtattttttagagctttgttatccagtattatagtccaatttaggctaaggaacagaataaatttcctaagagctgtaatttgtgttttcatgtgctttccccaaagtattatcaactgctatttgatatcctgtcctttgggcatatttttgttgttgttgttgttaatgatggtggtgcttttttgtttgtttgttttaagaaatgaaaagaaaagattggcaagtccctggagagacattatccccccaccccccgccaaattttatctattgcgaacagcagaaataccagcatgttcagatctaaaagcagtctgtttcttctccaggttaaaaaaawatatacttcttatgactctggacttaaatttgactttttaaaaataagaaaaattaaagaagggtaggaaatattggtcacatctccgcgtgattctaggtcctcacttctgctacccagtaattaaaatamcctgcgttatcctttagaaattacacgcctgtgtctttaacaaactgtaagagagaagggggcgggtctcgggaacggcgaaggctctgattggccctcctggcaggaactgggcggtaamwtagcccttctgttactgtccggggctrcggggtgagaggccagggccgagaagggcttcaggacgcgggaggcgcacttgcttcaagtcgcgggcgtgggaacggggttrcaaaacggggcytctttrtccgggtgggttaagggccctggcagctttttcgcgaaggcgccatgtcctagcagttgggccgcagtgggcccgaggtccactcggaccgccgagacggctcgatggccctggagctggaggaagggggatacctgggcgccggccgccgccctcgcaactcggccgaggcccctatctcarcctagtttctstttttcccctgttctgcaggcttgcttccggcgtcatggctcaaagggccttcccgaatccttatgctgattataacaaatccctggccgaaggctactttgatgctgccgggagggtgagtttaggatatgtctgcctgcatccctgcctctccccacggtgttcggaaaggtgctcatttttgcctgagagagttgagcatccccctttaaaaaaatacatgattcgacgataaatacgtaaattatttaaaaatacatgttaatatatacaaattgagctctaacataatgttaaatgtgtcattgttaacattattaattgaaataaactcaattattgatagtataaattttaaaaattggcaaatatgtagtttactatgtaattggcattttttaatgtattttggtttgcttcttaaaaagaggtgaagaatcctaacggtattcacatgtgccgtgttactcctttgtkattatacacaagtgcgttcaggrtaatgatgagagcaaacggtggtgtatggtaaggacgtctttaaactgttagtgcttagagaatttggggacctaggaaacctgaagttctttgtaccggtgtcactccacagggcatatccacagctggaaaacaaaaaaaaagaaacttgtaaattaaactggttagcatgtcacaaatcactgtgcaaaagagaacctggatgtaaaatactaggggcctgtgttttctcatgcctcattgggtgaacataattgttaagagggaatacagatatttttaagaatacctacttttggctgggtgcagtggctcacaccattaatcccgacactttgggaaatcaaggcaggaggattgcttaaggccacgagtttgagaccagcctgtgcaacacagcaggaccttatctctactaaaatttttttaaaaattagccaggtgtggtggaaagcttgtagtcccagctacttgggaggctgaggcgggagaattgctggagcctaggagattcgaggctgtagtgagctatgattgcaccactgcactctagcctgggtgacagagaccctgtctctaaaaaataaaaaaataaaatttagttttgaaaatgagttaagttggaaacaaggcacacgctttaaaaattttaccagtttatttctttgaaacttgtcagccatacaaaagacattttatgtgatataaaggccttacagatttcatccctgtcaaattaatctgtgggtctgatggttgtttttttccttaaaacacttgtcacattatagattaacttgggtcagtaatgcaggtaggaggaatcaaagagatgaagaagaggtgtagggtagaaggctaccaaaatgtatatggagtttgagtcaatctgattattttaagactagtattaagctgcccaaacaaagctttttataattatcttcaggtcagatggattccctttggccatttgggcctgcattctgcttagctgtgcagattctcaagctgaagtatgtgtcttgtcttgcgggaggaggacttgctgcttcatactgacttggcaaagagaacagttgaggattgtcctagtgacagaaaccttcaataaaatgtacctatttagactgcctataaagtaaatgctttttatgaatttaaccctttatttatttatttatttatttttatttttatttttttagacggagtctcaccctgagcccaggctggagtgcagaggcacagtcttggctcactgcaacttctgcctcccaggcccaagtgactctcatgccccagcctcctgagtagctgggattacaggtgcacaccaccgcacctggctaatttttttttttttttgtatttttagtagaggcagggtttcaccatgttggccaggctggtgtcgaactcctgacctcaagtgatccacccatctcagcctcccaaagtgccgggattacaggtgtgagccaccatgtcgggccaaatttaaccctttgtttctaaggggaaaaattcacaaatttaaaccctgacccaagagtaataatgtagtttattgcctaacgtagtttttggacaggtcctagaaaggaagtagcataccagttctaaaattgtgtaatgttgaacacggaggatcaaaccctggagatctgtcctccttaatttcttaacacaagatttcagtaaggaactggtctgttttctggcatctgtcagaaaaaaatagaaaagaaaaaaggacttttagagacttcagattatagctagagtttgaatgatttggtggtgtaccacaagcaatcartattctcacagaggtcacctttattaaatgcagaatgtgccaaacagaaagtaacttcccttcataaggctgagagattctcattattcttgatctcttgaaggccaggcaagatgataaattatatatgatctatatacagtagatgacgtgttctcaatatagatgcactcttctatctagctgagatttataggscttttgtattaacattgaagtatattttatcctactaaatgtattttcaagtctagttgaaatcttaacctctttgcagaaattgttaaataatgggagtgtgtctgtcaaacaacgtcgtttcttctaaagagtgaaataagggatcatagtggtgctttagattaaataatccagatgtggttgaaagtctgatttgccttatcaaggatgctcctccgaagtgaatcttaacgtatccttaaactattgttgttgttgttaattctgatactgccttcttgctgttttcagtgttaagattttatctcatttttaaaaatgagattctgatgtgagtggttaggtttatttctacaatccttacatggtaaaataaaatgtttatacccttgtaactttcccccacattgttctgaaattttaattactatgtgaaattcaagtcttagaatcacagcaagttcttaaaattattgagggagacaataaagtgagttttttgggtttttgttgttgttgttgttgttgtttgagatggagtttcgctcttgttgcccaggctggagtgcagtggcacgatctcggctcaccacaacctccatctcccaggttcaaggaattctcctgcctcaggcttccgaatagctgggattacaggcgttcaccaccatgcccgactaattttgtatttttagtagagatggggtttctccatgttggtcagactggtctcgaactcctaacctcaggttatccgcccacctcggcctcccaaaatgctaggattacaggcattarccactgtgcccggccttcagtgactttttaagacactgattcagtgtgtgcagaagtttaaaattatttttcatttgcctttaagaagaataacgtaatgattgtgtgagcctcactgtttgcacagcatctgtggaccttcatatgggtggtactaaccccacagccccagccttagtgtattttcaatccatatctaaactattacttgccttagacccttgatctgctaaagaattagtaaaaatgtcaacatttacatccctgaatgagaaagacttgkgatacactatctcatttaatccccaaagtaccttttgaaattggcgtggcagttattattatcctgactttatggaggtawttgaaacataaagaagttatgagttgagcaagatcagctaatagcgggtaaggatgtagacaggctcattcattgagaaacatttgtgaagcccgtattctctgccagacactgtgctggacgtgggtttatgatgctaagtttgatattctttctattctgcttaaggctcttgatatacatgaatttgttttgcytttctttggctacttcattttttttaaatccttttttttaaataagagcaattagatgtttctttagggaatttaccttgctgcagcttgaatactaaaaatccagtagtttgaaagcaccaaacatctgatttgtgcttaatttaataaaaagactttattataatattggtttaaataatagacgattactattaggtggaaaattactgtgagccagtttatcattggcagtctgttttagtatttaactaaaaattttatttaaaacatgyataagttacaacggtattttataaattttgttaatgtgatgttgttgtttaagaatagaaaataaattgtttagtcttccaggtggaaaaatatgtcctaagtggaaaagaaatacctttctgtctttgatagcttatagtccagcaagctgggtgacccacattattttgatacttgttttcctttaatatctagctgactcctgagttctcacaacgcttgaccaataagattcgggagcttcttcagcaaatggagagaggcctgaaatcagcagaccctcgggatggcaccggttacactggctgggcaggtatgaagtgctgactgtgagctggcataagcattgtgcttaagagccagagcatttttccgagagctgtctgtctgaatggtacacccttaaatgcttcctgcatctgcatatgagtaattgcttctgggagagtgctgtgccctcaacccaaccaaccatggtatcttctgggtttttaatagtgccctgaatttagggcatggtaagcatattcatgtaattcatgcctgacatttggatggctgctatacttgtgaggagaaaaattgattttcaatattacatagttaatttgcagatgtaatttcagtgggaagaattgggaagagttccaaaatacaatgcctgaagcggaggtaatgaggattgatctcaggaataaaatatgtccagaagcatgttttaaaaagttaacccgtaacaggaatccatacaggaatccatacagggtaaagtattacttccatgaactaatcctcccatatggtcattgctgtttggtttgcaattgctgcattgccaatctcaatcattgagaggctggaggaggtttaggaagaaacagtgcattgatgtcaaaaaaaggtgagaaagagaaaaatcaaagaagaggctgggcgcagtggctcacacctgtaatcccagcactttgggaggccgaggcrggtggatcacgaggtcaagagatcaagaccatcctggccaacactgtgcaaccccatctttactaaaactacaaaaattagctgggcatggtggctcrtacctgtagtcccagctactcaggaggctgaggcaggagaatcacttgaaccygggaggtggagattgcagtgagatgagatcackccactgcactccagcctggtgatggagcaagactccatctcaaaaaaaaaaaaaaaaaaaaaaatcraagaagaaaagttgaagaactgcaattaatttaccaaatgtagagaaacaaaagacagctgtgtaatctggaagaaagcatagtctagagactcagtgtttcccattcgctttaaagagtgggcaaggaggaataagcttgcaatccagggaattttaatttgaktttaaggagtggaatttgtcataaaaatggcctcatagcagagattgtgattcagtagatcttgagcagaacccaggaatttgccttttatagccatcagtggtcctgatgcagatggtgatctacagactgcagtttgaaagctttctgagagaaatttattaataatagcaatctcttattagtcttcctctttagtacaggttgagcatcccaaatctgaaaatctgaaatccaaaatgctccaaaatttgaagctttttaagctctgatgtgacactcaaagggaatgttcatcgagcatttaggattaccgatgttcagatttgggatactcaactggtaaatataagccaaatatttcaatatttgaaatccaaaacacttgtcccaaggatttcagataacgggtactcaaccaataatgacacatgattctatttttttttaaacaagggtagggaagacagattaaaccagtaaaattaaaatctcagggacttttaaagtcaatgttttgtaaaaataagactggactagataatgttggaccattttattgttttatcatttttatggattgtagaagcttaacacaaagttaaaatgagaatgaaatgacaggattttgtttcaagaaggaaggtataacagctgccatttattatctactgtgttccaggtgtgatgtggttgatagataatgtcatcagtgaatgttgaacattactatttatttaaaattatcgtggtttgaacaaaacaggacaagcacagcgcacagttgtcttgagttttcctcttgattgccacattgtaataatatataaggctcaaacttacagatctttttctaatatatatggagtttctattattttgttattcctkgccaaaaaaaaaaatcactagttaattctagtactgattacaaaagaatgacttaaacttytaaattggccattcacatgtactcatattattattgtgagttactttgctttaggaggaaaaaaaaggggattgatttcaagtttgaattaagtttgacaatgttgggaagagtcattagtcaggcccttatattgctagggctagttgagaacccaaaagttaaaaactttggaaatagcaaagacatttcactccaaagtaaaatgcaagtttaatttttttggctgtacagggtttctggcttcatctttgaatgccaatatccttcaaccttttatcctcaagtatctatgatactcattgctgactcctgaaagcagcttatatggcaagcatctgaggcaaattggcatactaagcagtttaggatgtccttagcagctggttgttttaagatgtaacgtaaaatcttctagataaatttgctaatggttttcaaggcaaggttcctaatgtctcctaatcgaacactgttaaaaagctattattcccacataaaatagactgcctcctccagtgttttgmtaagtaaaatgctaccttgcgccagtgttyagacagtctaaataacrtaaagctctgagttgtataagaaactaaaactgattcaaccccataaaatcacagtgttaataccttctcctcccattatgttatagctttccaagtatcacttattcataactgcmgttttattaccaagaaatgcattcacaaatacaataaaaatatttggtgttgtatgtcaaagcaatgtttacataattatatgtagatttttatgttactttgtgccccatgttatctttccaaaaaatgacactctttaggaaacacacattatatttctttaactttgttcagcatgagaaaactgcatgattattacaattagttagaactttaacatcttattttgttaaacgtcattctccagtatacgtatgggctgatagctaacactggttagataggatcaggatttgggacaggattaggttcagttatctataccccaaaaaagaaaacagaagtatagtggtttaaataactgtatttttctcttgtaaaagaaggccagaaagagttggtcagtccaggcctgatagtgtagcttcaggatgttaataggaaccscagctccttcctttctgctccatcattcctcagcctctagcttctacctcttgctcaaggtggctgctgaagatccagtcattacatcagcttttcaggctgctggagggaagaagaggcaaagaagaatgcattaatgcatgctctccctttaaaaagccttcctggaagtcccactcaacatttcagttgtgcttactttgcattggccagaacatagtcacgtagtcactcttgttagcaaggaagggtagtaaatgcagtcttttagcttgggttctgttaatagaggaagaggagartgaactttgggataagacctagtagtctttgctgtaacttctatataacaagaaaaatgatttttttcttgacttctatgttttgcacaaggcatttggacagtgagcctcaatttttatgtctgctaaaggatctcttctgttcactttttggggratttttggggggataaatttaccagtgtctataaaatattttgaaattttccaagcaatattttatctgttctttgtttccagggagattgatttggattttgattcacaacaccttaaagttttgtgttttttttttttcattcagtaagtctttgcgtaaagcctgccacagaaagtaagtattataggaatgtcgaatcataattttcctagagctaagtgtaacttaaatctagaagggactagcgattgattctaaacttaatactgtaaaacattactatttttgtagctttattaaacagttacttgccattcttttctgctttctcccaaacccttattttctattgcaaaattataaagtttccaatttgtaccatgcatcaattcatactaaaccccataattgtatgtctttgtttctacttcatgactctaaagaaagctacaaaactgggctgcccaacttcttaatacctcattcatggtgtgtctagatttgtcttagttgctcagttgatcttgaaaatgaaagggttctagtgaagagatgacacattcatgtgtttaatgttagatgtgtaaagttgacccttaacaatgtgcagtttaagggcacatgcccattgacactctcaaaagtttatgtataacttttgtctcccccaaaacttaactactaatagcttgctgttgaggaagccttcctgataacataaatagttgattaacacatattttgtgtgttacatttaatctgttctgtatttttacaataaggtagaaaaaagaaaatgttaagaaaatcataaggaagggaaaatacatttactgttcattgagtggaagtggatcattataaaggtcttcatcctcgttttcacattaagtaggctgaggaagaggaggaaaataaagaattggtcttgctctcatgggtggcagaggcagaagaagtgaagggaggtggaagggaaggcaggaaaggcaggaacactcagtaactttgcaaaaatacatcgtaatttctgtcggacgtttttgctttttcatttctctaaaaatatctgtacgttggcaattcttccaccatttgctttagtgtcagtgcccataccatatacgaatccrtgtcagaaatgaagtaaaaagcagtattgaataatcaaaacccttttgccagactgtctaacatcagttcattttctggtgctgcttcttctatatcttcctcatcctctagcactggttcataagaactcatcttcatcaagttgctttctrttaattcctctggtgtggcgtctattagctcttgaatttctccaagattcatatcttgaaatccttcatccccatcccccacctttttttttgccatatccacatctctctcatgatctccttgattggtgcctgtgaagtcatgcacactatctgaacccagttttctccagcaggaatttattgtttcagccttgatggtttttgtggctttactgtatcaacgatggcatctcagtggtgtaattcttctagactttcatgatgttctctctatctggtttgttccgtgaaagggtcacatatgcaaagtgacccccaaatgctgaagtagctgaaaaatcaaaggaggaggcagaaaatccaatttgtcagtaaaggctgttttattggagaacttagagacacaagcatggtcttggtcagccacaaggcaggaagatctcaacactgctactccagagacccagggcttacataccatagggaaaggcaaccctcaaaaacaggcragacggctatgtgtatcacagcctataatttgtgcattagcaccaaggttcctttgttcttatactaggggcagtaaataaagtaaaaaccaggaggcattcacggggccggggctaatcagaagtctgtgtagaggattagcctacaagatggagtcacttttatctccacagkgtactccatagcactgacaatccgttccgtaaagtactatttataatgagcctgagaggtccttatgaccccctgatgtagaggctgaattagagacctgtttggggcaagtagaccactttgatgtcttcagtgttgaactcttgggttctgggtagctaggggcattgtgcactattgaaaaaactttaaaaggcagtccctactggcaagatatttccctacatcaaggagaaagcattggtggaaccaaacgattaaaaaaggttcttgttgtccaagctttcctgtacaaccaaaagattggcagctggtgctcatcttttctcttcaagaccaaggggttggcagctttataaataagggtagtcctgatcataaaccctacagcatttgcattaaacagtagagttagtctgttccttcttgccttaaatcctggtggtcatttctcttccttactaatgcatgtcctttgtggcttttccccccccagaatagggttcaaaaccttttcaggcagatagcctttctcctcgatttttcttcatcgtacctgggaacttgtctgctgcctcttggttggcaaaagctgctgcttctgttatcttgacatttttttaagccaaacttcttcctataattatcaaaccaacccttgctggcattaaatcatacagctttagatcgttttgcttctagttgccgtatattgacttcacgttttcttgaatcattttagagtcctgcaccaacataaaggctacattttcaatatgtactgcagtttcactaaaaatgcaaggtttttgtgcctgctgctgtaactgcagtgatggcttcatgaatttccttttcattctttacagtggtccttatgctggattcatttatcttaaaatggcaggcaactgcagctgcagacctcaatctatggttacattatatcaagcagttcaggtgtttcgtgtaatgtcacgacttttttctgcttcgtggaagcactttcagcatcactagtggcactttgtatgtgtcccatggtgttattcaaggtttacaatattgcactaaaaacaattaaaaatatgcaagaatcagaagagattactctttmctgtgatatgtaatttactggagagacagagataatgatctcaagcagagataattcacatcacatgttattttaagtggagcaacacttgatttcacatcagcaacaggaggtggctaagaagttattgctgtactacagtatgcactggagttaatttacgaagtyatttttcatctttacattttttgacatctctcttgactgcaggtggcactatgtacagtctgtacgcataagtttttttttttttttttttgagacggagtctcgccctgtcacccaggccgaactgcggactgcagtggcgcaatctcggctcactgcaagctccgcttcccgggttcacgccattctcctgcctcagcctcccgagtagctgggactacaggcgcccgccaccgcrcccggctaattttttgtatttttagtagagacggggtttcaccttgttagccagaatggtctcgatctcctgacctcatgatccacccgcctcrgcctcccaaagtgctgggattacaggcgtgagccaccgcgcccggcctgtacgcataagttttaataaattttagctttttataatagatttgtgtatattttatcctagtgataaaatagactagtaactatatatattttgtgcattcatgacacacctttttcttaattttttcgatatttctggtctacacagttcatctgcaagttttttcaaattgtcgacagaagcccaaaaaagtttccactatatatatatatttttaaatctgtgtacgagtagacccatgcagttcagacccatgttgtttaaaagcccactgcacttggaactgaaaaactgactcctttttttccccatctatcttttcaacaaaaattaaaactaatagaaggtacttattagaattctgctaaagtacttctgagtgttaaacatgcttagtaaaatgattattacaattagttaggactttacaattttattttrttgtttcattccccagtagtatgtagatggtctgataattaacgctagttcagataagattaggatttagaataggattattccaaataattcgtatatacacaatgctttgttggtaagggtgatatgtacaggtttaaatagaaatgtaacagaagcaaataattgcttaagaaagtactttacrcttactttacaaactgttttacaactgaaattatcttggcttttattttaaaattgaagcagagggtatgaaatagtgaagagattggttaacatgaacttttaatagaactcaracgtcatttccactgcagcctacatatttacacctgtgagttgtcatagtgcaattttacaagctgtatccctgacttttaccttttttattcacagcagaggtaaaaatgccctgaccgtgggaaagaaaggagggaagaattttaaaaacctgtagctgtcycatattgtctaaagaggcagttattaccataaatccctctggtctctctcatgctcattcaggartgagatgttatgattaatcaatttttcagacagtaaattagacttaacaaattacttctataatgttcaaaaaaagaataataaaatagattgactgaatgttggttcccaagggaataaagatcatcagtatgcagttttatgatcatttgactgttggaggacaggagtaagattaaaacactcttcgtggtgataaaatgttactgcagttaacatctgaatgacaagacagggtgcaggcacgtacaccaataactactgttgtatgccaggcaccattttaagtgtgttgcattaattcactaatctaaacctcaaaaaaactttatatagccaggtctggtggtgggtgcttgtaatcccagctactcaggaggctgaagcaggagaatcgcttgaatccaggaggcggaggttgcagtgagccaaaatcgtgccactgtactccagcctgagcaacaaagggagactgtctccaaaaaaawaaataaataaataaacctttatggccagaataccattcatatccycatttcaccgataagaaaaatgargcaaagcaaggctgagtacttcattcaaggttatagagctagtgacaatgttaaggttcaacccaaacaagcctggctcttgagtcctgctctttaccctatgagcatgtgtgtatatgtgtgtttactctcagcctctacatatgagtttattctgtacactttataagtgaagaaggtttattcataagctataagatggagtagtttgaacaatgacatgatactcattccatacaaacttcatagaagtggctaatgactagtcagatttaagtgttttattaaaagaaataagagtcagagtaagccctgataaagtatgaaaggaatttggaaagtaagaaggaaacaaggcttattaggcaagagtaattactatttaaaaagttatttagaattggacataaaccctgagaagacttacaggcatttgcagctagaaaaatgaaaaaatctccagtgtttttctatagaaggtgtttttccccttcctaatcttgtattaatatattcagcatggtttcaggatagaaaattaattgggccgagacagaagcttttcctcataattgcttctttttgaaaaggcttaaagatcttctcaagtgaattatcatccatagtctgaaatcaattggtagctcctgcagctgttaataagtgatattttgaatgaacagcctcagttcttttcaccaaaattctcctttgtaaaatttagtacatgggagcgtaatgcatcatgatattgatgtatgacatatgcctgcaataagcattgagttgttcatttttagccttaatcttttcccagtagacttacmggaattatgtgctcatggcttgtgtagcaggggacacattttagttatttaggaaccccattaagagttgttatatatgactctacacatagcagcagacagtacagaaaaatagcaagcctggaggccccttaagatcaaatccactggtcagctactgagtggttcccagtggtgtccagagatcactggggwctcaccagagaacgtaatgctacctgccatggagctggtctgggttttgatccaggtagactgtaggtgctagtggggagaacattctaaagtgctttataaaatggaaaccacaaaacactggtaaggaattgttattataaaggattaaatgagcagataaggtgttcttgtgttagaaataaacatttaatcaaaaagattccttcccttgcagataacatagtagaaaagttaagtaaacccaagggatggctgatctcactactgtctttaagagacaataagggaaaatgctagcccttatttcattttttttcccactcttaactgtgacgattcttaggggaaatgatgatcagctcacacttaaaaaraaaaatacatacaggactctagggacttctgttctgaaagacatgacccaatcttctgtaaccgactcacaaagttaatgaggctaaaattggcatgtatttcctcttttcaaatattagataacattttaaacaagaggatatgtagcataatccctagagtaatattaacttgcactctaaatgcaagtcattatagtgtttcaagatgctgttcctctgatctaccaaatgtatagcctttgagctgcagatttcacatgtgggtrttagttactgctgacaccagacttacttgaaaggagtcactctggccaggtgtcttctctttgcaatttgatctstttgtaagtagctcttcatcagagccagcatttcagtgtttaatttgagccctggccaagtgtccttcaccttcaccttcattagatgcacctatcccacccagccagaggtgttaggacaagtagaaagagctatgggcatggatttacgctggattcattagagcacttcacaatggccactagatagatgaatgcaattgtggagtttagacaccaccattgggcttgagtgaaccagagtaggatgagagtgtgaaacagatcagaaaaaagtaggaaggaaagaagacatatctaaacaatctgacttttacagccaacaccaagaaggcttggtgtttgtcattttcattccagtaacgtcaacacttagcacagtgcccaattcatagttggtgggctacagggcactgggggaaggaaaacaatgtttccctgtttttttgttttgtttttttcatcttattttctattggwtagtcagctctgaaattaagaagaaaagaaaagacacatcttcagagtacttatttgccctctttattctctgttttactcatttgtttggggcaatattattaaattaaaggtgtggagtcactagtttyctccccagatcatctgtgaaagcactggagtatttgaaagccacggcccacaatgctcagctttagtcagacagctgggcatatgtcctaytcagtggattgttgacagttcaggcatggggagagtgctgtgcacagtaacaacagtgctctaaagacaaatgtgattttgttgaagaaatggaaatgcacatggtcaacattcagcacaaaattgagaaacaattacaaaggaacatgttagaaattatcaacctgatatagaaagacaggtggtcatacttgcagtcagagaatactttcacttcttattttttcataaatctgaaaagaagaaaacataataattgatgagccattaacgtttcaagtagggaaaaatgtatttgaacttagattggaacacccaagtgccccctcctttgggaagttcctgtctccatgtcattctaaactaatgrgtgttagttaagcacctccagtgagccttgtagatctaaaatctgaacatgattttccctaccagagtacatgaagggagtctttaaatgcccttgaactgcaygaaaatgcctcacagagctaaagtaccgtggcacaaagctttttacatcactgtaagctggtcgtaaaacaaatgaaaaatgttgaggaataatctgtagaatgcaaaatcgcagaaaagtattttgagagattcatgtatctgtggagatttttatctccatatgcatatgagacacagcaaggtcttgattggccaaaatgaataggactaatgatccgtcagaaattcaaaggcttagtattaattacttctcaacagctggctgtatttatagtactgcttggcataagttcctgagtaaggaaattgcagatttagaagtgtccctaaataatttaccctcccatccccagggtagtagctacaggaaaaaaaaaaaaatctagttcacagctttcgtgctgaagccaggactgattcctattacaacaggaattttatttggtcctcacagcatgtttgtttgtttgtttgtttgtttgtttgtttgtttttaatagttatcaacatttcaagaccaagaaattcttagggtaaactgacaggcagtgccagacttcctgaacttcttgtacggaatgacatctattcctggtcttcagagcagtactctccttggaatgttctgcagtaatggaaatgttgttatttccatcgcgacagccactagccacatgtggctattgaacattctraatgtggctagcatgactaagattgaattttaaattgtgtttacttttaattaacttatattactgtagacatttatggttagagggtatcatactggacactgcacttctagatgaaccaggcaggttgcaggagtagtaattcaaagtactatacatctggatgtgtagattttcttctatgttttcttctagttgttttacagtttctggtcttaagtctaagtctttagtccattttgagttgacttttgtatatagtataaaatgaggttcaaatttcattcttctgcttgtggatatacataatagtcatacttacgaatatgacatttagtaacaccatttattaaatataaaataattctaaactctagatcagtttagagcagatttttacaattaagttcaatcaaaatttaaatctcattcaagttttttctggtctagaagagaagatgaagggaaggaagcatgtctccactctattttttgcttagcagacagcacaaaaggaaatgtaatgtgatattcaaatttaagcccaagaatacacttggctaaaaccggcttttgtcacattttaaagtagatgcatattctttgataaaaagatgaaagaaaatattaaaaagatgaaactgcctacatcattctttgtcaaaactcgaacaattttggctgttatgttagaagtcagtagaaatgttttttctcattaagtgtccttcagagaatagaatcatatttgggaatgaatttattaatggatacaactgtactctttcctcccaaacctgattctccaacagaggggtttgccatctcagtggatggcaccattttccatttagctgttgaarttagtcatcgggaggcattttgacatcttcttctccgccatcccccaccaggttctgctgattttactttctagacaggtatctttccagttcattctgacaagatctgtattgcaccacccaccctgtgtctcgctcctactcctgaagcatcctcctaactgttcctcctgcatccactgtttcatacactcccttgcaaaccttacagtgcagttatggtgaacttttaacaaaacaaatctaagtatattcttcccacgcttaaaatgggtgcatttcaaatgaaactccaaatcctaactggcctgctagactctgtgtaatctagcttctgcctgcctctctagctttgagaagagctgtcttccttaggattaggcctaccaggacatggcaatacatctaaaataacagtggctttaacagaaccgaagtttatttttctcttrtgtaagtaggcaatccatggactggtgtggcagcttcacagtcctccaggattaggtggctttgatctttgaaactttaccaccctcagcacagagcttccaactcatggtccttagacgatgactgctctagctgcaccatcacatctgtattccagccaggaagaaagtagaaaaggaaataaatcgccagtgccttcccttcaagaacattttccaaagttgcctccactactcccactgcatcctgttgttcagaacttcgccacatagccatacccggctgtgaagaaaattgttcttagcagcctgtgcccagctaaaatccagggcattattgttgagagaaaggcaagatacatttggaaaaccacttactctccatcacaagagctaactcctcattttctagagtagaatatgagtcagaaatatctgacatagaaaacttaacagatagcacataagcatattattagaaatagacagatactagagaaaatggctgaaactgatgaaaatggttgcctctggaaggcaggaacacagtraaccagaggactggtgttttgcatattaaatctttcagtactgtataattttttccatgaagaacatatatattttgataaacattgcatttgaaggcatttctaggcattgactgaagccaggcccacaagtatgtattaggactgggtgaattttccctgcaaagcccgtgaagttgtgtttttatttcccaccttgccaaccatccctgagtctttggtattgattcaaaggtggtggtgtatgcatggttattgtcaacagttgaggaycataaagatcaggtttaagacatttggccacaagcagtcctcccttttttctgtcattaggacacattctattattttctattatataaaatactgatgaggtattaaatgtctgtgacataatacattttgtcttattttcctgacctgggctgatttataataagcatgtgcaggaaactttttctaattggcagcagcactcaccacttaaagtccttttccaccatggatgttctgtgacagggaatgtagacacagtaaactatcatctgcagaagattgcttatcaaaatccacagacccagaggcccaaatgagaggtaggggagaactggaacatgagattgtggaatcccagaaactagaaagataattctctgcctatcaaaaagaaagttttaatccaaatgtactcttgtgagacttgagaaatgattacctgtttttcatgagaaatacaccaaatcttacaattgcaagccttaataggttttgtttgttaaatagttaagccaagaggaattgttgctaatgagagacaaagatctgaaagaaaaacaatcactgggcttgtgtttaatcactttttattttctcagatctccatcatgtcattatctggctttggtgcttacataacttaantaggagagttcaggcagcaatgggaataggagggcaaaatgaaaggttaacaatttaaatggatcacctgcagatgcgtgatatggatggagatgaagcctattaaggacctaattttagaagaagctcttgacatcaatcatttgtgaaaagggtttttttttttttcttacctacacacaaggttttgtacacttgtctacaaaccttaagcattgatgcatctgatcatcagcttgtgggattactaacaccaagccactttgaaagagyagtcaaggttattaactttggcaggaaatgaaaatttggccttaatatacatgtgaaattgaattgtctgtagcacaaagctttggagattacccatgcaaaatgagaaaactatctaaatttaaaattgtcctcagtacagggaaagtaattttgcagacagcatttttactgcattgaaatccgtgaagattggctctattaatttaaatttaaacagaggttctgtgtcttctaaaaatcgcaaatgagatggaaaatgtacttcaagggaaaaaatgggtttctggatatgctgcaggcaggcaggcaggcttcctactccacatctttgagtctgccctgagaccagttagcttcagagggaaggctctttccactgtgacaggcatttgaaataaggacatgcagacaatgcctctattacatatttcaggcttcaagagtagggtaagaaactgatcaagtagagcccaaggcaaaagtcattggtggcttttacattacatttaccaaagtaggtgggccctcgacagaaaaaaatctaggggttgaatattttttctcagctatcaaataactttcttataatccctgcctggaaggatactggggcaggggatttggttacattaactaccttttcacaaaaaaaaaaaaaaaaacacacacacacacaaaacaaacttttacgtaaagagaaattgaaattttcattccctggtctttgaatttctttagttcacaacaaaccctttcttattaaataattattggtaaatcaattacatttatttggaaccctagtttaatgacacatcatttsgacatcaagaagaatacattaacacaataaccagagtacaacaaagactaataataggctgtgtgtctctttattggccagagccktagagaccttattatttaatagagttgtcataatgaggaaactgaggacaagtaagtggttggcttatgctggttcgtagagttgcttactaatagagctgagcctagaattaaagtcacccaaacttccagatcattaataaatttgctacaggttatcaaaaatcgctgctgagtagacaccatgccaaaaataataaaataactgcctttcctcatctttacattgtttccttttttttttttcaggtattgctgtgctttacttacatctttatgatgtatttggggaccctgcctacctacagttagcacatggctatgtaaagcaaagtctgaactgcttaaccaagcgctccatcaccttcctttgtggggatgcaggccccctggcagtggccgctgtgctatatcacaagatgaacaatgagaagcaggcagaagattgcatcacacggtaatcrtgtttctatatgaggattattttctagcatcattatgcattaattctgcatgtgttaacaaaagaacattctagtgagtttacttttctcttagcagataaatctcactgctgtcatttgatcaattgtcatattcctgtgttgtagttaaggaacaacgattataatccctattttagtgcaagataaaagacactgtcatgttccagattaaacatcagttcaataatgtaaatgagatcgaaagccttaacatatgattactaatccaaagtgctatccaagatctgtaattcaaggaaatgcagttcagttcctacaggtgggctgggagagtccttctaagggaccacagactgattcaaaacggcctttcttagaggcaatgacatgcacatcctgattttcattttggtataaattatggtggtccactagaagctggtgaattatgaagaattattaaatgtttgtactaatagactttaattgttgccttaccagagtttattaagcactctttcggagttctaagaaccctggctgcsgtgcaactctgcatgcatcgctcttaggctccactgcgcgtgctaacactccagcaacgttttaaccagtgactgtccctgagttgaccatggtgtttgattcccactattctttcttatagattactgttaggatggcattaccatcaccaatttagtttgtctaggatccgttggctaatcttatactgtttgctggtgtatatttaaacaacaggctttttggactttttaagatatcatagtgctgtattcaaaaaaggaatgatttatacccctattgtttaggcgtgtgtgtgtgtgtgtgtgtgtgtgtgtgtgtgtgtgtgtgtatgtatgcatatctcccttctctcccaattttttcccatgcagtgatattttcttattgtaactaactttttccactggaaagtgtaacaaaaagaaggggtgggagtcttgctccacccaaaatgatttgggaatcattatattggatcattttctgaattgacrtattcttcaaaacacctttttttaaatacatgcctatgctacatttcttaggggctagacattacatagtataactttaaaaacacattacttagtgtgtctagaggaaaaaaactgaacattccactccagagctgagaagcttttaatataaaacctgtcaccaagctcgaccaaaatgaaagaygaaacaaaacagtgatttcccccaaagtttaaagtgtgttccttccatagtagctgacttgcataagacttgccaatacaaaaactgttccatactcacctaaatttgaaacacagagactaccttttaattttttttacatagctgatgtttaaagccatcagccaacaactgctttagaggtccacaagatactctcattcagtgaatcacttgttaagtaccatcagataaattgtagtgctcccaatattctatatataatgccagcctttccataatacatgcagccacattttaatagtttgctatgtgagaaatgttaatgtgttcaatgagaccaagattcatagattcaaacagatgggaatttgtatcaaagcactaattaaacaaaattaaatatgtgtctttaccggctgcttagcttcttctgtagcttgtatacctggggacaacacgccaactctagggagcagcacttgccaatgttaactcacctatacaaccctcttcttcatgaaatcttgagggcctattctaacacactctttgggaaatggtacaatatcaatattagtgtattaaaatgctcstaagagtatgctaagatttttgttgtttttggtatattggtactaagggtgttgttgtcatttacctttttaaattttgacatttcgacagtatttatagccagtaggcttgttamggttaaaaatatagtatgtgaatataataggaaaatacactatttgtggctatagctttgatttttttcagattttttattttatacaaaacagaaaaagaatgacttggaatgatttgtaagttacggagtttgctttatcttttcaaaggaaaaatctagaaatttgacttaatttcaagaaatccaaaattatttaatataagttatttagtaaacctcctttaactttttactaaaccttttttctcattttacagaccttttgagatcccacgctcacattctctgtgtactgcctttgttgtgcttcattgccaacatcatgttctagctagcttgctttttctacattttcttaatgtaatgttctttcaaaagcataatttttaagttttagagaccagacagtcctttgagatcatcaaaagtctaatccttacagaaattgaaatccaaggaaatcagtgtttccctatagtacatattcttaaccttgggccagaatcttagggtttctggcagtgtataaaacccccaaattatattcaaggagggagcatttgtgcttttcttaaagggatctataactccccaaaaggagggtgtgtgtgtgtatgttcatgttcaaattgtcctacaaatggctggggagtggaggggaggacratacattgcattaatttgttctactgcctgatacatatcagatctgttttcatcccacccacttctacacatcagtgccacaacatgaataaagtgtgttgcctgttcccaattagatggctaacctaacatttatagtgctttggggccagtacttagaatgatgaagcgctctggctttctggtccagaaatatataacctcccttcttgtagtgtgacgagtcagtaatggacatcttttttttttttttaataagcagaaaagggatttaaaaatatttattgtggtaaaatatacataacataaaatttgcaatttaaccatttttaaatgtacagttcattggcattaattatattcacagtgttgtacaaccatcagcactatttattttcaaaaaatgttttattactccaacagaaactgtacccattaaaaagtaattccccatacccccataccatcatcccctggtaatctatattctactttttctatgaatttgcttattttacgtattttatataagtggattatacatttgttcttttgtgtctggcttactccatttagcatagtgtcttcaaggtttatctacgttatagaatgtatcaaaactttgttcctttcaatgactgaataatattccattatatgtatataccacatttcttttttatctcagaaaaggaatttttaaaaggctatttagtaggttctggagaaggaagcctggagcctatatagccagtgtggggctgtgagtgctatgggggctttggaattccagctgcactccctactgtgtgatcttgggtaaattactctaaaccttagtctctcatttgtaaaatagagataaggaatgttgtgcagattatttatttgagataattgatggaaatcacttagcataaattatggcacctaaactgaaaaagtacttataaatgttacctattattatggcttgtaaaaatcattgcttatgcttctacttttttgttgttattatactttgagttccggggtacatgtgtagaatatgcaggtttgttacacaggtatacacgtgccatggtggtttgctgcaccaatcaacctgtcatctacattaagtatttatcctaatgctatccctcccctagtcccccaccccctgacaggccccggtgtgtgatgttcccctccccgtgtccatgtgttctcattgttcacttaatgagtgagtacatgtggtgtttggttttctgttcttgtgttagtttgctgagaatgatggtttttagcttcatccatgtccctgcaaaggacatgaactcatccttttttatggctgcatagtattccatgttgtatatgtgctacattttctttatccagtctatctttggtggacatttgggttggttccatgtctttgctattgtgaacagtgttgcaataaacatacgtgtgcatttgtctttgtagtagaataagttataatcctttgggtgtatacccagtaatggaattgctggtcaaatggtatttctggctctagatccttgaggcattgccacactgtcttccacaatggttgaactaatttacactcccaccaacagtgtaaaagcattactatttctccacattctatgcagcatctgttgtttcctaactttttaatgatcgccattctaactggcttgagatggtatcgcattgtggttttgatttgcatttctctaatgaccagtgatgatgagctttttttcatatctttgttggccacataaatgtcttcttttgagaagtatctgttcatatcttttgcccactttttgatggagttatgtttttttcttgtaaatttgtagattctggatattagccctttgtcagatggatagattgcaaaaattttctcccattctrtaggttgcatgttcactctgatgatagtttcttctgatattcagaagctctttagtttaattagatcccatttgtcaattttggcttttgttgccattgcttttggtgttttagtcatgaagtctttacacatgcctatgtcctgaatggtattgcctaggttgtcttctagtgattttatggttttaggccttacatttaagtctttaatccatcttgagttaatttttgtataaagtataaggaagaggtccagtttcagttttctgtatatggctggccagttatcccagcaccatttattaagtarggaatcctttccccattgcttatttttgtcaggtttgtcaaagatcagatggctgtacgtgtgtggtgttatttctgaggcctctgttctgttctattggtctatatatctgtttttggtaccagtaccatgctgttttggttaatggacccttgtagtatagtttgaagtcaggtagcatgatgcatccagccttgttctttttgcttaagattcttttggctatgcaggctcttttttggttccatatgaaatttaaactagttttttctaattctgtgaagaaagtcagtggtagcttaatggggatagcattgaatctataaattactttgggcagtgtggtcatttcccaatattgattcttcctatccatgagcatggaatgtttttccatttgtttgtgtcctctgttattttcttgagcagtggtttgtagtcctccttgaagaggtccttcacatcccttgtaagttgtagtcccaggtattttattctctttgtaacaattgtgaatgggagttcacccatgatttggctctttgtctattattagcgtataggaatgcttgtgatttttgcacattgattttgtatcctgagactttgcttatcagcagcttaaggagatcttgggctgagatgaaggggttttctaaatatacaatcatgtcgtctgcagacagagacaatttgacttcctctgttcctatctgagtaccctttatttctttctcttgcctgattgccctggccagaacttccaatactatgttgaataggagtggtgaaagagggcatccttgttttgtgctggttttcaaagggaatgcttctagtttttgcccattcagtatgatattggctgtgggcttgtcatagatagctcttactattttgagatacattccatcaatacctagtttattcagagtttttagcatgaagggctgttgaattttgtggaaggccttttctgcatctattgagatagtcatgtggtttttgtctttggttctgtttatgtgacggattacatttattgatttgtgtatgttgaaccagccttgcatcccagggatgaagctgacttgatcatggtggataagctttttgatgtgctgctggatttggtttgccagtattttactgaggatttacatattgatgtttttcagggatattggcctgaaattttcttttttttgttgtgtctctgccaggttttggtatcaggatgatgcctcataaaatgagttagggaggagtcccttttttcctgttgtttggaatagtttcagaaggaatggtaccagctcctccttgtacctctggtagaattcggctgtgaatctgtctggtcctggactttttttggttggtaggctattaattactgcctcaatttcagaacttgttattggtctattcagggattcagcttcttcctggtttagtcttgggagggtgtatgtgtcaaggaatttatccatttcttctagattttctagtttatctgcatagagatgtttatagtattctctgatggtagtttgtattcctgtgggatcagtgatgatatccccatttatcattttttattgtgcctatttgattcttctctcttttcttctttattagtctggctagtggtctatctattttattgatcttttcaaaaaaccaactctgggattcactgattttttttgaagggtttttcatgtctttatctccttcagttctgctctcatcttacttatttcttgtcttctgctagcttttgaattygtttgctattgcttctctagttcttttaattgtgatgttaaggtgtcgattttagatctttccttctttctcttgtgggcatttagtgctataaatttccctctaaacrctgctttagctgtatgccagagattctggtacattgtgtctttgttttcattggtttcaaagaacttatttatttctgccttaatttcgttatttacccagtagtcattcaggagcaggttgttcactttccgtgtagttgtgcagttctgagtgagtttcttgatcctgagttctaatttgattgcactatggcctgagagactgttaggatttccattcttttccatttgctgaggaatgttttacttccaattatgaggtcaagtttagaataagtgtgatgtggtgctgagaagaatgtacattctgttgatttggggtggagagttttatagatgtctattaggtctgcttggtccagagctgagtttaagtcgtgaatatccttgttaattttctgcttgttgatctgtctaatattgacagtggggtgttacagtctcccactatttttgtgtgggagtctaagtctctttgtaggtctctaagaacttgctttatgaatctggrtgctcctgtattgggtgcatatacatttaggatattcagctcttcttgttgcattgatccctttaccattatgtaatggccttctttgtctcttttgatctttgttggtttaaagtctgttttatcagagactaggattgcaacccctgccttttttttgctttccatttgcttggtcaatatgcctccatccctttattttgagcctatgtgtgtctttgcacatgagctgggtctcctgaatacagcatacctatgggtcttgactcttcctccaatttgccagtctgtgtattttaattggggcatttagctcatttacatttaaggttaatattgttatgtgtgaatttgatcctgtcattatgatgtagctggttattttgcccactagttgatgcagtttcttcatagtgtcaatggtctttacaatttggtatgtttttgcagtagctggtaccagttgttcctttccatgttgagtgcttccttcaggagctcttgtaaggcaggcctggtgatgacaaaatctctcagcatttgcttgtccgtaaaggattttatttctccatttctcctttgcttatgaagcttagtttggctggatataaaattctaggttgaaaattcttttaagaatgttgaatattggcccccactgtcttctggcttctggggtttctgcatagagatccactgttagtctgatgggcttccctttgtgggtaacccgacctttctcactggctgcccttaacactttttccttcatttcagccttggtgaatctgacgattatgtgtcttggggttgctcttctcaaggagtatctttgtggtgctttctgtttcctgaatgtgaatgttgttcctgaatgtgaatgtgaaggttggggaagttctggataatatcctgaagagtgtttccaacttggttgcattctccccgtcgctttcaggtacagcaaatgtaggtttgatcttttcacatagtccgttatttcttggaggctttcgttcctttttattcttttttctctaaccttgtcttcatgctttatttcatcaaattgatcttcaatctctgatatcctttcttctgcttgatcaatttggccattgatacttgtgtatgcttcacaaagctctcatgctgtgtttttcagctccatcaggtcgtttatgttcttctcaaaactggttattctagttagcaattcctctaagcttttttcaagggtcttaacttccrtgcatttggttagaacatgctcctttagctcaggggagtttgttattacccaccttctgaagcctacttccgtcaatttgtcaaattcattctccacccagttttgttcccttgctggcaaggagttgtgatcctttggagaagaagcagcattctggtttttggaattttcagcctttttgcactggtttctcccatcttcgtggatttatctacctttggtctttgacgttggtgaccttcagatggggtttctgagtggatgtcctttttgttgatattgatcaccagtggcgcctccagaacagcaaagatagctgcctgtttcttcctttggaagctttgtcccagaggggcacccgccagatgccagccggagctctcttgtatgaggtgtctgtcgacccctgctgggaggtgtctcccagtcaggaagcacaggggggcagggactcacttgaggagacagtctttccctcagcagagctcgagcactgtgctgggagatccactgctctcttcagagccggcacgcaggaatgtttaagtctgctgaagttgtgcccacagccaccccttcccccaggtgctctgtcctagggagataggggttttatctgtaattccctgactggggctgctgcctttttttcagaaatgccctgcccagacactggacatctgtttttaaagttacaaaccttttgataatacaaggccaaaaactctccccagtaacaccctgaggaagtactgtgaggagaggaacagaactatcctgtttgtgtgtcttcattcttctttcagtgacatttcagtgacttggctatctcttctaaagatgggttgcattaatatcaacatatcaaaacaaataaatgaagctgcaacaaagtgcttgttagtttgagagtttctgaaaacacataaaataaccattatgatttatcagtgatatcatttctttatttttatatcttaatataaatattttatttttagtcttatatcttgagaatatagcatgtacaacttgcagttaagtcctagtaatcatcgaacccaactaatgaattttagtgatttgaattcaaatccagaaaaaaagggatatrcttcctttattaccctaaactgtattgttttaataagatgctctgagcaatactgtattttagataaatatttgaaaggtatttgctacctactttgaatgttgcaaatgcaaatgtgtttggctgcaaagtaaatggaatgctaattatatattgccacctagtggtaatgtatgtcctaacatcagcaaaaaaggaatggagttaatgccgtggttcaaatattttatttcagttggaatatcattggaatcaatgcagtaattcggtgtaatacttccatagaacagtatgtgtttaaaaaaaattacagtaattttttttcatagttctttcaatctttgcaaaagtaagtcaaaagtactttatattgaacttctatataatttgacacatttatattaaaaataggttcatatcaaaacttgagatattcattgtttactgtaacagttgaatttgtatctaataaacacattttgttttcttatggccccaacgttactgagctcccagttctggaatgagaaaaaaaattcttaataaatgtttttattaaaaatttaaaattcgtattcaaaaattaaaaattacttttaaaaattaagggagtgtgtgtgtgtagatatatatggtatcgaagtagaaaacaaaatggcccataattctatccataagccctattgttttaaaaaaggtcaaagtatacaagaaaatgtattagaagaaaaaggaaagaaacctctagccaagtttcttggttatctatttctcagtatatctcttcctaagataaccactgtttcactatgaattgttgcctatatttgtagaagaaaaaaatggatgagccagcatttgcatatttaactaatttgagttgcctcaatttgatgaggaaataatatgaaaaagtttaaactgtttcactaactgcaactagccatgctttttcaacccccactttcctgcagttcccttaaagactccttcataagtttctctcagtctttctttcataactgtcagccactttcactcactaaaatcatctcattctgcttatttaaaacctatcctcttcattttaaatgttttctcccccctcaccacaagcgtgtggaagtagtggagagggagatgggagaggaagattgttctctttcatatctgccctccttgctgagctaggatgttttcactcactgtatctatagcctggtggtaacaattgttaggtttttgtttgcttgggattttgtttgattttgtttgtttttgttgtacatattggtggtctccagagactggcagtaaaggctgtaaaccccctcagctctacccctaccttctgagtatgttcaaatgaaagcacaagtgggtgcccaattctgccaactgtgcaaacactttaggaagaagatactctttagacacacatacatacatacatacagtctcctaccctgtttttgtagctcagagaaagtcacattgccctcaagcccttcttagactttattcatcaaagagtgggaaagcccgtaccatcttccaaacctccagcccatctttaccactcattccaccaatgaaaaaccattttctatcattccttaataataacaaattctctggtgtagattttgataaagttcctatatgaaaaagaggcacttcagtgctgagtacctctgagtgttgactcctgcttagagtacttcaaatacatcactttggggcgggggttggagggacctgatgtttgttacttcaaatgctaattaaccatccctagtgtatagactgaagttagatgacagacatgcacaggcacggcacactgcttctgcttaactactttaaaattaaatttccatatagataaacacgataatttctaaactggaagggactatttatttcacagatgaaaaattttaagaacaaagatttagtgtcgaaagctacctgataacatttgttagggctaatgtcgtctcattactactttcttccagagtttcattggctctttgtgctaatatcattttgttaagtttcaccaaaaattaaaatgttttaacttaaataggatcatatcaaatttataggctaatttagggatgattgagatgcacttcaaaatttcatgtgacaaaacatctaaaatagcaaggacatttttcttccctatcatatttgctgcccactcccctccccccaaaaagggaacattctcagaggtcaaactaccaaagatggttactttcctaaactgacttccctctgtgatcttctmccctacttgctggttcctgaggcttccccttttggtmtctgatgaaaagggtggggctttgatgaccctgctgtgccatgtctatgactatgcatgcatctggggccaggtgatgtggaggacagagaagtaaagcaatgggggcttataaccccctcctaagactgcagttcctccaatctgtggggaaatttccctccctcagagtttaggctcccagggctccccttgtcttcgcacctgctcccagcatgagattgctttgtagcttggggcacaagagaactgagaaaaggaaaataaagaaaaatggagggttaacccattctctctgataytaggagttctctttgttcagacagcactagagggcttcttctgggtctctataagcctacttgtgcctacttttgggttttgtgctgtactgagttcagaccggggaataccagagagaaaaaatggtaaactcaccattggtttggtgctacttcagattcctgtcctcttcccctttttgcatgttactgtttgcttttcagagacctcaaatagctgctgtatcctgtccaggttttagagccacattttgagggagacacaaggtgcagagcatgcttgctccatcttacctgaaatcagaactgaaagtaactttttctgagaagctcaactgagtctrtccgtagggattgaatgaactataattcagtggggttctatgcaagtattacaaagaatgtgactactctgtgtgctgttatggaaccaytgtcaagatgtattgttaaatagcaagctgtagaatatttatacatatgtatatttatgcttatgtgtacataaaatctaggaatacacacaaaaaaatggtaaccatggtgatttctgaggagaactagaaggctgggagactgaggagatggagacctgactgacacctcttgtactattaatatttgcatgtattggccagttgcagtggctcacacctataatcccagcactttgggaggctgaggcaggctgatcacctgaggtcgggaattggagaccagcgtgaccaacatggagaaaccccgtctctactaaaaatacaaaattagccaggtgtggtggtgtgtacctataatcccatcccctcgcgaggctgaggtaggagaatcacttaaacctgggaggcggaggttgcggtgagccgagatcacgccattgcactccagcctgggcaagaagagcgaaactgtctcaaaaaaaaaaaaaaatgtacatgtattattgactgtgatagatgaaacctacttcaagtaggcctggtgacacattaagaaataaaccaaggaaggagatgatgggccatttgagtgttggcttagtcctttctctgggctaaatgccctaaaagccagcagttcttggcttctttgaccccaactgctaaaatactcaccttagggcctgcctccatgaggaactagggagatttcagatagcctcagccatacgtttgtattctttcattttatgaatgtatttgtcagttccattgttaagtgaagaaatttaatggagggctaatctgtgaaccgtgactgttctataratagatattatatatgtataaatacatattttgtgtgcatgtatatttttttcaatgtaccatttttaagtatacaccaatacctggttcctttcaaattatttggggcatgtatttttatttttaggctaattcacctaaataagattgatcctcatgctccaaatgaaatgctctatgggcgaataggctacatctatgctcttctttttgtcaataagaactttggagtggaaaagattcctcaaagccatattcagcaggtaccacgtttttgtgtttttaggagcctttttaggatcccatttacttactatctgcctaaactattgtttatgtctctgtagttagcacattccatataaaggaaggtgtatctggacctctaaaggttgggcacagtccaagaaccaatagctttctacggagtgctgttggaaacatttctgtctcaagagtccgaaggccagtctgctccatttcagaatttagaggccctctccaaagaggattagagccaaatttcacctcccagatggaggatctcctttggtggtgcctagaggagtttatgcttttctttgacaggcgaactcttgtaaactgtaatgcaaagagctcaagatcctctacgccytcccccttctaggctaaatacagtcccacacacttctctgatggagaattaaactgtgcctttccctggctataagctggtgtctaatttgtcatgttccccagtacctcttagcaaaaaagtctttacctcctccaggaagatttttgttcagtkaacttgttattttggttggttttctccctgtagatttgtgaaacaattttaacctctggagaaaacctagctaggaagagaaacttcacggcaaagtctccactgatgtatgaatggtaccaggaatattatgtaggggctgctcatggcctggctggaatttattactacctgatgcaggtaaggagtgattatggtgaaattttaaaatgtccttcctgacccatgtactatcatgggtgagaaaacagatattctagttctagtttgtcattctgtcaaccactgcattacagtactctccttgtaattacttgtcctagacaaacaaaagtaatgtttacgaaggtgcctttaaaagtgtataaacattaaaggccctgcgttttaaaatgatgtttgatttgcaggtgatcgtgcttgcccacttagtgccacttgtgcagactaaagtgttttgacttataattctgtatgaagtgcctctgctctgctctttcagccagtgctttgaattaaaactattattccacattaaaaggtacaactgattccaacaaattccaggaataagaacaaaatcaatagaaaacaaatgagcacttgttgcctaatgctcacttagagagcaaagctgaggagacttctacttacctgaaaaacagctgaatatgctctgccctacagttcttgggatctaatactattggggcacatcaaccaaagtcaaatagactaaagacagatagaatttactgcagcagacataacttgggagagatcagaagaggacttctcaggagagcatcattttgggagacttacgaagctctccttaaggagaaactggcacttctgaataagaattcatggcaaagaaaattgatttttaatggcagcagaggtacccctgtcaccttcccaaggcacactgtggcataaagaaaagtgtttcattaacgtgttcagcaggagtgcttggatatacatactaccagctctttgagtagctggctcttataatacaagatcagtgttggacctgccctctacctataaataaacaaggacaacagaactgaaaaactcaagattattattatttttgaatgcagagtcacacattgagtgttagtggcaatcagagactagcgtatttattctacacttttcaattagaggttatataattaggatgttgacatttagacttaaatttctttatttttctggtgcatgtcttcctctctattcccagtagtaaatgtagattcctaaaagctttcaggaaagaagagtcttctgaagtttcaaggttagttagaatcaaacatactagaggccctctccaaagaggattagamagccttatcgaaatttcattgaaacaaataatcaggagacatagttggttagtgactagacagcctcatcaaactttcattgaaacaaataatcaggagacatactctgcctccttgtgttagctgtagtaagaaatctgaaaacccaagtattgatttttccatttgcaggttatcatctctttgaaatgatttaatttttaatcctgaaagtctattctagtagrtacgccttcatcaacataaaataaaacatcattatttttaggccatgttgggtaattcctgcaagtttgaggagagtccactcattctactgtaacactctgagcttaaatgctattctttgtatgaaatgaaatctgccttctaaacaactcagtccactttcagaatcttgtggaagtcatattgtcagcattgctttgaccccaccacgaccgcctcctgcctgtgcttcacaccactgcccacccctcaccaccacatgccccacaccttgcctagtgaaacagcactttgaatctgttaaagacattagcagtcattgaattaagaacaggaccaaaaggagaaactaaaatgtgtatcaaaaatggtggctcatatgctgtatgtcagtatgtcctatggatctgtacgttgttatgtcaaaataatgtggcatttagatcagtcctaaatcctctgcaaaaagacttgatctagaggcatgctgtagtttggaatctagattccaggtctcttaacttgttagtatcctttttctattgaaaataccacctatctcttctctaaatgtaataacgaaagtcatgcttggtttgtccagtgcatctctttgtgacttttaaagcttgttttatatattgaaaccatgagaaacttctcttacactcacattcataggcattgacttaggaaaattatttatatgtatgtagatagcaattaatattgaaaaacaatatatacaaaatgccgagcacagtggctcatgcctgttatcccagcactttgggaggccaaggtgggcggatcatctgaggtcaggaattcaaaaccagcctggccaacatggtgaaaccccgtctttactaaaaacacaaaaattagccaggcgtggtgacaggcatctgtaatcccaagtacttgggaggctgagacaggacaatcacttgaacccgggaggtggaggttgcagggagccaagatcgcaccattgcacttcagcctgggtgacaagagtgaaactccatctcaaaaaaaaaaaaaaaaaagaaagaaaaaccatatatacaaaaggccctaagagttaactgatagcaattttactttgtcccattgtttaaaatttttaaatgaaatcacaaaagcttaaaataaaggcatccaataggtggaaaaattggatgaaatccaaaacctcttaatgaccttccatttccccttrgccatgctttttttctggtttraatatactgagwcctaggaaggtttatttgcttcakcagaactaataatttccttctcatttttagcccagccttcaagtgagccaagggaagttacatagtttggtcaagcccagtgtagactacgtctgccagctgaaattcccttctggcaattaccctccatgtataggtgataatcgagatctgcttgtccattggtgccatggcgcccctggggtaatctacatgctcatccaggcctataaggtactgtgtgtatttttgaaataaatttttttaaataaccaaaaatttataatttaaaattagttttatcctaatccataaaggaacaataaataaatctcttgtgggacctaagatcactttactaaatgaattataattcattctcaccatctatctgtaccatagcagccattgtttcatatcctacttttaacaacacttaggttgcaatgagatattgtttatgatccagcatattatctagcaattccactcctaggtgtgtactcgaaagaaccaaaaccaagcattcataacggcattatttataattgccacaggtgaaaataatccaagtattcatcaacagatgaattgataaaatgtcatatatacaatggaacatatcacaatgcaatggattattattctgctattaaaagaatgactttctgatacatattacaacatggatgaaccttgaaaacatgctaagtgaaataaatagatataaaaggacaaatattgtatgattccattgtagtgcataaataacactaatagaaagcatgccttcacagaactgcaatcaacgcagatttttagttgagaaaaaaaaagatatctatgaccattggtgccaaatcaacaaattacaactctgcagactatcgctgggcgctggcatctcataaataagcttttagtgtatcatattctacatttcagagaattagatatgttaataatagaaaaactttttaaactgccttatcctacttttaagaacacttaggttgcaatgagatattaaaaatatctactcagaatatttcctaagtctttgatgaagatataggaggcagtaaaagattgtaaaggtctatctctatttttctgactgcatatttaataaagaacagttgttcttctccagtgtgtaaagaaacttcctaatagtgaagagggcatcagagttacaaagaagatagcatgtgttctttggaaagtcactcatgataagagcaagttgcaagttaaataatgctgcttcctcagtaacacccacataaacatacacacatgtgcagaaaacttagactgtacatgccaaagtcatgcacagttttttttaaagccaaactagtcgattttagtaattgtcactagcaacataacacatccctctgtcactaaatcctttaccctttcttgccaagccatctccctctttccttcttatctatcaggaaggaatatcaatggaactttcttttatatcccgtataataaaatgtgtcctttgcctctgcaggtattcagagaggaaaagtatctctgtgatgcctatcagtgtgctgatgtgatctggcaatatgggttgctgaagaagggatatgggctgtgccacggttctgcagggaatgcctatgccttcctgacactctacaacctcacacaggacatgaagtacctgtatagggcctgtaaggtaggagtcagaaccaccaaatagaaagcagctcggtggctcacacctgtaaatctcagcactttgggaggctgaggcaggcggatcacctgaggtcaggagttygagaccagcctggctaacatggtctactaaaatgacaaaaaattagccaggtgtggtggcaggcgcctataatcccagctactttggaggctgaggcacaagaatcacttgaacccgggaggcagaggttgcagtgagccaagatcacaccattgtactccagcctgggtgacaagagtgaaactccatctcaaaaaaaaaaaaaaaaaaaaaaaaagcaggtctcccaggaggttgtagaaagagttctagttcatctgatttaattcatttatccctaaaaccataggtcttggataacaaatacagttatttaaggaaaaccttgaaaagcctttcaattaaattagcattcctttaaagggacataattctactcaacagcattaatgggagaaaaaaataaagatgtagggtgattttgtgcctttcttcttgaataaccttgtagatacgtgactcagacagctcattaaattcctcccatgctgtgtactctttcaaaccatccttttctctgcattaatctcctttctctgatgtgaaggtagtgtttgatttttcagagtaatttgtatagacaacctcttaacttttggggttgtctctggaagaaatcactatactaatttaacttggtctcattttcagtttgctgaatggtgcttagagtatggagaacatggatgcagaacaccagacacccctttctctctctttgaaggtattttgtacactttatttatttgccctataatatcagcatctacttctctgcttggtaattaatgtatttaagttttagcaaaaaattttataattattcttaaactacttttttatttcctaatatgctaaatcgatattaaaaatcaattagcacatgtaataccacagtcccaatactggtagtcatcaggtgactcccttttatggagccaggcacatgttgggcattttgcagaygccctcataaatcattcagcaaaaacatacaggcactactaccttcatgtcatagccgaggagactgaggctcaggagcttatgtttggtaaatggcagggctgtgacttgaacttgtctggctccattctttctccagtcttccaccgggatataaggctgaacacctcactagtgatctyttctaatgttgaactgcagtgtatgtaaacgtagatagattcacacttcatttaaatcattgccgttaatattgtaatgttgttaatgttaaaaaatggagccatccttcgtttttgcagagttgtaactgctctcggggggtgtcagtgaggtgaggaaaaagccataggatgccgaaggaggagggccaagaggacacccccaccctccagtgcggccttgatccagaccttagggacgaggccatcactggtgggcaccctttgttgatgtttgtgtgtttgaatagactgaaatgctgtkactttttttgtcaataaagatatgggggaaaaagaaccatcctatgaaatggagtcatttggtataataacttttgcctctttctctttcttcaggaatggctggaacaatatatttcctggctgacctgctagtccccacaaaagccaggttccctgcatttgaactctgaaaggatagcatgccacctgcaactcactgcatgaccctttctgtatattcaaacccaagctaagtgcttccgttgctttccaaggaaacaaagagtcaaactgtggacttgattttgttagcttttttcagaatttatctttcattcagttcccttccattatcatttacttttacttagaagtatccaaggaagtcttttaactttaatttccatttcttcctaaagggagagtgagtgatatgtacagtgttttgagattgtatacatatattccagaacttggaggaaatcttatttaagtttatgaatataaccatctgttactgttctaaaaatgtttaaaagaaactcaatacagataaagataaatatgtgactattattgggtattacacttcacttctctttaatatttttcctccaactggagggcagacaattttctgacttgcttttctctaggtggttcattttgaaaggggacagaaatataactaaatgcttccaggagaaaaattccaagagttacaatctggacttggtacctaaatatcattttttaaattcttgatgcctatttggactagaggtaaacatactttcagattggcctgtttttgtcggtaaggcatacagccttcagaagccaacatttttaatcaaaaacttataaaacatgatgatcattgtgaaaattctgagttgaaggttagtttaagataagctaacaataacagtctgtgttttctctaaaataatctgagttttttggaactctttatttaaatatgtgtgtttttcagtattcaaataagatcaggaagccaattttctrtgtatgaatatgctttaacctaggatttcagtccactctgactgactttctaaactttaacttgggtttttacagtgactatgcattagtgctgactctttggtataagccataaaatattttccttcctatcaatttatctgaactttggtcttttcactaaattgtacagtattctacttctgtttaaaamggggagatgagaaagggaatactatctaaccaataacttgaacaaaaacactaaactaagcatttaatagaaatgctttttattgaggaggtattatccagagttcatgcttagaacaaatgcatctttgcgtatcctagacttaacaattcatcagtttctgagaccacagaatcaggttttccgtagtagataaagactctctggtgcttcaaattctgttcaagtgttttgactcatcagcttctactctttctattactgcctttgcctggcttgttttgtctctttgcaactgattttgcaaaaaaaaattgtagctttaaaataacagggtctaagtattttaaatgtgcctatttcacagctctcttggtcacaaaaacatgctatttttattggaacttcaaaccaaatccccactgagtgtgtactggttcctgcaggtagcagtctcctattatctcctgtttagcaccaaaagagctaatattattggaaactgaccttttaaaggccactggcagtaggatttaaaaagcagcccactgctcagtttccaggatcagcttcctccttctgtcacttgtgtaagttggcactaccttgtgcctctcagattgctgaagtgctgctggtaagcatgtgcatgctctgcctttcttgtgaaagttttcaatcagcgatatcagcacttacagtaagaagtaaaagtagtgcacagcaaagctaatttgcctttgcctggggtgttcagcttgaaagaataaagctcatttggtttagttaaatgtcttactctactgtgcctatgcttttagctgygttactaagcaagggaaaaataacagtttctctgagccagagaagacttgatcacagttctccaagcatcgtgatagcaatgcttaaccccaggaagatttcaaggcagggagaagaacatttcaaataagattcttgttaacccatttatgcctagtgttccattattggaatgctaagcttgtgggagtcatttacatcctactgctcaaagtcattgccaaggtctgatttttcacacaaaaaattgcaacccccagcataaatgggttagctactgtcatcagttagcaaattcatccacacaaacacaattagagtttggtttttttttaagcttttcaaaacttactaaactggcacaattttatatgtatgctatttgttgtatttatgcttaagagcaaaaaagttttgatgggattttaaattcaggcaaagcctacaacgctgagacaatcccctaacaacatggtagtaactaaagaaacttttatactaggcttcttagttttaaaaggaagtggcatcattgtttcagttctagtttgtatttttctctcagatatttttcttctttaaaaatctttcccagaagttggttcctagaaaactcaataccatcatctcttatctctatacagggactaggtaataaaaccttcaaaggttgtcaaaggtcatcaagcagtgttcatttatcctgtcacatgtttctgtttctatagtaatttagaaattgcaaatagttaacttttcatcatgtaaaaagttaacattatcctatttccatagataccatggacggcggtgtggcctgagttgtcagtctttaatcctgagtcatgtggctctcttttcatctttgatgtcagttccaattatttggcatcaaaaaccttcatggtaggtagagttttaggtaaaagtggatctagggttactttctttattaacatttcctaaataactgaattgagagacatactctgctactatgtcctcaggttaatttttgtctgatcttacgatgccctgccttttactagctactttagaaatagaaaatgtgaagagtgactatttacatgtatactcctttggctgctagaactyatctgwagtcctttattatttacactgaattccaatttcatttctgcttccgctaagtaagagcacctcattcctgtgttttctctactattgagctgtagacgaactgtttytctaattataaagcaaactgtttgggatattcagggaaactaccccaatgttatgttgtcatttaatgggaaaggctgggatcatatgtatttctatgttctgtaaagtatttgacttactagttctcaataaaattttattaggactatatatcatcatgtgctttttgtttgctttggtttaaacttgagaaatattttccctcaatggcaagttattgcgggatctggccagcagcccgcaatgcaacggggctctctctttgttcccaggcagattggtaggttgagaaataatagactcacacaagatagtgaaagccgcgtccaggggggtcaccgccttctggttctgcggtgccaacaatgcgctggatataccagcatttattattaagtttagtgagggcaggggtaggttagtgaggaatttagggtcatttgattatgaggtgagatggtcacgtggggatgaagtaatgctttaacataacatttgtatgcagaagtacagtatacagggataagaatttacaatatagtgtgtgcatcagtaatttctaacagagccttaaaacagaaacacattctttccataacctatgattagcaagatattaatcagcagtaacagttgcagcaaaagctggttacagacaatccatagaaataggacgtgaagctagacaactggttagaccagaaattctcagaagggagtatgccttaaccctaaagaggcctagaagagccatggcaagatgagggcatttatagccctatcttatccatatggacaggcgcccccccatgcgtccatttataggctctccacaagggtcgcattccattcccagagctatgaatatctgcttttctgggataggaatcttggtgatgatgtgaaacctccctgactgcagatccattcataggctatctgcagggggaagcacattacatgctgttggctcatactggcagtccaacctggcattgtctttacacaatcctgcatgcaactttgtatttacaataatcaggagcatttcatcttttattccgtagcagtagtttcagggggttctccctacagcaagtgaaggttttttttccctatatatactcctgtttcctaggctttgctcctttttcttcattgttggataaaacaagatttgcactactgtctgaaaatagagatttataagaggaaaatatttttaaatctgatcattatagaattaggaggaatctactagccttcaagaacaacatgtattaaccatctcataatatatgaatctactgtggggttaataactaaaggcctaattctagaaatttattttcctgatgatcaattctgctttgaatagaaaagggggggattaaatgaggcataattataaaatatatatgcagaggttagaaaaattttgctgagtcacttgggatgactttgtgccactgctttttatgacacagctagttagtgtgacttaccacaacagagattgataaattataaaatacttgttttcatctctaaattacaatttgtgtgctggtacatatgattaaaatgtccttcatacccaaagtctgtttattgagtgactgataatactgaggataaatgcagagttacatttatttctctcatttgaatgaagtaaaggtatggtaatatcaagactctagatgtaggcagtgaggcatggagaggacactaccttgcaaaggccacacagagattgcaaaatgatgcttagaaaggtcctgctaactctacgaggttagtttccattggcaaggccagctctagtttaccgctccctggcttatcctcctactatgagaaaaataatgacaggcacaataagttgcaccacagttgtaacctcatgaatgaagaaaacttcaaaatatttgttttttgtgacttacctgtagtatattttttcctaattttgcattggaaaagatcttagcctttctcctcctcttcagcctttctcctcctcttcacactctctgaatagaaaagaataataatttttatgtcattctttttttccaagatagttcccactgtggattcaaagttattaaaattctcatgtcttctctattctattaagcatcatttaaactgaaaacctacaagtcagttccctgaaaatttgctttctcattgtttctcatccaaatttgccctcttccttctaaagctgtgggtcaattaacaaaacgagaactcaggcttgtttttatcttttttttgtaacaatgacaaacgtattggctttattggtcccatgatgtaaactgtctaaacactattgtccagaagccctgtgctagtgcatcctcagggacttatttggcagttttgtgagtaataggagaaggcagcaaagacaataagccaagagctgaaataatgaggattgagaaatggatcttagcagggctgctgctcatagtcgaccagttcaatttcacatttctacattatgttaacttttcaaccacgtgaaaattacaacatggtaacattaagtctgcaactaatgttctaatactcaacaagtaagtgttagacaaagcatttgtgaggcacttagtcatgtagggagacacgagactttattataagtcagtttataaaatagtgttccaattgcctaatttctctttgatggagctgggatattaagaaaggcatttataaaccagaaaatactgatgtggctcactgtgaaagatgatattgtttactcaggattcagcattcagaaataaacatgccctcccttgctgatgcaatctgaactgctggcactttcagtttttatgatgcagatatgccattttattaatcataccatgaccaatgccttaaaatcatttatccccaaaattcattaaacatgctatctttatgtgcaaggtactggctaggggatctgtttgcataaggtagacatctctactctggcaactcagtctggtgaagacaggtgactggataagcaattgcaaggaaatgtattataataatcctatcaccactccaactactcttcccattattccataacttcatgtatattgggtctctcatatggcctgcagtttctatctatggagatggagtttagaactctaataggaagaagacaacttaaaagccaatcagccagcccagaagcactcagagttctttcatttggactaccttgatgatgagcaaggtggagggaaatttgaagacaaagagtcctttgccccctgttgcaggaagtcagggaccttgaatggagggaccggctgaagccatggcagaagaacataaactgtgaacatttcatggacatttattagttctttaaagtaatacttttataatttcttacacctgtctttactgcaatctctgaacataaattgtgaagatttaatggacacttaccacttccttaatcaatactcttttgatttcttatgcctgtctttactttaatctcttaatcttgtcatcttcgtaagctgaggctgtaggtcggcctaggaccttgtgatgattgcattaactgcacaaattgtatgtagagcatgtgtgtttgaacaatatgaaatctgggcaccttgaaaaaagaacaagaaaacagcaatgttcagagaacaagggagataaccttaaaatctcgctgcctgtgagccaggtggaacagagccatatttctcttctttcaaaagcaaataggagaaatatcactaaattctttttctcagcaaggaacatccttgagaaagagaatgtgtccttaaggggaggcctctgaaatggccgctttgggaacggctgtcttttacagtcatagctaagggatgaaataagcttccgtctcctgtagcactcctaggcttattaggacgaggaaattcctgcctaataaattttagtcagactggttgtctgctctcaaaccttgtctcctgataagatgttatcaatgacaatgcgtgcctgaaacttcattagcaattttaattttgccttggtcctgtggtcttgtgatctcaccctgcctccatttgccttgtggtattttattactttgtgaagcatgtgatctctgtgacctacaccttatttgtacactccttccttctttgaaaatcactaataaaaacttgctggttttacggctcagggggcatcacagaacctgccgacatgtgatatctcccccagacacccagctttaaaatttctctcttttgtactctgtccctttatttctcagaacggccgacacttaaggaaaataaaaaagaacctacatgaaatatcgggtgaatttcacctgatatctggcgccccacatggtctttttttcctaagtgcatgtggagtaatgagagataccccatactttcaatataaacctgcaggaaaaccatgccctaaaaattttgagggcccatctaaaactttaatttgggaagactgtgttttaactcacatggagtagtattaaaaaatgactcatatggcttagtaatagactgggcaccaaagggctatttaaaaaacaattgctcctctggtggaagggaatgcctggagcctacttattttatttcttatcgggagaatgagaatcatcattctactttgcataggaggttcagctcattcccttaaaatgggaagataaaggcattacccccacgaggcctcatatgatactccccattctgagcccagaacacccagaactttagaaattggctattgccatgtttagactgtgagtatgggaaggggaaactattatgtctgttgtccccactaccgtcccccactctcagtatcaacgtagatccagacgttcgacttcacttacctccaacctgactgttcacatacagagttgtgttacgcttccttacatgctgttagtgggaaatatcaaaatttggatgaacaatcaaactgtccaatgcattaattgtcatttatacacttatattaactcccattttgactccaagaaaagtgtaatgctggttcaagctcgagaaggaatctggattctggtaactttgcccagagcttgggaatcctccccctcaatacatttaattaatgaagtgttacagcaaattctaaaaagatctaagagattttttttcactttaatcgctgttatcatgggcctaattacagtcactgcaatggccaccactgcgagaatggtgttacatcattctattcaaatggctcattttgttaatgattggcaagccaattccacccaaatgtggaattctcaacaaggcattgatcaaaaattggctaatcaaattaatgatttaagacaggttgttatttggcttggagatcaggtagtgagtctcgaacatcacatgcaaatgcagtgcgattggaatacttcggatttctgtatcaccccatattcctataacgagactgatcattcatgggaaatggtcaaaggacaccttctgggtagggaagataatttatcattgaacataactaaattaaagaaacaaatttttgaagcctctcaagttcacttacccattgtgcctggagctgaggcattagatcagatggcagaaaatcattctagactaaaccccacaacttagattaagtctattaggggctccactgtagtaaattttggaattatgtttctctgtttaattggcttgtctttagtgtgccggaccagtcaaagaatcccacgtcaaaattgagagaacgaacaagccttcatcgcatggcacatttgtataaaaagaaagggagagatgttgcaggaagtcagggaccccaaacagagggaccggctgaagccatggcagaagaacataaattgtgaagatttcatggacatttattagttccccaaattagtacttttataatttcttatgcctgtctttactgcaatctctgaacataaattgtgaagatttaatggacacatcacttccttaatcaatactcttgtgatttcctacgcctgtctttactttaatctcttaatcctgtcatcttcgtaagctaaggttatatgttgcctcaggaccctgtaatgattgcatta

SEQ ID NO: 96380 - DNA, 14158 bp, Homo sapiens
ctacgttcaaaatcataatcatcagtatttgttatgactctcaaggttctattaatattaatgcttagctgtaaggaaagccaacctgtcttgaatactgactgatactcatttacaaatagtttctgtttcagtgttaatatatttctggtttctttttatttgccttccattctaaagaacatgcgcataaagcaagatcttactaagaaaaggtctctatgcttcaaccttgaatttcttattttaatactatggtccagagcaggtacaggtgatttcctcatcaatctcagcaaatacagctgaactccctgagtggtaaaagactgacctaatgaagatgcattataccaaaaccatggagaaagtgagagaggaagaaaaaaaggaacacctttttttttttttaatttgagaggctttatgatatattttttgttcttatttgttttataaaatatattttacgtccagttcagttacaaattaaagatacataagctctttctttcaatatgaggtcttaaacatgtattacaggtcatggctattggtcgtacctttgaggagagtttccagaaagctttacggatgtgccacccatctatagaaggtttcactccccgtctcccaatgaacaaagaatggccatctaatttagatcttagaaaagagttgtctgaaccaagcagcacgcgtatctatgccattgccaaggtaagatgttacaaggggcccacagctactagttgcttttccagaatgtagtcagtctggacattaaaataaaactgaatcacaaagtggttttaaatcagggatttttggaaaatttttaattcttttatagtattaaactggaaacatctatagatttcattagagtcttttacaattaatgataaattatcatttttatttgactttaagcctggatttaagggcaaattgcagttttaaaggatgattaaatagataaaatgtccccctttttaagtatacttagtactaatactcaagtagatttgactatattgacttgtcctttactattaactttattacatgttccttgaatgtgtaaaattgtattgtagaaaggaaggtgcatacaataatgtcccttagtatgtgccacttgagtctagaataatcttaatttatttgcttctctttctgtgtttaaaaaacagcaacagactataaaggcccacatgattatagggttttccatgtaattattttattggtcttactttcaggaaaaaaggccctacatttctcacttccctccactacttgcttctcatgcaaattaaatgccatgttaatctacttttatatttactgtgcttagagttttgaagtttcagctcatctgattttataaaaggtgacttgggcagctggaatctgtctggtcagaaatccctgaaaggctttttgacatttaaggaagcacaagcgttaatcctccaacagtatcaaaccgcactggttctacaaagctctactgaccattttatgtttgtgtgtgtgtatgtgtgtgcatgtgggatgagtcggtgaaaacatgaactttctctttaaaaggattcccgtctttgtaatttgcctgtgtagaaacagaaaaatgttgttagtgattttgaactcatcgcaacttttatgtccatattttgagtccttaagagacctgaaggagaggaagggatatttccttaattgcatccaatgtatattctcctcgctcttatggtttctaaatggaaaatatttaagccctactgaaattctgggagttgctattatctcttgatggacattttcccatgttgagtttcaaggtaattagaatttttctctggcggtggcgggtgggatagcagtgataagaagttattttagaaagccatttcaccttcatcatttattatccctatttcagtcttttatttaagaagcagctcatgacattcatatgtgtgtgtgtgtgtgtatatatatatataaaatttttttctcaggcaaaggacagtaaatagattttttccttaagtctagcaatcatgtttctgccactttgaaggagatgaaaaaggcaagcatttccaagttcccagctaagctgtaaaactcaagcaaatctctcattcttttctaacagacttataaaagatgagaatctgggaaaaatgtgtggaggttctttctttcacagggtaccctatgtatgagcaagaagtgcaggggctgcgtgtaaattattgcctgctcgagtgctgggagaaggaactgatttctgtttgttagaggtcatcattactgttcatttcaacagcagccgggaacttggtgattttgacagagagtgtaaggacggtggagggctgaaggggaaaaagaatgaagggagtgtgtaaatctttgcttgctttcatgagtcttagaaagagcaacttgctctgaggtctgatttttacagcagtcttatttcaggatgactggatcatcacctcttttgatttggggagaatgcggggcattatttttgatttttggaacattaaagtaacctcaaacttgtttgggggtcattatagacttcattacagtgatgttacatagcaaagctgcagtgcttggagatgaggtcttaagactggcaggatcttgcttgctgttgagaaatcatggatttttttttttatccagtctatcattgatgggcgtttgggttggttccaagtctttggtattacgaatagtgctgcaataaacatacgtgtgcatgtgtctctatagtagaatgatttataatcctttgggtatatacccagtaatgggattgctgggtcaaatggtatttctggatctagatccttgaggaaatgccacactgtctttcacagtggttgaactaatttacactcccaccagctgtgtaaaagtattcctatttctcagcatcctctccaggatctgttgtttcctgaatttttaatgacagccattctaactagcatgagatggtatctcattgtggttttgatttgcatttctctaatgaccagtgatgatgagcttttaaatgtggcacatatacaccatggaatactatgcagccataaaaaaggatgaattcatgtcctttgcagggacatggatgaagctggaaaccatcattctcagcaaactaacacaggaacagaaaaccaagtaccacatgttctcactcataagtgggagtggaacaatgagaacatatgagcacagggaggggaacatttcacaccggggcctgtcggggggtggggaggtaggggatgcatagcactaggagaaatacctaatgtagatgacaggttgatgggtgcagcaaaccatcatggcccgtgtatacctatgtaacaaacctgcacgtcctgcacatgtatcccagaacttaaagtatatatatatatataaaagaaagaaatcatggatttgactgtagtcctttccttccttccagtgaaatgactacaggattctaggccctccctcactgtatgtgcttgtgtgaaaacctcctttgatctcttaaaagtttcagtaacttaaggttctctccacctcacagtgtagatggccgacagctaattgtgcctttaatcacttagaaagtaagacagaatattaagtctttgggaacctgactgtaattacagggagaattaaacaaaagaaacatacattgactaggaaatgaacatggctttgagtatttctgttaaatgtcatcttactctagtcaacaaaattatgagccatgccatatctcaacaattataatcatggtctctctgatactatcattatgtaaaagctttaagaaaagtaagctccctgggctgaaatataccagcagagttactagttgcatatatttcttaatgggtcttaaaaacgcagtgtgttattctaaaatatgttgttctggaatattttcagatttttcacagggtatatacacgtacacatacacacatacaagaataagagtagacatctttttgtataaagattttggttttgagagtttatctcttttttcagttaaattttctactcagcttaatgacccatagttgtagttttacttttgagaaattgataaagtaagcttgaggaagaggctgagctgcctatcagaacagaagttattactacattgttttggaatatattaggattttaaaaaatgcctgccttagcacaaaaatcatagtgactgattcaaaacaattttttatttgaagtcctctgtgaggaaatattctggaggaataaagccaagccagatccgacccataaattctcactgactattgtatgtttgtgtgaatgtggagtgaggtgataaaaatatgctatctcctacaagataactatcaacactacaagttaagagatcattatattaattctagattttcttaccaatttggcttaactgtagtttcaagagactttctttaattccaaagagatgtaccaaatttagggtataatgggtaacacaatcaaataaagaggagcgagtcaaaacctgttaggagatttttctgagaacacaccactcaaggcaagcacctactctgtatgccatttgtggatatagttggcaccatctttatgtttattggaaggaatgtcagtgatgtcagtttcatgttttgtaactcagtctacagtctcgggctctctaaataacacacagaggcatgactgctatgtattttaaaccaaataagacatttagaaaaatgtttgccaaagaaagtatctcttctcctcttggcaggccattgatgacaacatgtcccttgatgagattgagaagctcacatacattgacaagtggtttttgtataagatgcgtgatattttaaacatggaaaagacactgaaaggcctcaacaggtaaggcagtgctgctctcattcatgccagacaccttcagtgcaatttttaaagagtcttcttcctactcttaagcatttggtctacattgtgattcaatgaggtagatagtgccattgttggaaaatagtacccgtagccagaagacaaatggcaggtttttttttttttagatgtttacctttagaaatgtatccattaatctttttaatcatcttctattcccacccttgtcatcagacatagtaataaggtcttttgaatgcacaaaattggtatacattgatgaacgtgtattatttaattatgaagtattatctagatttaaattttattaatcaattaaatgaatatttgttttctataaattttcctctacattctgaagtctgttttccccttttaatatcaatctatacattgctgtatattgaggagaaaatgcattccttttgcgctctactgtttttaaattgggacattcagttcagcatacaattaagccacattcaggtttctcttaacagactcttcacctctgactaatttacatttttatctccatcatggccaattatttttaaacttcattttatgttgagaatattttgataatgtagtccttaaaatctacttttaaatttttcatgggaaactgctggggcaccttaggctgatgaaagcatggatcagttttaaacatctatcttcaataagaggagcatttattagcagattaagaaagacaatatagtcctcttgaacttcttccctctgaaagcactctgaaatacactactattggaaagacgtcttacctgcaaactagggatgtgtttagagaaggaaaaattttgtttgtataaaaattgttctcaaatgatttgacaaaatgtagatactttaatcacttaaaatatctttgaggacagtggaaaatctcaaaacctggattgctcaactatttagcaattgcaacatatacttgggttactgtatttgcctgatcaatatgtgtacaaactaggtactaaaacacttgcttttctttttgagaaaaattaggttctttttcatctatttaattattgcccatgtcaaatgcttggttttgaaaactgaggaattctatctsacaaagatgaaaccagctatagttgcttgtaaatcatcctttctagtgatcacataaaatgaacagtagacagcaaataatttaggaattgaacctatacatttatcttataattttgctgacttaagtttccctttcttggtttatgatgccagcagaacttctgtgtaaaattatagtctgttctactgttctcagtttcaggcaactgatttcaaatgcctatgaaaccactccaattaagccacatgggggtgctagaaacttatagtatgccagtcacagcagtggaaaagacctggggtggaaaatagcagatgttattgtgatttaaatttccacttgacatacgttctgatttttggacaaattcaatgttttaattgaatagttttcgttacaaccagaaggcaggttgagattctaactaagcataaataagggtatattgatagtgaaaaaggtccttggaggattaaaacaacacactgttacagatcatttataatatttttctgacttccacattctgttgcatttatttgccgacaatttgacattttcaatctccattttctggcataaatatatttgtaaatagggatattttctattgttcataatgatctacatttaaaactctttatgtaaagctttatatcatttcaaaaatttcaaaaacttacacttaaaatcatctctactgtataaatttgtttttgatccagggaggttgaagtgtctattatatagcaaaagctaaagtaaacctgaagtggaactcacagatgatccacggcgttagcaaacctaaaccctgaactcattatctgagtgtcactttatggtttaattcctttctttttgaagtgtcattgatgcacgcatagcaatttgataatgattgttatttagcggtattagataaataacaagaatagatggccactaaagctacctgtctccatcattttgtggcacataggggtctgaagttgaaagaatacgacagctgatggaatgaatgttaagtatgtaaggccttgagtttccttgccctattttaattatactcaccattagtctgggtctgagtcctctgctttttctcggcccctcaatatccagggaggcttagtcatcaaggtacgtactgctccaacagtaacaagagctccctattaatgacctatagctgacttacatattgcgagtttggagagaggctgagaagattagttgttctttttcatttgtatttatttatggtttactttgaagatctcaactgcttctgtgttagaatggctgtctttagctgtaggcctaggagctagcgatttatttggtgtgcgttcagagaactccaaaattctcctgcctcaacatctatctctgctgccaatgtaccgcactccctttgtacttttcatagagatccttgagaagacaggcagtggggctctcacttgggaaaagagaagtaaattaagagaaaaaatatagaatgctagacrtgggttttctggttccacccttgtgcattggaaggagcagactatggagccagagattggtgcgcagtcctccccactgtagaatcagacgtacatcacctctttcatttctccagattcatgttctttctcttaatctctgcttctagtttttttgtgaagcttaatttatrtaagtataaatgacatctgacatattgtgagggcccaagaaaatttttcctcttttcccctgaaaataaaaatgctacttgttgtaataaaggttactttatgattttagatatgtattatatattatgattttagatatgtagatatgatagttaaatatttaaagattcattttcagactcacaatttttatttgcttttatattttgcaatgtatcatttcttaatttcctttatgatgcatcacttattttaatatcagacctattttttaaaggaagcaattgatagctacgatgcaaatgctattcttattaaaagataaatagctttcccttatgctaatgaataaaaattcctactctacagttgttaatcaatctcgagttctaaagtccgataaacacatttaatagcagaggatgagcatatcattaaattgatggtcagtctctgacttgtgtttacatatagtcatctgaaatgaagttcagaatttgagtcccaaatagactatacccacgcatggacacagggaggggaacatcacacaccggggcctgttggggggtggggggctaagggagggatagcattaggaaaaatacctaatgtagatgacgggttgatgggtgcaacaaatcaccatggcacgtgtatacctatgtaacaagcctgcatgttctgtacatgtatcccagaacttaaagtataatataaaaaaagaaatataaaaacaagaacatagtttatgtttgaaatgtaaacaataaatgtgcttatttatgcaatagcttcaaacaatatattttaagataaaatacaatggaaattattaaaaaagatatactcacatatttagtatatataaatattcacagactgagatggggaaaacaaaacaatgattgtaactaggtagatattatggaaataactgatgagttttccatgcctgtgagatagtagaaattataatcagaaacccttctctttgaaggggagagataaacatgtttcatgttcatgattacgtatgaagtctcatctttctgcagggtgatgagacaagagggataggtgtattaggccattcttgcattgctatgaagaaatatctgagactgggtagtttatgaagaggtttaattggctcacagttctgtaaacttcacaggaagtgtggtgctagcatctgcttggcttctagggaggcctcagaaatcttacaatcatggcggaaggcaaaaggaaagcagccgtgtcctatggaaaaagcaggagccagccagagagagggagtcggtgggggaggtgccacatactttcagacaaccagattatgcaagaattcactcactattgccaggagagcaccagggggatggtgctacatcattcatgagaaatctgctcccattatccagtcacctcccaccagtccccatctccaacactggggattaaatatcaatctgagatttgggcagggacaaacataaaaactatatcaacaggtatcagaataatcaactcagcatcctagctttgagtgcttgccccctcagaactcagtatgctgtctctaatacctgaatatagtagcaatggcaaccctcacaagacttctgaagcaatatctattcttaccagcttaggtaataaccattatttagacagcttcagccaaaaaaagatctctttcctgtttacgctcactgactttctccttttccacttaaactgcttattgctacccaagggcatggtagggaagctgactgttctaggcagttccccaaatttataggctggtgtagtagcattaactgacctagggtgataacatatttacagtggatttctttaggatttgagaagtttctttttactcagtacgatataagttgtgtcatgtaggattcgaatacttgttatgtgtatgctttggaatttagatgtttaatggtcaccaaaggtcttttaacttcacattgtcagatcaccctgcaaggagtttgaggaaaatgaagtctatataaatttttagtggaaccacaacatgtgcataatctctgtccattagctttcactgctaagctattgatattttagtctatttttcccatactcactctcccaatgccgacgctttcacatattgtgctcttcccatgtagtattttaataaataccaaaagaaaaatatccttactccgatctgtaagaaattataaaaatctcacctatagttcttttttccattagtgcatagagtcaattttggtcatgtaaagatctcctgcctggagagaggaaatgcaggtaccataaatcaaataaagatgtcaaatgtcttcaccaactaggttcttctgatatagcctattccttattgtaaccaaataatgaatttataactcttaatactgaaacttgaattttgattcagtttaataattctgaatgccttccaagggtaagataataatcacaaaaatttttggactacatattaagcactgttctaagcacattattttgtttaattcctaacacaacattaagaaatcagtgattgtcctaattttattgatagtaaactgaggcactgagagattcagcagtttcctctacatcacatactaataaataacagaattgggatcaagtctaagcaggactccagaacccaggatacttgctatttaaccccttatatttgatatataattatattcttatatactttttactttagtaaaaagtaaacattgtttttatgtacaatgttgctatttatgtgagcaatattgtggatgaagcttagaaagaatacttacatgtaagtatatacctacatacttaaatatcaaatataatatatttatatttgtgtataccatagatgactgcttaaaaataatacatatatgtgtatgcttatatacttacatatcaagtatatggtatgtaagtgtgcatgtaaatatattaaatatatgtaaacataagcatatatatacacacacagaaacaggtttgcttggggtatagaaacagatttgtttagaggtgtagataacatctagaggaaataagaagtaagactacctaaaatagacagcttcagtttagaaacagtagccaataaaggggtgatagtcctatcatggtagaatcagcatatataatgaaggtttctactatattattaataaacaagcacaggtacaaatatccttcagctggactccccttgctataagtatgtaaggaattcaactataatagaacttgtgggaaagaactatttcaggactttacacccccaagcattattatttataataccaatttggattggcaattttatattgaaagacaatcatgatacttaaaaaaaaaaaaagacacatgaacaggcaagaaaaaaaaagtgagagtacaattaccagctttaagcatctgcttatccctctggctgtaactgtttttaatttttttatttccttattttgtttttttggtttctttagctatttctgactgacatatccagcttggagattttattatacctgcctaaattgtataatttcgctcttttactggctaaaactaagctgaattaagttttgaatccttgcttcaagtgattatcttaaagaagatggccagcctctgcttttgctataccatgttaaatcatcaaagtgaaggttttctaccatttatgatgattgcttgttcttgtgcattccattcattttgggcaattttccttcaatggtccattttgctctcttgtttttatgtacaatgccgctatttatgttagcaatgttgtagatgactacttaaaaagaatctattttcattcattttacacgttcaaaagtaggagatataaccattgtgatacaatttataccatacgagtattggaagctaaaatttgtatttgtttccctattgttgacataaactttactatggatttatttacaaattatccagatattgcttttgtctaatattctgtaggtttcatgtggtttttttttgctatcttcactctaataactttaatattctctttcctctttactgcttatagtcaatatagttttaaaaaaaagagtaaagtgcacttttcaagggtccaatttccatccgaaatcactatgttcaatgtgataaactatgtccattggtgagtggtgaaaaatcataggcgtgcctattgcttaggaaaacaatctaggacaaccctggtgagttccacttgggcattcaagtgctaaattgagctcagtaaagttggccatttccctgcagccacaaacttctggcagatgtaataatgcaggtgtcacgttagctggaacactccctttgaatgtcctctcctacacatgctaacttctattgactttttatttaacttgctcatgaggcatggcaaaaatcaggcaagaacgttttgtgcttatgcttgattgaagtttctgggggaaaagtgtcacctaagagttgttggaacttagatataagaaacagaagggtcagtactttactttctgatgaaaatgtatattttctggtagaaaaaaatcaacaactttcatcttaaactactaaatatacaagtaatttaaagaaagataatataacatataatcacattataatttttgtgatactttactatgacatgtttttgtgatagcatctattattttggatatagaaatgagaatggagatgattgaacactttagtggaacccattaatttgatttgcagaaaatggtcttatgtcttctcatattactactaactcacacgatattctaagcctcagtttcaccctagtaaaaacaaaacaaaaagaaacaacacaaactcccttcttattttactggtcagtcatgcagctagctgaatatatactatatgtgaagtaacaaactttaaagaaaaacagtcttaccagttattacatattaccattctatgctttcagtcttcatactccaagccatttatataatgaacctcttcaggtgtactaaaaaatggggcttatatatacaagtacttatttctttgtaagagaagagtaataccatgggaaattttataactctgtgaactaatgccaaaaatacattttatttttaatttgcttttatgttccatgtaataaaaggatattttaggtgatgtcataggtttgataggactccactaatttttaaagtaataatttattgagatagatataaaattttacatcaaatatttaatgttctgagagtcttcatttgttatttaaatagtgttttcatagttttggcaaatgattgtgcatttttgaatttgtgagagagtacttccgagtctggcatggacaagatgaatgttttgcttaaaaggttttcagagtaatattcagatgactcataaagtgcctattatgtttctgtatattaattattgtatgtttgctagttcataagaatatacaacttaaaaattttaagttgatttaaaataacacatactcagaatatgtgtatatatatctataaatagtcaataattaatacattattcctgtgttaatgtctctgaactaagcgtgatgggatatatatttacttgatggcatttctttttattaggagctggtattagaccaaatggtatttgttctcctattcagtcattatgtattgggtacctactatgtgtaaggttttgtgctagttccaaagccatttgttgatgaataatcactagttattagaccaaatggtatttgttcttctattcagtcattatttattgggtatctactatgtgtaaggctttgtgctagttccaaagccatttgttgatgaataatcaccagtcattgaatctataatataggtttataacctatacaaagagctatatatagacaggacacattaatggacatgtgagaagcagaaatatgaattcatgaaagtttagtggaggttagaaacaaaagctcttagctaactttacacatgttatctcatacaagtctcgatgtacagtttttaggaggtatgtgtctctatcccatattttatgaaagaaatgatgactcagaatgtttaagtaaattctccttactccatattggagccaggttttgagttcagaaatctctcagtccaaggacaatattctttccttcaatatatcccactgtcatgggagccaaaggaagaaggaagagagaatttaaaataaatgaaatagaaagacactttcaagaggattgcatggtttagagagagaagagagaaacagaattaagtcc

SEQ ID NO: 96381 - DNA, 80768 bp, Homo sapiens
  misc_feature (1)...(80768): n = A,T,C or G
gcatcactggacagtcattttgaaaacaggtataaataattatagtgcttgttattttggccaatctttgcttgtaaataatgacaaaatgcaaaatggaaaatattagttttcaactaattgttcctagttttgattaaattgcttcccttagagtctgtgtaccataatacgtcgaatgtagagaagaggatagggagttagcaaccatgtctaaaaacctccaaaaagatggataagtttctcttttttttttttttttgagacggaattttgctctagttacccaggctggagtgcaatggcgtgatcttggctcaccgcaacctctgcctcccgggttcaagtgattctcctgcctcagcctcccgagtagctgggattacaggcatgcaccaccacacccggctaattctgtatttttctttgaggatgggatttctccatgttggtcaagctggtctccaactccggacctcaggcgatctgcccaccttggcctcccaaagtgctgggattataggtgtgagccaccacgcgcagccagatggataagtttctaactgtgaaagaaaccaatacatcatcattgaaagagacaaatggtattaaagaataaaaaannnnnnnnnnnnnnnnnnnnnnnnnnnnnnnnnnnnnnnnnnnnnnnnnnnnnnnnnnnnnnnnnnnnnnnnnnnnnnnnnnnnnnnnnnnnnnnnnnnnnnnnnnnnnnnnnnnnnnnnnnnnnnnnnnnnnnnnnnnnnnnnnnnnnnnnnnnnnnnnnnnnnnnnnnnnnnnnnnnnnnnnnnnnnnnnnnnnnnnnnnnnnnnnnnnnnnnnnnnnnnnnnnnnnnnnnnnnnnnnnnnnnnnnnnnnnnnnnnnnnnnnnnnnnnnnnnnnnnnncctgggcagactctgtctccaaaacaaaaacaaaaacaaaaaacctcattaatccccatctctaaattcccccctaaaggcaactatagttaagtttgtgaggtatgctttcagatgttttctgtttatatcaaaatatatttttatataaatgaaataacattatattttttgtaatttattttttagcctattgtataggagatagaacatattagccagccccttgtgctagtagtttaggctattttcaacttgccagtgaaaataatacagcattgaacatctttgttttagtgtatctttgcatttctgtgaaatagttttgcagtacaaatgcttaaaagtggaactgttgttgcctcaaaggatacacaaattgaaaattttgttacatttgtaaaaatgtgttaaaatttctaaattgcccctcaaaagttactaatttatacacgtatgggtagtacattagagttggaaaataaagactgttggtaatttttgtgtatttaggataggggtcctcttacagtagttttcaacatgagccggtccatttttattttctttctttcctttttttttttttcttgagacagactcgctctgtcgcccaggctggagtgcaatggcgggatctcggctcactgcaacctccgtctcccgggctcaagcaattctcctgcctcagcctcctgagtagctggaattacgggtgtatgccaccacacccggttaatttttgtattttcagtagagatggagtttcaccacgttggccaggctggtctcgaactcctgacttcatgtgatttgcctgcctcggcctcccaaagtgctgggatcacagacgtgagccaccgcgcccagcctattttctttcttgtatcccatttggaagtcatctagctggataatggtttctggataattgctctgggaactgagactcataactttatgctcattagcactacgagctaaaaaaatgagctaactaactactgttatttgtctgtgtaaaggtatgcattttgaaatgaagacacattacatacatgcatttttcttaaaattgatttcctgcatcaattttctgatgaccatatatatatatatatattttgagacggagtctgtctcccaggctggagtacagtggcatgatctcggctcactgcaagctccgcctcctgggtgcatgccattctcctgcctcagcctcccaagtagctgggactacaggcgcccgccaccatgcctggctaattttttgtgtttttagtagagacggggtttcaccgtgttagccaggatgctgtcgatctcctaacctcgtgatctgcctgcctcggcctcccaaagtgctgggattacaggcatgagccactgcgcccggcccgatgaccatatttttttgtgccaaattttaatccattctggaggtttcaaagcaagatagtgaagtttatcagtccatatgaacttgagcctgtaccaacacatggttgccagttcatacctaatagtgtaatatggcccttttctctgaagaaaatgccttttccaaatctcccttactagaataaatgttatcatagtaataccacttcatacctgcatagagttttagagtttacaaaggtcgttcacaaatattattccgtttagtttttacagcaacccagtgtggtgactgggcagtactattatctccacttaatagatgcaacaaggttgaacaagcatgaagtagtagaactgggactagtagggcagtaaacttcccacaagatatgttgtctcttccatatatatatgaggatagcatattcctttcatagaaattttattccatgattgtaatagttgctttcttaaattctctttagaacaaagtaaaatataagttaaaaaaggaaagaaatccctacaaaaaaaaagagaatttttttccttttgggtaattttcacattacctttccaaaataagtcattcttttatcttttaggtaaactgtaccaaaacatctattctgtaacattaaaaaaaaaaaatgtgaggatggacatggtggctcacacctattatcctagcattccgggaggccaagctgagaggattgcttgaggccaggagtttgggaccagcctgggcaacatactgagactccatttctacaaaaaacaaaaaaattagctgtgcacaatggcacacatttgtagtcctggctatttgggaggctgagaggcaggaggatcttttgagcccagcagttggaggctggaggctgtagtgagctatgattgcatcattgcaatccagcctgggtgagagtgagaccctgtctcaaaaaaaaaaaaaaaaaaaaaagtgaacatctaagacgaggacaatataaaacctcaattctgcaagcaaatcacattaaatgctagtcatacaatatatcagtaagtttcatcatatttttttcctacaactaaccataatatcacaggactaataatctgtgatataccacagttaaaacgtaattcttcttgatttcttacttataaagatcataattgctggtcagcaattgatccatagataaggtgattttggaaagaaatgataagtcttgccattttgaaaagaaaagtttttttttttttttgagatggagtctcgctctcttgagcaggctggagtgcagtggcactatctcagctcactgcaacctccgcctcctgggttcaagcgattctactgcctcagcctcccaagtagttgagattacaggctcatgtcaccacgcctggttaatttattgtactttttagtagagacagggttttaccatgttggccaggctggtctcaaactcctgacctcaggtgatctgcctgccttggcctcccaagtgctgggattacaggtgtgagccaccgtgcctagccaaaaatgattattaaagaaaaagattgttttccttttttgatccataatgtcattagtctcattgatttcagttttctgtcttaacattatgactgtaatttcttttttttttttttgagacggggtctcgctcttgcccaggctggagtgcagtggcgggatctcggctcactgcaagctccgcctcccaggttcacgccattctcctgcctcagcctcctgagtagctgggactgcaggcacccgctaccacgcccggctactttttttgtatttttagtagagacagggtttcaccatgttagtcaggatggtctggatctcctgatctcgtgatccgcccgcctcggcatcacaaagtgnnnnnnnnnnnnnnnnnnnnnnnnnnnnnnnnnnnnnnnnnnnnnnnnnnnnnnnnnnnnnnnnnnnnnnnnnnnnnnnnnnnnnnnnnnnnnnnnnnnnnnnnnnnnnnnnnnnnnnnnnnnnnnnnnnnnnnnnnnnnnnnnnnnnnnnnnnnnnnnnnnnnnnnnnnnnnnnnnnnnnnnnnnnnnnnnnnnnnnnnnnnnnnnnnnnnnnnnnnnnnnnnnnnnnnnnnnnnnnnnnnnnnnnnnnnnnnnnnnnnnnnnnnnnnnnnnnnnnnnnnnnnnnnnnnnnnnnnnnnnnnnnnnnnnnnnnnnnnnnnnnnnnnnnnnnnnnnnnnnnnnnnnnnnnnnnnnnnnnnnnnnnnnnnnnnnnnnaaaaaaaaaaaaaaagaaagaaaaaggatctgggcattctcagtaccttttctgatctttatcttcaggaaagccatctctatatagttgagcaaataaatactgggctgagtatctgatgaactgcactctgcataggttgcatactgagaatgaacttgggcagtttatcttttctgggctttggtttcctcatctctaaaatgagagggcgtgttagttctagaccatcatcccaagggtccattttagctttagcgtgcatcactgtaaaacctgttaacaaatatttgttgagataaggaattctggtgtatagccaacattgtgggaatatttgtggatacctaaatagtggtttatcctctggggaaagcagttcctacagctactaaatactaacaaggcctatggctaaaatcaggtagcaccttgtgatgtaattcaaaccactaggacatgtggcatgcaagactacatcaggctacttgaggtatttattaggtaacaatttttttttttttttgagacggagtctcactctgttgcccaggctggagtgtagtggcgcaatctcggctcactgcaactttcgcctccagggttcaagcgattctcctgcctcagcctcccgagtagctgggattacaggcgcctgccaccatgcctggctaatttttgtatttttagtagagacggggtttcactatgttggctacactggtctcgaactcctgagctcaggcaatctacccgcctcggcctcccaaagtgctgggattataggcgtgagccaccgcgcccggcctaggtaacgatttttgcgcgctaaacggttcttagtaacctgcagagtgaaagcagagtacctaaatatcatactgtatacgttaaaaacaggggagaaaggaaaaaaggtgttaaagtttacagcaaaatgagaaacaaatgaggaaaacaagtgaaagcttctcccgcaactgaaactcaacctctacattttacctaggtaaaatggtaaaattgcccacagggctcaggtgtttggatgcactgtccaggccaagaggaaagattttcagccagtctccaaaacatctcagggacgggtatggaaaacaggcgtaaagtgtctgtattgatcaaatcaaccccagagaaactttcctagggccagagagcatctcaaccgcgaaagtccgtttgcggcctccttctccacttcaggcctgcaaagcggctgacggcattcgcagtggctaggcaacggcccgcgcagacttctcggcgttagccccgcctcttgaggcgcttccgccgccgggctcctggacacgcctcctttaattggctaacgtcacgctgggagtgggcggggaaaatatgtcagactgtgcggtcacttccggcccgggagcgcgcgggttgattcgtccttcctcagccgcgggtgatcgtagctcggaaatggcgggtaagttaccgggaaaagtttaccaaggggaggaggcggccagatcggggatagaacgccgagacggtggtgacaatgcccgcctagaactttcgggctgtagcctgggttccagaaggcctgcttgggaccggaagcgcggaactctcagcccagcagctccttgttggcggcggtccgcgcccccgcccccaactgcttggggttctgcgccttctgccagcaatccggcccctaccgagggccgaagacgccagggaaaagcgtcatgatttgggctcgtaaaatgccacatgccttggggcctgtttctcttcccattccttttgtccactgctgcttgcttcagctcttgtacatctggtcctgttcccgccagctgattttaatgctcagatcctcctcctcttccaggtctccgtctaccttccactacagtcaacttctgagctagcgcattgctgccttgccctgctctggcgctcccacttggatctcgactgacttcgtagtcgtctcgttaatctgtcacactttagtattccgaggatcgtatttagatgccctttgagaaagactttgttcctgaactgctcccttctcttttagggttggactactataatacaattctcttgtgtacattctagagacccttcaagttacaacatttaataatgtataattgctattactttgtacgtgtattaaggctgttttggtgtgattatttttttcgattacttatcttttgaagttatggacagtttctttttcctgagacagggtctctctgtcgcccaggctggagtgcagcgatcatagttccgggcagcttccaactcctcgtaggctcaagcgatcctcttgcctcagcctcccgagtagctaggactacaggcatgcgccacaacattcggctaaaaaaaaacaattttttttaaccttttagagacagagtctggctgtattgcctcaggccggtctggaactcttggcctcaagccatcctctcgcctcagcttcccaaagtgttggaatgacaggattgagccacttcgctggcctttgttgcttttatcatctctttacagggcattcctcatagtctctccacattaaccattccatttttatgaatatgtgggatagacaagctgttgtgtgagctctacagatgtttaaagaaggacttttctaccagatggagattgtaggatcttgaagtaccacagaagagggaggacgtactctaagaattacatctaaattcgaattttgggcccatcatttagtagttggatgcccttcaactaaacctctttctaagcctgaacttttgaatgtaaaatggggttgatgtaatacctacttatagaattgtgcagattgagctaatatatgatttcacaggttaaattttgttgcttacattcctcgaagtaaattctgtaatctcggttctgtagattagggtcagaggggttaagtaatgtgctctagttccctgagcttactagctcagtaagtgtgtgaaatagtcagaatccaggaattctcactccagactattaatctgtactgcttcaagtctttcccattttctgtgtgtgtgttttaacccctttttgaagtttatagcacatcattgtacccctttttattttttgcttatggcttttttctgtctgaatttttactgattttttttttttttggagactgagtctcgctctgtcaccaggctggagtgcagtggcgcgatctcggcaacctttgccttctggattcaagcaattctgcctcagcctccggagtagctaggactacagtcacgcgccaccacgtccagctaatttttgtatttttagtggagatggggtttcaccatgttggccaggatgatatccgtctcgacctcgcgatccccctgcctcggcctcccaaagtgctgaaattacaggcgtgagccaccgcgcccagcccatttttactaatcatatgcccattttgtcaggagatttgttatcttgaaagtttctcttgatagtgatatcttccaatgttatttattatgtatattattgagtagccactatgtagtaaaactattgtgccagtagctcacagtttatgactttaggcatacatgatttttaaatatttaatacagtggaaagatgttttctttgtgcccctgttcctcttccttctttctttacccatggtaactatggttaccagatatttgtgtattcttcttgagacattccatgcattatcatttccttatctgaagcactctggtagactttttccaatacttaaaatgaaattctgtcataattatcagaggacattctcattttgctttttacatcttataatgaaaaagacgacttaggtataaatcctagcaggtaatttgtattagtacatgttcagaaatgttagtaatctatcatgttaattttcaggtttattcatttatattaagtattcctagtttataagcctgtatctcaaaagtgatttctttttctgttttgtaatgaggcattctttttttttttttttttttgagatggagtcttgctctgtcgcccaggctagagggcagtggcatgatctcggctcactgcaccctctgcctcctgggttcaagagattctcctgcctcagcctcccaagtagctgggattacaggcgcccgtcaccgtgcccggctaatttttgtatttttagtagagacgggtttcaccatcttggcgaggctgacctygaactcctgaccttgtgatccacccacctcagcctcccagagtgctgggattacaggcgtgagccaccgtgcccagctggcattcttaatacatttatttaagagtatgtggagaatgacttgtgcttttatgatctatcagcatgttttaaatcatacccctattccacttataataaccctattgcaggtttgacaatttaagtcacttccaaactaaaccttttaaaaaccttttctcttaggatttggtgctatggagaaatttttggtagaatataagagtgcagtggagaagaaactggcagagtacaaatgtaacaccaacacagcaattgaactaaaattaggtatgtatgccatttctaagtgatgttatgtacatactgtgtgtgtatatataatctttcattttaaatttgaagtaaaattttatgtaagagcagttatttatgcaaatgtatggttttctgcatttattgaacatattcagattttattcagttttgatttatgtcatggaaggtgtagatgtttgaaaggtgacagaattttatataaaaaggaaagacggtggggcaaaaagtaataagtatatatagttttagcctcttaaaaatattttttacttttttgcctgtaagaataataaacaatagcaaatattggtgaggatgtggaaaaaaacacttgtatattgctggtgggaatgtaaagtgatataactattttggaaaacagtttggcaattttcttttctgtcttttttattttctttccttccttctcttctttcatttcctcccctcaccccttttttttctttctytcttttttaaagagacaaggaaggtctcactctatcacccaggctgtagtgccacggcatggtcatagctcactgctgcctccaacccctgggctcaggcagtccttctgcctcagcctgccaggtagctaggagaccacaggtgtgcaccacccaagcctggctaatttttataaaaaattttttttttgagacggagtttcactcttgttgcccaggctggagtgcaatggcgtgatcctggctcactgcaacctccacctcctgggttctagtgattctcctgcctcagcctcccgtgtagctgggattacaggcatgcgccaccacgcccggctaattttttgtatttttagtagagacggtttctccatgttggtcaggctggtcttgaactcccaacctctggtgatctgcccaccttggcctcccaaagtgctgggattacaggcatgagccaccacgcctggcttataaaaattttttcatagagatggaccctacgtgtctatgtgtccaggctcatcttgaactcttgtcttcaagcagtcccctggcttggcctcccaaagtgttgggattataactgtgagccacagcgcccctcctggtttgacagtttcttaagaagttaaacataaatgaattatatgacccaggagttatactgccaggtatctgtctactcaagagaaatgaaaatgtatgttcacgcaaaaacttgtacatgaatgttcatagctgcgttattcacagtagccaaaaaaatgtaagaaacccagatatatatcagctggtaaatgaataaagtatagtatagctataccacggaatactatttgacaataagaaggaatgaaattctgatacctattgcagtaaaccttaaaaagattgtgctaagtgaaagaaactaaacaaaaacaccatatattgtgtaattccatttgtatgaaatgttcagaaaagacacatccatagagacagaaagtagtggttgcacagtggagcgcagagtaactacaaatgggcctgacatttcttttgggaattatggaaatgtttgaaagttagattgtggcacagctctgaatttgctaaaattttacacttagaacaagtgaaaaataatatatgctcatgattcctggttgcattactttccatgcctgagtttcctcattgttaatagtacttcacagtggttacaaagattaaatatggagttaaatatcagtaaagtgtttaaactccttgacatgcagaaaatacttggtaagggctgagtggagtgactggatgtggttgctgagatctgcgtattttttttacatgtcccctcatttttcaattacttcattctttgatagtttgattaccttggaacatcctgtcatctgttgtctctgccccagccttggaatcagccatttctccaaggatccctggtttcttttagtaggaaatgttattttattttattttagagacagagtctcactcagtcgcccaggtagagtgcagtggtgcgatcttggttcactgcaacctctgcctcccagattcaagtaattcttgtgcctcagcctccgtagtagctgggattacaggcatgtgccaccagccctgggtaatttttttgtgtttttagtagagatagggtttcgccatgttggtcagtctgtctcaaactgaccaagtgatccacctgcctcggtctcccaaagtgctggaattacaggcatgagctactgcacccagccaggaaatggttttttattttgagatggagtctcactcttgtcacccaggctggagtgcaatgacgcggtcttggctcactgaaacctctgcctcctgggtttaagtgattctggtgcctcagcctcccaagtagctgggattacaggcacccgtcaccacacccagctgatttttgtatttttagtagagacggtttcatcatgttggccagactggtctcgaactcctgacctcaggtgatctgcccaccttggcctcccaaagtgctgggattacaggcatgagccaccacccccagccacaggaaatgatattttaaagccaagattcgggtgctaaagccaagatctaggtgctaggtgaacacattgctgttagtattgctctagcattaatgagagcaggcttagtagatagaactttattacttactgttcagtccctgccacctgcaaggtgactacagtctcatttctttgaccaaaattagctttctgtgttctagcactttatataaatggaattataccatatatactggctttgtgactggcttgtttcattaagcataatttttatgaggtacatcatatgttgtctgtaccagtagattattccccattttttttgttgttgttgtttgagacagagtctcacgctgttgcttgggctggagtgcagtggcatgattgcggctcaatgcgatctccaccttctgggttcaagcgattctcctgcctcagcctctggagtagctgggattacaggcgcctgccaccacgcctggctaattcttttgtatttttaggagagacggagtttcactatgttggccaggctggtctcgaactcctggcttcatgatcgcctgccttggcctcccaaagtgctgggattacaggcgtgagccaccgtgcccggcagttcattcctttttattgctgaatactgttctgttgttggatacatcattattcgccagttaatagatatttgagttgtttctagtttttggctgttattgtatgagtttttttgtggacatatgattttattttggataaattcctagctgtggatttgctgggtcaatagggtatttgtatgtttaactttatgggatacttggccagactgacttccaaagtacttttatactcacatcaacagtgtattagaattttcgttattccatatcctcaccaacattttatgttgtcagtttttaaagttttaggcattctactgggtttatagtagtatttctttgttaatagtacttcatagtggttgtaaagattaaataggttttaattgtcttttccctcataactaatgctattaaggattgtttttttaatgtggttatcgactatctccttttggactcatgtattcacatcttttgcccattttaaaattaggttatttgtctttttgttattagttgtaggtgttatttacctacatattctggatgagtcctttatgcagattacatgttttgtgcacatttttctctcagtttgtggtttgcctgttcatattctcaactttttttgtataactggaagtttttagttttaatcatgtccagtttattaattttaaaaatttctattagtgttttctggttcatgcctaatatctttgtctaccccaaggagatcatgaagctctcctaatgttttcttctggaaggtttttagttttagcttattaaaattatgtccatgatccatctcatgttatttttcatgtccaatatgaggaaagggattaaggtttgttgttccatgtggatatccacttgtttcagtataatttgtgtgaatgccttggtgcgtttttaacaaaaaaatattgaacttacacgtgtggatctacatctggacttttctcattcattgtctgtttttctgtcaatatcgtactgtctggattagtgtaactttctattgattcctggtagtgtgagtcccacatctttattttttaaagattgtttcgattattcttgaccttatttstgtatacattttggaatcaggtggttaatttctatttaaaaagttctgactaatcttaagattacattgaatctaaaattgaatgtggggagaattgctatcttaataacattgagccttccagtatatgaacatgatgtatttctgtattctagaaatgtttcaggttttcagtcttgcatgtattttgttaaatttatctgagtaaatctacatcttttgatttttgatgctcttaaaaatggtatacttttttatttatttatttttgtatgtgtgacatgttctcactttgtcaccgaggatggagtgcagtagcgtgatctccactcactgcaacctctgcctccgagctcaagtgatcctcttaccacagcttcccgagtagctgggactccgcatacaccaccatgcctggctaatttttgtattttttgtagagacagggtttcgccttgttacccagactggtcttgaacttctgtgttcgagtgatctgcccacctaggcctcccaaagtgctattacagatgtgagccactgtgcctgacctaaaaatgatatactttaaacattttctcttccaattgcttgttttatgtgtgtgcatgtgcatatgcatggacacacaatggcacagtttgtgtaattgtgttgtattctgcaaccttgctaaattcacttattattgtagttttttgtattctgggctttttctgagagagtggctcactccattgccaaggctggagtagagtggcgtgattgtggctcactatagccttgacttcccaggctcaagygaacctcccacctcagcctcctgaatagctgggactataggtgcgtgccaccatgcttggcaaaatttttttttttttctagggacagggcctcactatattgcccatgctggtcttgaactcctgggctcaagcaatcctcttgcctcagcttcccaaagtgctagggttgcagacataagccaccacacccagctataggatttttttttttagatgtagattatttcagatttcctgcacacaaacattacctgttaatgaagaaagtcacagtttttctttgccttatacagttgtccattggtatcttcagggatttggttccacgatcccccgtgaataccaaaatctgccgatgatccggtccattatacaaaatgccatagtgtggctgggcatggtggctcacatctgtaatctagcactttgggaggttgaggcaggcagattgcttgagcccaggagtttgagaccagcctgagcaacatggcagaaccccatctctacaraaaatacaagaattagccaggcatgatggtgtgcatctgtagttgctactcaggaggctgaggtgggaggatctgcctgagcccaagagttctaggctgcagtgagctgtgattgtgccactgcactccagtgtgagtgacagagtgagaccctgtcttgatagatagatagccatatagccgggcatggtggctcacgcctgtaataccagcactttgggaggctgaggcaagagttcgagaagacaagcctggtcaacatggtgaaattccgtctctactaaaaatacaaaaattagctgggcgtgatggcacacacctgtaatcccagctacttgggaggctgaggcaggagaattgcttgagcccaggaggtggaggttgcagtgagccgagattgtgccactgcactccagcctgggcgacaaagcaagactgtgtctcgggggggaaaaacagccatatagtacagtcagctctttgtatctgcagattctgtgtttgaggattcagccaatctcatgttgatccgtaattggttgaatcagtggatgtggaacctgcatatgtggagagccacttgtgtttcattttcttgccttactgcactggccagaacctctattacaatgtcaaatggaagtgatagagtagacatccttgccttattcccaattgaagaaggaaaattttgagcctttcaccattcactatgatgttagctgtaggtttttcatatgtgccctttatcaggttgaggaagtttccttctattcctagtttggtgagagtttttattatgaaagtgttaccttctaatgctttttctttatcaagataatcataagatttttctcctttaattctgataatgtggtgaattacattgatgaggttttaagtgttaaattagccttgcatgccagtatattatcctttttctgctttgctagatttgacttggcaatgttttgttaagactctttgttcatgacaggtaatggtttcttttttcatacgtctttgcttgattttggtatcaaggtttcctggcctcataaaatgagttgggaactgtttcttctctatcttctggaagaatttgtataagactgcattattcctttaaatgttcagtagcattcaccagtgaagttttatgtgccttgagttttctttgttggaaggtttttaactatacatctaataaatagatttaatactgttctgatcttctgtttcttcttgtgtcagttttggtgatttttgtcttttaaagtatttctctattttatctaactttcttggcagaaagttgcttacagtattcccctgttaccatttaaatgactgtagagcgaggtgcagtggctcagacatgtaatcccagatctttgggaggccaaggcagaaggatcgcttgagcccaagagttcaaggccagcctgggcaatataatgagatctcaacaataaaataaaatttaaaaattagccaagcatggtggcatgcacccatagtcctagctacttgggaggctgaggtgggaggatcacttgagccggagaggtggaggttacagtgagctgcgatcatctcactgcactccagtctgggtgacagagccagacgctgtctcaaaaaataaaataagtgactctagaatctataatcccttcttgggggtattggtaattctttttctctttgtcttttaatgtctccttacaagtttaccaatgnnnnnnnnnnnnnnnnnnnnnnnnnnnnnnnnnnnnnnnnnnnnnnnnnnnnnnnnnnnnnnnnnnnnnnnnnnnnnnnnnnnntgcagtggtgtgatcatggctcactgtagcctcaacctcttggctcaagtgaccctctcacctcagcctcctgagtagctgggactacaggtgtacaccaccacacttagctaacttttgtattttttttgtagagatggagtctcactgtgttgctcagggtggtctcgaactcctgggctcaagtgatcctcctgccttggcctcccaaagtgttaggattgcaggcatgagccaccttacctggtctaatttgctttttttaagatctttctttttaaagtagatgtgtatataattaactttaaactttccttttctaatactagcattaatgttataaatttacctctagttgcagtgagccaagatcgcatcactgcactccagcctgggtgacggagcaagactctgtctcaaaaaaaaaaagaaaaaaaaatttacctctaaatattgatatagttgcatcctaccaattctgttatgttctatttttattgctcaattcaaaatatttttaaatttcccttgcgacttcttttttgacccatgagttatatagaagagggttacttaatttccaaatatttgggacttttctagctgtcttattgtcactgatttctgaattagttctgtcaaggtcagacaatatagtcttatttcagtccttttaaattcattgagccttgttttatagcttatcatgtaggatctgtttggtcagtgtcctaggtgcactgaaaaataatttatagtctgcagttttatgtagtgttctataagtgtaaattgacttaatagtattaaagtcttttatatttttactgactttctagcgattaggacaattgagagaactgtcaaaatctccagctggaattgtggattgtctatgtcttcagtcattaatttttgcttgatgtatttgcagctctgatattaggtacatacagatttagacttcctatgtcttcttggtgaattgaccttactcattataaaatgttccatctttatctctgtcccctctttaacccatcttgcctcatatttaagtctactttgttagctattaatatagaaatgagaatgttttaaacctgtaagaaataacagcatgtttatatgctgatgccaatgatctatcagagaagggggaaataatacaggagtatttctggaagtatcagagaaggggagtatttgttgagtaatatccttgacaatgtaagaggggtaagtattttattaatcagtggaaggattagccttagataggagcatggagaatttctaccataacaagatgaaggagggtatacaggaattgctgcagtaagttagaaggtgtagaggaagcattttgtgcagtttcttttctgaatgcttctgtttcctaagtgagatagtaagcaaggtcatctgtggagaacgtgcttatagaagaaggcgttggagatttgaggaaatagtcatctaggtgagtgggaggagtgagtagacttgagaactgttaccattgtcaggtagcactaagggcccacttcaagttagttctcatgaatgtaaagtgaggtcagccacgtccagatgaaagtgtgccacaaagaatagacatatagttaaatttaactagagtgggtttttttttttttttttttgagacagaattttggtcttgtcatccgggctggagtgcaatggcgcgatctcagctcactgcaacctccgcctctggagttcaagtgcttctcctgcctcagcctcccaagtagttgggattacaggcgcccaccaccacgcccagttaatttttgtatttttagtagaggcggggtttcgccatgttggccaggctggtctcaaactcctgacctcaagtgatccatctgcctcggcctcccaaagtgctgggattacaggcgtgagccaccgcgcctggcctagagtggttttctttttacgaggctgctatgaaaaaaattaaggccaaggggttgaggatgtttaggatggagtaataacattgatggaccatggaattctgcactggaaagggaggaaaacgaggatatgaagtagaagagggacagtgaaattatgttcaaatcaattcattgtggccaagcacggtggctcatgcctgtaatcccagcactttgggaggcagaggcgggtggatcacccgaggtcaggagttcgagaccagcctggccaacatggtgaaaccccgtctctactaaaaatacaaaaattagccgggcatggtggcacatgcctataatctcagctacttgggagactgaggcaagagaatcgtttgaaccttggaggccaaggttgcagtaagctgagatcacgccactgcactccagcctgggcaacaagagcaaaactccatctcaaaaaaaaaaaaaaaaaaaaaaaaagacaaaattcattttaagtcttggtgggggctgaagaattgttagaattggggtatggttgggtgtggtggttcatgcttgtaatcccagcactttgggaggcccaggcaggatgatcactttagcccaggagtttgagaccagcttgggcaacatagggagaccccatttctacaaaaaataaaatattagctgggtgtggaggtgcgtgcttgtggtcccagctactcaggaggctgaggcaggaggatcacctgagcctgggaggttgaggttgcagtgagctgtgattggttgtgccacaacactccagcctgggtgacagagccagaccctgtctcaaaaaacaaaaaacaaaacaaaaaagaattgggggtatagggagtgaggtaggaagataagtggtgatggtaagatggtacaatgtttgaaatagagattaaggaggtataattgtcaataatgataaataaaggctagggcacatcatgggaataagtggctaaggtacagtaaagacaaaattcttggggaggaatcaaggaactgcaaggctggattggaagattcattttcattaattttgaagttaccaagatttaagtcagatgtagtgttggaaagtgcaacagtgagcctggagctaaattattcaaagaatgagggagagaggtggagcatgaactttaaagtggtttattcttagtgtgtggggagagagacattagtctgaaaccagcaatgaggagcaaggaggataccttgttctagcagtatgaagacagagaaaacaaccactacctgagaggtctgtaagacaggagcatccttaggggagagccatgtgtgccaaagaactgttagcgcaagataggagagcatttgataaagaggttggggatatggagaattttggtggtaactgacctctaagtttcacagtggtcacaatgagttgggaaggggtgggaaattagatgagtatttttatactactgtataatacagggatgagaatcccagtgataagggaatttttaagaattggactgctgttaatgggaataaagagtgtgatgggattaattatggcatctctagggaatatttaatgttgagatacctcattttgcagattgtttgtgctgatgggaatgttgccagcacactggggccactcttgtgttttaaaattatataattaagcttgtttttcaatttagcatgggtaggaaaagatgtatcgggcaatatgctaagatttcagttatttaaagaacacaggattatgaataaacttagatgtagtccagaatacaattagatactataccccgtgggggccagaatccatttatgtctgcattatgagcacctgttgatagatcatatatattaaatgtgttaaatacttaagtatttatttatttatttgagatagggtctggctctgttgcccaggctggagtgcagtggtgtgatctcggctcattgcaacctctgcctcccaggctcaagtgatccttccacctcagcctcctgagtagctgggactacagatgtgtgccaccacgcccagtgaatttttgtattttttgtagagatggggttttgccgtgttgcccaagctggtcttgaactcttatgtatttattaaacaagctttaaaaattgattaaaataatgtgccttggtgatttcttaattttacttttggttaataagacatgtagactatatcttctttcatgcatcttgcctctccaaaactactgaagtgattctaagaactaggaagtatatgaacttattgccatacatggtggtttgtgcctataaaaaggtggtgccactgacagggacacaaagattggaggggagagctggctctggtggtactgttgctggtgatagttgaagccaggaaaaaagatgagctctgaaaggaacacactgtgaaagaagggcagaccaaggaccaagtcttggaaaatgcctatatctaagggagtggcagcaaaagaaaccaggttaagtcagaaaaacaaggaggtatagtatataagtgagaaaggaagaataatatttcgggtagaaaaagagtttaataacatctactgttatggagttcaaggagagtgaagaaaagcagaacagcactaattgtacaataaagtcatcagtaactctgaaatagaagtagcatgatggttaattatagtaatggagctgtaggaaaaagggtggctgagggaggaggatcacttgaagccaggagtttgaggccagcctaagcaacatagcgagaccttgtctcttaaaaaaaatcaaacaattagccaagtgtgtggtacacacttatagtctcagctacttgggaggcttgagcacaggagatcaaggctgcagttagctgggattgtacactgcactgcagcctgggcaacagagcaagaccccatctatctatctgtctgtctactgattctctctctctctctctctctctctctctctctctctctctctctctctctctctctctttaaatgaactgtaagagtagaaacaatagggcagggcaggcatggtggctcacacttataatcccagcactttgggaggccaaggtaggaggattgcttaaggctagaggagttcaaaaccagtctgggcaacatagcaagactctgtctctacaaaagaaagaaagaagcaacagtaaatatattcaaaaggaagaatcattgcaggccctatgttctatatagcagcagtccccaacttttttggcaccagggaccagtttagtggaagacaatttttcttcagaccagggagggaggtttgcggggaatggttttgggatgattcaagcgcattacattcattgtacactttttctatttacattgtaattataatgaaattattatacacctcactgtggaatcagtggaaaccctgagcttgttttcctgcaactagacagttccatctgggggtgatggatacagtgacacctgaagtgtattgcttatgtccagtctactctgtaatctcgttttggttgctgtcattgcagaaaaccctgcctcacaaggataagatgttgagaatggaagcaggcttttcagtacttttctggcaatctcaggatgttctgccttgattttaatccagaacataaggagatttgaagttgtctgaaacatattttttttttttgagacagggtcttgctctattgtccacactacagtgcagtggtgcagtctcagctcactgcaacctccacttcctggattcaagtgattctcgtgcctcagcctcccaagtagctgggactatgggtgtataccaccaaaccccactaatttttgtaattttagtagagacggggtttcgccatgttgctcaggctggtcttgaacccctggactcaagcaattcgcctgccttggcctcccaaagtgctgggattatagatgtgagccaccaggcccggcytcawacacacttttaaggccaccttcatttgctgtcttaagcagttgaccctattccagcacggataaagtcgattcacctgacttattcaaaaatgggtcacggatccattccttcccagttcagggttcttttgtggttgggaattaatgctcaaactcttttgaaagctgagataggtgatcgtgcaccagctggaagtaagaggaccctgtgagccagggcctttcaaaatctctgctaatgtttgaaacatgtcaacaaacccagtgttcgctcgtcaccctaatacttctgctttggctttgaatgcagccactttatctgccaacttgaacacaattgttgttctcccttgaagtgatagatcaagtttgttaaacaggttgaatatgtcacaaaaataagcaagttttgtgacccattctgtgtcactgaaatgtgctgcccgtggtgactgtttttctaaaagaaatctctggagcggctgttgtaactcaaaaactttagccagtgatctacttttagaaagctatctcacttctgtgtataagagaagatatgtgtgatctgtgtccatttcctcacagagcaatgtgaacaggtgtgaggtaagggcatatactttaatgtggttgataattttaattacgtcctgcaaaatgtcaagttcaggtgacattttttagctagccagcattactcaatggatgaaatagtgcgtagactcacatttggaaacaactcctttttttcttttttttttttttaagacagggtctcactttattgcacaagctgactgctgtggcgcagtcatggctcattgtagcctcaacttcctgagctcaagcagttctgcctgggactacaggcacatgccaccacacccagctaattttttattatgtgtagagaaagggtatcactgtattgctcaggctagtctcaaactcctggactcagcgatcctcccacctcagcctccaaaagtgctgggatcacaggcatgaaccactgtgtctggccaaggtgacctctttgacctgaataatgaaaccagaaagctgtccagtcatggcagccacttcgtccatgcatataccaacacaaaatgaccaattcagtttccctgatatgtaatcattcaaagacttgaatagttctgcagtgtggtattggttggcaagaaaagtacacataacgtattctcatgcacatcctcctgaaaaatatattgcacaaaaacaagcgttgttgccttgttgtcaacattggtagactcgtcaacctggattgtgcaccatggtgactcaaccctctctaacaattgtgcctcaatatcccctgctatttcattagttcttctagttatggtatgagcctaaggaggaacacgcgccaccttttgaattcgagcctctcctaaaagttcacgacaaatgtccttagcagcaggcaggattaactcttcaccagtagtaaagggcttcttagttttagcaatttggttagccattaagaatggagctctcagtgcagacgcatttgatgaagtggtggccttcaataaattgcttctgttcttcatgttcatgtttttttcttttgaaaactccaaaggcttgtcttttaatgcagggtgcttggtctcgatgtaactaagcagttttgaaggttttgtggctttgttggatagctggtcaccatgtactatacacagagggcttggagaatgtgaatcacctgttgcagtgaacccataatttaagtaggactcttggtattttaaatgcagctttctttttgttggcagtcttagagtcttctgctgtctcatcattgggtctttcccctttttcaaagaagctcttcagtgatatttgtttttcactcattttgactagggttagcaaaaagacttaccaaaactgtgactgagacaagtgtacagtgtgagaaagaggcacagatggaagtcgcaaataaaataatgggttggcaacatggggactaaaataaatgttggattctgacttaaagcctgccactagatgtagctgtacaatggaactacatgaactcacttgccattataaagcctgccaccagatgcagcttagttgtcacttgccactcactactcactgatagggttggtgttttttttgttgttgttttgttttttttgagacagagtctcgctctgttgtccaggctggagtgcagtggcgggatctcggctcactgcaacctccacctcctgggttcaagtgattctcctgcctcagcctctggagtagctgtgattttaggtgtgtgccaccacagctggctaagttttgtatttttagtagtgacggggtttctccttgttggccaggctgggctgatagggttttgatatgagtctgcaagcaattgatttattatggtctctttgcagtcaaacctctctgctaacgttaatctgtatttgcatccgctccccagtgctagtatcactgcctcagctccacctcagatcatcaggcattagattctcataaggagccgtcaacctagatcccttgcatgagcagttctcagtagggtttttgctcctatgagagtctaatgccaccactgatctgacagaaggcggcgctcaggcagtagtgcaagcagtgggggacaactgtaaatacagatgaagcttttccagcttacccattactcatctcctgctgtgcagcctggttcctaacaggccacaaaccgatacatggtgtttgggggcccctcctatagagcaataaggtgccatttagtattccaggccctgagcttccatttttctacaaaagtgtgagtgacatagattttttttgtttttgttttttgagatggagtcttgttctgtcacccaggctggagtgcagtggctcgatctcggcttactgcaacctctgcctcctgggttcaagcaattctcctagttcagccttctgagtagctgggattacaggtgcacaccaccacacccagctaagttttgtaattttaatagagacggggcttcaccatgttggccaggctggtcttgaactcctgacctcaggtgatccacctgccttggcctcccaaagtgctgggattacaggcatgagccactgtgcccagctgcaacataggtttttagtgcttattttgaattgtttcagttttttatactrtatwttttttctgagtattgtggtaatayatattttgcagaaaatttggaaagtagataaaagtatatgaaataaaaattatccataattcatcactcaaaatacctacctctgtattataatttggagtgttttcttctagtatttttttattatgtattcatttctattgtttcccttttataaaatcgaggttaccgtatcatgttctgttcacttaactctgcattgtgaacattttcctatgtttgtcatgataacatgtttaataattatgtaagccatttcatgtatttactgtaatttatttaatcattcacctgtgacatttgggttgcttgtttgctgtactgccatacctgccttataaagacttgaaaatatttaatgtttctgatatcctggagaaagttcacattttgtacatgttctcaagtaacatatatatatgtgacatatatatgtcacactggttgaaccttagatccgccaaataccaacttttagttcctattttctgtggaccaaattttatgggaaaatattaaaacctcactaatttggatgacaggggcatcagaagaaggccaatctgaattttagaaattattatcataactaggcttaagacaacttttcttactcattacttgttcttttctctatgtctttttacccatcactaccaaaatgtcatataatatacatattagtttgaaaattaatttttcacaatttctagattttccaaacattttcaaacattagagatgtagtagttgtgaatttttaggttagtgagtctggacatatttgacttttttttttttttaactattacaggcatacaaaaaatacagtgctggctgggcacggtggctttgcctgtaatcccaacactttgggaggctgaggcgggcagatcacctgaggtcaggagtttgaaaccagcctggccaacatggtgaaaccccgtctctactaaaaatacaaaaattagctgggcgctaatttttgggtggcgggtgcctgtaatcccagctacttgggaggctgaggcaggagaatcacttgaacccgggaggcagaggttgcagtgagccgagatcatgcaattgcactccagcctgggcgacagagagagactctgtctcaaaaaaaaaaaaaaaaaaaaaaaaaaaggaaactaagcaatatctctgatcccatcactctgctttttcaagtcttaacatttggctgcatttgcctaagcctcttttttttctttaaatttttgttatgaaacattttaaacacagaacaattgagagaataaaacaatactcatgtatatttaacacctagattcaacagttaacattttgccatatttgctttagtatgtgtgtatttttgctgaattatttgacagtaggtatctaaacatcatgacacttccctatagtatatctcctaatatatggacattcatatatatatatatatatatatgtatccataatagtgttatcacacttaagaaaattaatggtaattttttcaatactgcgtaatttctggtttccctagttgccatcaaaacactttaatagctttaaaaaaaattagtccaggcatggtggctcatgcctgtaattccagcactttgggaggctgaagtggaggatggcttgagcccagaaattggatacgagcctgggcaacaaagacccccatctgtacaaaaaatttaaaaaattagttgttcatggtgatttgcgcttgtagtctcagctactttaaaggctgaggcgggaagatcttttgagcccaggatttcaaggttgctgtgagctgtgattgtgccactgtattccagcctgggtgacaatgaaaccctgtctcaaaaaaaaaaaaaaatacttaaacaaggatccagtaagggattgtgcactgcatttagttgtaatgtttcttaaataatctcttttaatacagagcagtccctttccgtccacatgcaacttttcccctacatgacattgatttatttgggagagtaaagtcattgcacagataaatgtacattctggatttgtgtatttccttttgatattagtttaacttcctcctctatcctctgtatttcctgtgaattggaaggtaaaaagcttgattagatttaagataaaaatttttggtgagaaaacttcatgggtgatgcagcatacagttggtccttgaacaacacgacttgaactgtgtgggtccacttacacatggactttttttcctaccaaatgcagatagaaagtacagtgggacaccagacagaactacaggacttgagtatgatggattttggtacagtcaggggtcctagagccagtctcttgagtatactgagggatgactgtacttcatattgcattgaatcaggaggcacataatgttgttctgtcccacaatgaatgatgctaagttagatcatttggaaaggaggtgactaccagatctctacagtgaaaatataccttttcttctgtaaattagtaatatgctggtgatactttggcatgcagggagtgacctggtctgtgaggacagtgttagaaatttttcatctacagtttatcttcttttttccccctgagacggagtctcgctcggtcacccaggctggagcgcagtggcacaatctcagctcaatgcaacctcctcctcccaggttcaagcgattctcatgcctcagcctccagagtagttgggattatagggacctaccaccatgcctggctaatttttgtattttagtagagatggcatttcaccatattggttaggctggtcttgaactcctgacttcaagtgatctgcctgcctcagcctcccaaagtgctgggattacaggtgtgagccaccgcgcccagccctccaatttttctttacattcttcaattgcttaagaattttttaatgaataaaattttcttcctaagataaattttatcagggaactatctagtatttcagtactcacaacaaatacaaataaaaataataaaaggatacccattccatcttagattgatagaaattgaagtcgagggtacagagtatccttgagtacagcagagtgttctcaaggatgtagggagcaaaggagtctacaagctatgggtatataaactgcttgtgggtgtataaactgttacaatatttttatagggcactttagctagctagctagctatctataattttttttttttttttttttgagacagtctttgtcgcccaggctggagtgcagtggcatgatcttggctcactgcaacctctacctcctggatttaagcgattctcctgcctcagccctctaagtagctgggactacaggcatgcgccaccatggctagccaattatttatttatttatttatttttttgagagagagtctcgctctcttggccaggctgcagtgcagtggcacgatctcggctcactgcaacctccgcctcctgggctcaagtagttctcctgcctcagcctcccaagtagctgggattacaggttgtgtgccaccatgcccggctaatttttgtatttttagtagagatggggtttcaccatgttggccaggctggtcttgaactcctgacctcaggtaatctgcccacctcagcctcccagagtgttgggattacaggcatgagccactgtgcccagcctaatttttgaatttttagtagagatggtttcaccatgtcagccaggctgggcgtgaactcctgacctcagatgatccacctgccttggcctcccaaagtgctgggattacaggcatgagccactgcacctggccactttagcaatatttatacaaatatttcagtactctccccctagttttctgctgccaggaatttcccctgtgtatacttataaaagtacagcaggatgtatataaggatgtcattgcagtgttatttttaatagcaaaaaacaaacatgagaacaacataaatgtcatctagcagtcaaaaagaatgacttcatcaaactcaggttattgttattatcagaatgtttcttacagcattctgttttcatttgctgtaacttcttacctcaaagtgtctttttgtttttcctttactcattgcattgtgcataaacatggaaaaataaaaactaaatgaggtgcctctgtcatacttagccttctgattcttagaataagtagggttttgacgctgaagcactcaaagtaatattttaattttctttgttcactagtctcttgagaatacagtgtaaataaatcatataatggtgaaatgacacttttagtaagaaaaatgttggctgtatcctagttatactgaaactcatgaaataggaatacctgtcaccttcaatatctttagttatctttaatatctctatttttttgtcccttgaaacagttcgttttcctgaagatcttgaaaatgacattagaactttctttcctgagtatacccatcaactctttggggatgagtaagtaacttagtaaaatatttgtcaaattagtatggaaaaaaaaattttcattctttttcttttagatttagaaatcaaattttattttcttcttatttttaatgtggtttatcttaaaatatatgttataatggtgtttttttacattgagacaccagttattttaatacctaccatttagtgctgtaaatgcattatttaattctcacagcagtattaatgatggtattattatttgctgctttgtgcattgatagaattggataattgttcatgaacatacaaatggctggagtatagattttaggcaatctgactccagagcccataatcataactactacttttttctgctaccattttgctaaattacttctagtagcatgtattcccctaaagctgtaatagaaagcttaagttgttattctatgatcaaataagcagttgagagaagtttatttatttattatttatttatttatttttgagatagggtctcgctgtgtcacccaggctggagtgcagtagtgtgatcaaagctcactgcagcctgaacctcctgggcataagcagtcctcccacctgagcctccgagtagctgggactacaggcacacaccatcatgcctggctttttttaaaaaattttttgtagagattgggtctccctatgttgcccaggctggccttgaactcctggcctcaagtgatcctcccacctgcgcctcccaaagagctgggactacaggcatgaaccactgtacctgccctgaagtttattttttagaaggaactttaaatatatgtcccaggccaggcgcagtggctcatgcctgtaatcccaacactttgggaggctgaggcgggcagattgcctgaggtcaggagttccagaccggcctggctaatatggtgaaaccccgtctctattaaaaatactaaaattagccaggtgtagtggcacacgcctgtagtcctggctactcgggaggctgaggcaggagaatcacttcaacctgggaggcagaggttgcagtgagccgagatcatgccactgcactccagcctgtgcgacagagcgagactgtctcaaaaaaacaaaaacaaaataaagatatgtcccagtatatttagcactgttctttaatttcctatactttgattacatcattgaaatagttacttttttaaaaaaaacttttgattttgaaaacattgcacatttgcagaaagttgcaagaatagtacagtgatctctgtatatttttttacctggattcaccagttgccatttagctacatttgctttaatcattctctccttgttgttgaaccatttgagagtaggttgcagatctatcctgatcctttacacctcatttcttttcactatgtatttcctaaaaataagattaataaccatggaagagttgtaaaaattcaggaaatttaacattgatacagagtctcgcgttgttgcccaggctggaatgcagtggtgctatctcaactcactgcaacctccacttcctgggttcagatgattcttctgcctcagcctcccaactagctgagattacaggcgcccgccaccacacccagctaatttttgtatttttagtagagacggggtttcaccatcttggtcaggttggtctcaatctcctgacctcaagtgatcacccaccttggcctcctgaagtgctgggattgcaggcgtgagctaccatgcccggcctgatacagtactatcttctgatatacagctcatgtttcagattttgtcagttgatttctagtaattcctttatagcaattttctccaatcctggatccaatacagaatcatattgtatttcgttgccatatctcttcattcttctttaatctgaaacagatcctcagcatttgttttttcctaacagacatttttgtagggtataggctaattttgtagaactgttatattggattaatttgattggtttatttgtgattaaactcagataatgcatatttttgctgtgccattacagaaatggtattgtgtcctcagtgtatcacatcaggaagtccgtgatgtcagtttgtcccttgttggttaagttaacttgggtcacttggtttagaggtggctgctaggtttttccactataaagttagtgttttttcctttgtaatttataagtagtttgtagggagatactgtgagaccgaaaatatcctgttttcctcaagctttcacccagaagcatccattaatgattcttgcttgaatcagtattttactatgatgattgtaaaatggtaattttgtaactcttttgtacctttttcatttattagttgggcatgctactataagaaagagctcttcttcttcttcttatttatttctttatttatatcaaactcagggatgcttttttttgtttttgttttttgagacagggtcttgctctgtcacccaggctgaagtgcagtggtgcgatcacagctcactgcagccttgaattcccaggctcaagcagatcttcccacctcagcctcctgaggagctgggactataggcgtgtaccaccatacccagctaatttttaaaaattttttggccgggtgcagtggtttagacctgtaatcccaaaactttgggaggccgaggcgggaggtttgcctgagccaggagtttgcgaccagcctgggcaacatggtgaaaccacgtctctactaaaatacaaaattagccaggcttgctggcgtatcctgtagtcccagctacttgggaagctgaggcaggagaattgcctgaacctgggaggcagaggttgcagtgagctgagattgcgccactgcactccagcctgggcaacagagtgagactctgtctcaaaaaaaaaaaaaaatttttttttaagagatgggggtcttcctatgttgaccaggctggtcttgaactcctgggctcaagtgatcctccaagtgctgggattacaggcgtgaaccaccgcacctggctaaggagtcttttacaattcagtgggctatgtacaatctgttactgctactaattttgatgctcaaattatcccagatttggcaagtggccaccctttcagacacttttgagtctttctgatatgtccttataattttggtgatactttactttctcacacaacaagatgtttccagattcatctggtactttccctgttagttctggagtcagtcagtctcccatggaacccctggtttgttgtagtaggaaagggtatttagacatagtggacatttaaatatttcccttcatgtcttttttccccccatgcattattttaacatcattgacatatttctttaatgtgtgggggttttgggtttttttgtttgtttgttttttgagacggagtcttgctctgttgcccaggctggaatgcagtggcatgatcttcttggctcattgcatcctctgccgcctcccagttcaagcgattctcatgcctcagcctcccgagtagctgggactacaggtgtgtgccaccacacccagctaattttttttttttgtaattttagtagaggcggggttttggcatattggccaggctggtcccgaactctggagcttagacagtctgcctgcctcagcctcccaaagtcctagaattacaggcgtgagccactgtacccagccatatttaatgtgtggctttttttgttgtttgcttgttttttgagatggagtctcactctgttgcccaggctggaatgcagtggtgcaatcttggctcactgcaacctccgcctctcaggttcaagcgattctcctgcctcagcttctcgagtaggtgggactatagacacgtgctatcccacccagctaatttttgtatttttagtagagacggggtttcaccctgttggccaggctggtcttgaactcctgacctcaggtgatccacctgcctcagcctcccaaagtgctggcattacaggcgttagccactgtgcccagccttaatgtgtgttttgttttgagacgtagtttcgctcttgttgcccaggctggagtgcaatgaatggtgcgatctcggctcactgcaagctgcgcctcctgggttcaagtgatgctcctgcctcagcctcccgagtcgctggggttacaggcgcctgccaccatgcccagctaatttttgttatttttggtagagatggggttttgccgtgttggccaggctggtgtcgaactcctaacctcagatgatccacccacctcggcctcccgaagtgctgggattacaggcgtgagccactgcaccaggcccttattgtgtttttaagtcaacaaatgtctcttcctgcaacgaatttcctgtgaatttttcattattgatgtatcagattaggcattttatgtgctttcacatattaataattgtatcttattatacatagattaatgccaaaatttcagcctttcatattttaaataggttttactttattataaaaataagaatattttctctttggagttctatctctaaagagacattgttttattctctactttttactactttaaaaaatctgtgtaatatcttagtagataagatctagttttacagatagtgcttctttttaattttttgagacggagtcttgctctgttgcccaggctgaagtgcagtggcgcaatctcagctcactgcagtctccacctcctgggttcaatctattctcctgcctcagcctcttgagtagctgggattacaggcacccaccaccacacctgcctatttttttttttttttttttgtagttttagtagaaacgtggtttcaccatgttggcaggcaggtcttgaactcctgacttccagtgatcccccccmgcctcagcatcccaaagtgctgggattactggtgtgagccaccgtgcccagaccagttagtgcttcttaatggcattttgcacactgttttgcgtaatatcactgaaagtggggtgcttgtataccactcttctaagatgggtaggggacagtaacataatagtgatatccctgaactgtatgacccaagcatgataattggtcttgatcctagtatcattgccactcctttcttcttcacataactttcagagttgctggaatggacagtgctccgtattttcgtagcctagacagaaatttggaaatgacactgcttctttcaaacacttttctttcacaattcactttctaaaaaaatcagaatacagctttattgagatatatactgtgcaattcatttatttaaagtgtacaattcagtggtttttaatgtattcagagttgtgcaaacacagtcaattttggaacattgtcattacttccatcaaaaaccctaaaatgcattaatagtcactttaccctgacccctagtcttaggcagtcactaatttactttctgtctctatagatttacctattttggataatttagagttcactttttagaagactcttttaagctggaaaaaggaatattaaggcataaatgtgatagcagggagcaggggtggaagaattagcagcagttccatatctgccttttgagttcatagagcagtttacatgtagtaaggcaggtgctattgctgcagctctggattttggtgattcagtaagcagtaagttggagggactggtccaaggcttggtagctgcttgcctagccaggtcctaatttaacactacttctctcatttgaaatgccttctaatactggtaatggtagcagcagcagcaacagtagcaatagtattaaatgtctgacatttagtgagtacttatacaatgtgccagttttataagtagtttacatgtattaacttatttaacccaaacaacattcctgacttaggcaacattcctgagttattctattttatagatgaaaactgaagcacattttattgtagattttttttttaagtatagtttaaaatcttgaaactacccatgaagttaaacttgtttatatgtagggttaatactttttaatgactgcaaaaattcattccattattgctattttttccatttcagtgaaactgcttttggttacaagggtctaaagatcctgttatactatattgctggtagcctgtcaacaatgttccgtgttgaatatgcatctaaagttgatgagaactttgactgtgtagaggtaagaacagaaatactttttaaactgttttccaatttaatttattttaaaataggttttaggccaggtgcggtggctcacacctgtaaccccagcagtttgggggaccaaggggggcagatcttttgatcttaggagttcgagaccagcctggccaacatagtgagagcccatttctcaaaaaaaccacaaaaattagtggggcgtggtggcatgtgtctgtaattccagctactcaggaggctgaggtcagaggatggcttgagcccaggaggcagaggctacagtcagctgagatcatgccactgtactacagcctggatgacagagctagaccctgtctcaaaaacaaaacaaacaaacaataaacaaatagtttctaaaaattaaaggtttgggctgggtgcagtggcttgtgcctataatgccagtgcttttggaggctgaagtgggaggatctcaagcccaggagttggaaaccagcctggacaacatagtgagaccctcagctacttgggaggctgaggtgggaggattacttgagcccaggagcttgaggctgccagtgagccatgatggcaccactgcactccagcccgggcaacagaacaagaccctgtctcttaaaaaaaaaaaaaaaaaaaaaaaaaaaaaaaattaaggtttgagggaagagagaatctgttatatggtagttttaaaatcacattctcaggctgggtgtggtggctaacgcctataatcccagcactttgggaggccaaggtgggcggatcacctgaggccaggagttcaagaccagtctggccaacatggtgaaaccccgtctctactaaaaatacaaaaattagctgggcgtggtggtacacacctgtaatcccagctacttgggaggctgaggcaggagaattgcttgaacctgggaggcagaggttgcagtgagttgagatcgtgccactgcactgcagcctgggtgacagagtgaaactgtctcaaaaaaaaattaattaattaaataaaatcatatactcagtctttagttatggaggcatttgcctccctgtcattacagttaatcctgtgatcatgatcctgttctgtttcctgcatggaccttcttcataaaaatctttgcctttgtgatcagagttttatttttttgccaacttttgttttttattgtggttatttcctataagtcaaagaagatggagggaaatagctaaattttccacttttacctagtgtggaatctattgaagtttctcttgctgcatttctaatcccacaaattttgctaatatattcctttatggatggaatacatggatgatcaagctgatcacattataaaactatttaaagtgagtgtatcaaaaggggataaaggtaaagagagagatgaggccgggcacagtggctcatgcctgtaatcctatcactttgggaggctgaggtgggcggatcacctgaggtcaggagtttgagaccagcctggccaacatggcgaaaccccgtctctactaaaaatacaaaaattagctgggcgcagtggtgcatgcctgtaatcccagctactcgggaggctaaggcaggagaattgcttgaacccaggaggtggaggttgcrgtgagccaagattgygccattgcactccagcctgggtgacaaagcaagactcyatctcaaaaaaagagagagagatgagtatgcatctgtggtagactgaataatggttccccccaaaagatatccatgtcctaatatctggaacctgtgaatggtgcctcatattgcaaaaagcacttcgctgatgtaattaaatatcttgatattatcctggaatatttgggtggacctaaatgtaatgacatgtatcctaatgagagggagacagaaggaaacttgatgacagaaaaggagaaggcagtgtgaccacagaggcagatgtgatatggccagaagccaaagaatgcttactcactagaagctggaagaagaaaggaacagattccctcctagagcttccagagggagtgtattaccttggttacagcccagtgatactgatttcagaacacctccagaccgtaagagaataaatattgttttaagccaccaagtttgtggtaatttattatagcagccacaggaaacgaatacaggttttcataccaggaagtgggatgctgctataaccaataactaaaaatgtagaagtgtctttggaaataggtagaggctggaagagttttgaaggtgcatgatagaaaaagcatagattaccttgaatggactgttggtagaaatatggatgttaaaggaaatatgggctgggcgcagtggctcatgcctgtaatcccagcaatttagaaggccaaggcgggaggatcacctgaggtcaggagtttgagactagcctggccaacatggtgaaacccatctctactaaaaatacaaaaattagccgggcgtggtggcaggcacatgtaatcccagcaacttggggggctgaggcaggagaatcacttgaacctgggaggcagaggttgcagtgagccaagatcgcgccattcattgcactccagccggggcaacaaaagcaaaactccatctcaaaaataaataaataaataaataaaggaaataatggactgttggttagggctcagaatgaagctaggagtgtaggagagaacacctgtatcatcttagagaatatatatatagtcataaacttagttttggtagaaacacgaacatgagctggatgcgttggctcatgcctataatcccacagcactttgggaggccagggcaggtggatcacgaggtcaggagtttgagtccagcctggccaacatagtgaaaccccgtctctactaaaaatacaaaaattagcccggcatggtggcgcatgcctgtaatcccagctactcgggaggctgaggcaggagaatcaccggaacccggtaggcggaggttgcggtgagccgatatcgcgccactgcactccagcctgggcaacagagcgagactctgtctcaaaaaaaaagtgcctctgctactgaggagaatgaggcaggaggatcatttgaggccagcaggttgaggctacagtaaggtaagtatgatcatgccactgcactccagcctgggtgacagtgagaccctgtctttaaaaaaaaaaaaaaaaaaaaaaaggccaggcttagtggctcacatttgtaatcctagcactttgggaggccaaggtaggtagatcacttgggctcaggagttcaagccagcctgggcagtatggcgaaaacccatctctacacgcacacacgcacgcatgcacacacacacacgctgacacacacacgctgggtgtggtggtgtgtgcctgtagttccagctactctggagcctgaggtgggagactggcttaagcacgggaggtgaaggttgcagtgagccaagatggtgccactgcactccagcctgagtgacagagccagaccttgtctccaaaaaacaaacaaacaaacaaaagaagtgcctctggttggtgagggcttagaataaaatgaggaacatgtatttggcaactggagaaaaggatatccttgttctatagtggcagaaagcctagctgagttatgtcctgcagttctgtggaaaggagaacttactgtaagcaatgaacttrratgtttagctgaggaggttttyatgsaaagtattggaggtgtggcctgatttctggctgcttatagtaaagtgatgaaagagataaattgagggaagaactgttaaacaaaaaggatacaggacttgatgatttgggaaattcttaacctatccagattgtagaagacactagttaggatattcattgtcaggaaggtggaaagtgtgttctggagagaaagccgtgagtgtgacaggataaccttttgctagtgctgaagggattaggcacgtgactcatggatctcctcagttgtctcagcaaaaagctaggaatgtagatctggggaacatttgtggaggaccctcttgtctaatggtatgaaccctcatgacgtacacaggcgactcaagggttttgagaattaaaactttatagtgcagcttggattgacaggacaaaatgaaggaaggctgtatgaactctccaaatttcacaggcaggaaacaggctaataaaactgctcagctgccaacatgtgctacctttaaagaaagtggaagaatgactctgagggcaaagctttgggtccagagggtggagctgcaggccacagttattcttaggccttgaaacctaatggagtttgccatgctgaattttgaaattgcttggtggcagtggctcctttcttccttccatttccttttctggaatgagagattctataactgttgtcctatgcctgtcctaccattgtcttttggaagtgatactgtgttttctaatttcacaggttcatagatggagaggaattttgccctaggatgtatcatacccacagtcttacctatgatgagaggtgtgacttttgaactgactatatctagatgagattttgggcttgagttgatatggtaatggttgagacttttaggaatgtttggatagaatgaatgtattttgcatgtgggatggacatgaatctttgagggccttaagaaaattatattttaggcttgttctgtttccgagcattcctcatttaagggcattgaaacttcaccattgatttttttaaagattaaatcccattttgtcactaaatcatatttataaaattgaaagttaattcttatagcaaaatctcttttctttgcacttattaatccagcaagttttagtaaattatatctgatatactgttggtaatactgtgctagacacaagtatggaaaatgaaatatattacttcatactgtatgtyataactttcctctgcagaagtagcagttcctaaagaattaacaattaaaccaactttttcagggctttaaactgattttaactgttgactttacctcttttgccacccctatgccccatctatatttttggttaaaacctcctctcattactggaactgacttacttggcccttttttattatttaaattttgagggatttgttatatttaaaggttttgcccaaagtcatacaactagtaaataatcagtattgtactaggagatgattatttagtgttattatgcataatatataataatatcctgattaaaagatgttaggaatatttatgacctgttctaagaggatccaggctcttgggcttactgctttttctctctctctcccgttatttttttttttaattttaagttctgggatacatgtgcagaacttgcacgtttgttacataggtatctttccccttttgaccatgtgtttttccccctcattaaaaaaaatatttttttaatttttaattttttgtagagacggggtcttgctatagtgcccagactggcctcaaactcctggcctcaagcaatcttcccaccttggccttccaaaatgctgggattacaggcacaagccaccgtacccagccttctcctgtgttttatgccatgtgctcccagtttactgctatcattgtaaggagcttcacactagcaaaccccttatggttaaaaataccatattggtaagcttgatggaatctgattacttcatactgtatgtcataactttcttttgcagaagtagcagttcctaaaacattaacaatgccaccaactttttcaggactttaaactgacattaacttctgactttacctcttttgccaaccctatgccccatctataaaactaattgtgcgtagcatgaaaaagatctgaaatagtttcatataatatgaattgtgcatagcatgaaaaagatctgaagtagtttcatattcattattcaactttagtattagaaatattttgagttctatttggtttttttgtgtgtttttccccacttcccagccatgtttgagatgactgagcttgccagataaataatatgtaactacatttaatatttgttttattttatatagtttgtttcccaggataacttttgaaattgtgcagatacaaaagtgattctgagtaatactgtagtggtttgatgtttgaaaagatgtaatcttagataaactagcatttaacacatttattaaaatagagttttttcataatcaaatatgtagattgctaaattctccagacccaagcccagctagatattcttattaaaaatgcaggtgatgtttttccttgtgtgtaaacccactgttggagggtttttgttttttacagttgcagctgatagcactgaattgatttcttccaaaggaactattgatttagttatagataaatcttttaaatatttcatgcagtgaaaatagctgtgtatttgcattgacatctaattgttccattcttgaaaattaggtttttccatttagaaatactgtgttaggaataaggaatcaatcttttataatgtctctttgtagagttacttatttgctttgtggtcaaagatcatttatattgcgtattcaaacaaagacttttttccccttattaaaaacgattgggtaggggatatgtgggtcatgggcttgcttcttctatctcagtttgcagtgagtgttcattccatagtgccttctgtgttgttgatgccagcgatacagtggcagacaaagtcatggagcttacattctagccaagaggaacagtcagtaaacaaaatagtaaatacacaaattaaattcaggcagtattatgaagatacattttgctcatttctgaatgataaaggaggaaccagccatgttataatctgagggtaaagcttactaagatacaaaggctctaaaaatacagcatttttggcatttttgtagtccagaaagattaccagggttaaatcattgtggtgatggagagaggggtaggagatggttgaaggggatgcaaagctagatcatcatataggatcttgtgttctgtgataggtgtttgcaagaaataagagtagttggcattctttagaggcattcttaagtaggtggaggtcataaacaatgtgatttatatttttaaaatatgattctggctgctgtgcagagaacacactgtatagggcaaaagtgaaagaagagaccggaacattgcagtgttagaggtgacactggacttagttgtcagagtaaggaacattttggaggtctgctgttgaattagatgtgacagatgaagaaaaaaaacgagaaccccattgcccaagttcaattatggtactgttaactgggaaaactatagaagaaataggtttaagtggaaaaaataaaaaaattttattttggatgttaggtttgagtctaatatattagggctttgcagatcatactgcatagatggtcagcagccataacatctgcttagaagttatttcttattaggattatgtcattacattaatttttaatcatccattcttttacttttccaagctgaatgctctagttgcacctaaaattcttcagtcacaattaagatgcctataaaatctctactagccaccatctttaaaggaaacataattctgaattttacaatacaataaacttgattattcagacactgatgattttttcatctggttgtccttgacctttgcttttattaacacctcctgctctgtgcttgtaatgccagctactctgtaggctgactcaggaggatcatttgaggccaggaatttgagaccagccttggtaacataataagaccctgcctattaaaaaaaaaaaatgctgaacgtggtggctcaaacctgtaatcccagcgctttgggaggccgaggtggacaggtcacttgaggtcaggagtttgagactagcctggccaacatggtgaaacctcatctctaccaaaagtgcaaaaattagccaggtgttgtggtgcgtgcttgtggtcctagctactcaggagggtgaggcaggagaatcacttgaactcgggaagtggaggttgcaggaagccgagttcgcgccactgtactccagcttgggtgacagagcaagactctgtctcaaaaaacgaaaacaaaagctaggcatgatggcatgctcctgtagtcccagctacttggaaggctgagacagaaggatctcttgagcccaggaggtcaaggctgcagtaagctatggttacactactrcattccagcctaggtgacagagcaagactcttgtcttaaaaacaaaaacctcctgccttttcttgggggtaatttcattgccttttagtgaagtagtgggtaactaagattgttgtcttgctaattgctagcatttctgggaaaagtttggtacaggaagttgaaatagatggataaagtttgtattaactgtgaatttcagttattttatcctagtgtcccactaattggattgaatttgagaggatatgagagcagattttaaaaattttatggagtgtttagcctctttctaggaaaatcctacatccagaaatttcgaaaaaatctttggtagactagtaaaatttcaaattgtgatggtgttcttgataagtaatactttttatgaaatatcataaagagctttaaaagtatatattgacaagtttatcttgtttagttcaagtagcaaaatactaatgcagtgtaaataaacataatatgacctttgtttttccattagtgaaaaagttcacacttttaatttctcaacaatacattctgtagttaaagcttaaatattatcagagaacatgagattgagaacattaagtagatacagaatttcttttgcttgtttttttttttttttagcatattttaggtagtcttagaattatagttaagtctatgtaccactttagccaagtaaagaacaacatgttaccacctacttaacgtgcctttaatttcaatctcaaaaataactagacaaatttagacaaatggtgctgcttaagataagatgttagagaggttattgggttttcaaatgtgtataaatacaaatataaacattaaaaaaatagattactaattatcaggcatatcgctttattcaataatgaggaaatgcaaaaattgctccatatgaacatgttcatgtgtaataaagtacagaacactggaacttgaaatgaccatagttaaatagtatacaatctaaaaatatttcataatgacccacctaccagaatatctaactagaatacttttgcactttcctttttaaaaataaattaccaagcgttaggaaaccatttgtaagagatgtctttgttaattaaatatatcaggttgtattctggtttctttttttgagacggagtctcaccctgtcacccaggctggagtgcagtggcgcagtcttggctcactgcaacctccgcctcccaagttcaagtgattctcctgcctcagcctcccaagtagctgggattacaggtgcacaccaccacgcccagctacttttgtatttttattagagacagggtttcaccatgttggccaggctggtctcaaactcctgacttcaggtgatgtgcatattttggcctcccaaagtgctgggattataggtgtgagccaccatgcccagcctggtgtctttttaaaaatttttttgaaattctagttccctggtgtgtctagtcagctgaatttcttaccctttctatatttctgtataattttagttgaagtttagaataatgctctggaatacagggaatttttcagtgatcttcagaaatagattctaaacttttagccacaaacattggaattaaaaagtttctgttcatttttaactctattcaattaacaatgattaaatgaggtcttgctcttgtgctgattttattatctgatcagtaatccaatctgaaagacgaatattttaaattaaactaaattatatatttgagaaaagagtacagatctctaagacatggtagtcaggatttttttttttcttaaagcagaatccatttaatagagaaatgcagacattttccctttagtgaagcgaagttgtaaattctaggttgaagaactatttggttttaagttgtatattttatgtaagtatatcagatacatatttatatacataactatttataaatatatatttatataattatataaagattccttgctttaaaattgccctttgccccgtaaaaattcttaatgtgtaaacttacacaaagcaaactattttatttgaagatatttattacaggaaatagacatcctttgaaggctgaaagccctttttcaactttgttgggctcaaaccttctggttgctctgcccgccaccaaaagtgctacttgaaacttagagtttctgagaagtctttgaagtagatttgatacaagatatgtaaagtgatttgcaatgccttcttgagaagacaggacataaggaaagtttttaaaagttaaaattatacatgctatgaaagtcttaaagtgatttttaaactgatagattataaatccctttttaaaagtagtttttcttggctttttaaaaaccttaactaacatactatactgttttactcatcactactttggattttaattgctacacaacacatctattacagctatccctcattatgayagtttccttgatagctgttgaaattgtactgatactataaaatatgcttacgatggcctcttcaygttagcaatttcaaggaaaaatatttatcaaatagtactttaaaaataagcaaaaactgtcctatgaaatgcagtttatttgatctagagtgtgaatgagttgcaaggactgatgtacatattagaaataaactgttgggcaaaatgctgaagagctatattttcaataataggtcttttttatacctataaacaaattatatataaatgttggtggtaccagagcattgaaaataaaacttgtttgtgataaacgtcatcactggttctctatcctgaaatgtaactgaatcataataaagtgctattcatctgcaggtgcattgcttctacttagttaaaagatggttgaaaggataggaattagtagcatgttgtattagccttttgtagtgtattttgtcctaagcatcttaatttccctgttttgaatgctaagtagcaagggtcttggtttagaactaatacccatcatgcatgtaaacggtatgaaagagctgcttagtaagttaacacaaagtgttcttgtgtcagtccttgtggaaatagatacaatacaaacattacagctgaactcacggcaaactccattaagtaaaaacctggcctcattgttcaggaaaaagtttgaatagaatacaagctcattttgttgaatgtaatgtcaggcttttagggactgtattgagggataaggttttgttaagttgagaccaattcattaagttttattgcctggtgagaagcagcaatactttattgtaagacttcatcaaatattcatggttaaagagaagtagtaaatgtattcaatcaagtggtcttttgggattttgaaaaggattatgaagtctgctcagctgataacattgatagaggttgtttaacaagggtaattttaatctccgagtttagttttgttgtccagtcttgtctcttttttactgtcacaaatccaggtctgtaagaattgtgtcacattstaaggataaaagaatgatatatccattcatataatttatgttatttcctaaatatgtatatttttaagttatcatcttagtttgagtttggcatatgagggaattgtgacccatctagttgtgagattgctattcatttggtcagactctagtctcatctcaccactgctggtgatcttttcatgtcttggataatatgatttctttgacacatataaaataataagcaaccttttgccttggccagttcagactgtcatgaaggggtatagtcagctgtttctgcataatggaaatgtccatagcattgcccttattattgtacttggtatcaggtcacctgccttctcttatttacttttatattatgctcatctcagttttgtgtgatgcagtttgtgcacaggaagctcatccttttccaattcgctgtgtgtttacktctttagttttcaaccaaagttttgtaatttgtgttggttttgtcagttttaaagaaataaaccatattcaacttaaagtcgaatttgttattaattttttatatcctttattctttaggcagatgatgttgagggcaaaattagacaaatcattccacctggattttgcacaaacacgaatgatttcctttctttactggaaaaggaagttgatttcaagccattcggaaccttacttcatacctactcagttctcagtccaacaggaggagaaaactttacctttcagatatataaggtaaagataaatctaaatatttattgagtaaagttctatttgcctgaaacctgtatgtagttttgttgtcagtgatttattctaactgcagtaaacaagttttaatcagcattataaaccaagatctattttgtgtgtatgtctgtatctatgttcacatcttaatctgagacttctaaacattttcccacaggataattttgtgttctgcggactttcacttacctttgtgatgagtttcacctgacttttcctggctttttccctaggctgacatgacatgtagaggctttcgagaatatcatgaaaggcttcagacctttttgatgtggtttattgaaactgctagctttattgacgtggatgatgaaagatggcactactttctagtgtaagtacagttctaaagcaacagtagaccttattacctccacaaagccagcattttaattgtggcagcccaattattgggacagtataatgatatttttcccaggaaagaaaaactattgtttatgaggcttgagttttccttcattatgctttgggagaccttgagaatasagctgaattaaatgctgttgtccgttagggccctgaatgtaggcttaaacagtaaaatgagctttgcctgtgttttcttttacttgccacctattcatctttataataggcaagtgcactgaagtgatgtaaagaggtctgatttatccaagttgctgcacaccaattaagtgaattgtacattcagaacatagcaggtgtacccattgggccctcacagagtagcttgctgacactgaaaattcagtcagagaatggaaaagaaaatggacactgcatgggagcgcgactgtaattgacctgcttggctttctgttttatctgcagatttgagaagtataataaggatggagctacgctctttgcgaccgtaggctacatgacagtctataattactatgtgtacccagacaaaacccggccacgtgtaaggtaattggcagtataacacgtgccttgtcttttatttcagaagaaggaactgctgaagtttccaatacttgttataatagtgttgatttgtttaaaaaaaaaatcactattattcatgggctatgtactgatttatttcattgttccctttgaaacagtgtagaagattaaactaattttgagtatcttgataatttttgggtatctcaaaggtggattgaaaaaaagatcacacaaactttaaagtgtttgtaatactatagtgatctgcaggttttaaactggtcatgttatgatattttaattttaaaataatttctttactgtagtcagatgctgattttgactccatttcaaggtcaaggccatggtgctcaacttcttgaaacagttcatagatactacactgaatttcctacagttcttgatattacaggtatgtaaaatttgatttgttactgaaagagcctttctaaaaatgtcttcttactgattgattttatttttgtcagaaataactattttaaacagcaacattttcctagggtgtttaagccatctaaagatggcttaagtttatgttttagagcataagcctttgtggggattggattacatccctaactgtgaagtgcataatggaacaaattgaagataatgagctgaatatatatggggaagtcttggtcaggcgtaaatacgttgaaagtatggtataacttatttgttcactttatttggcaaacagttgcattatttagaggcagcctgcactttaatttacatgtaggggcagaatattataaactttactgagaaaaaaagtcaaggtaaatacttcttgaatagaatacacatttcctaaagtgtgtgttttgtattcctaaaatgcatgccttcacaacagtagtagataaggtgaaatgtaggcctatttgttttggaaatgtctttcagtatggattagccatagaagtagtagtatgaatagaatgcttaggagaaggaaagacgacttactcgacttactcgacttgactcttcaaaaggagaaggcattattagatggagtttcagataatatgttaaagtgtgatccaccaaaaaacaaagtggcccaaggaatatttatgttattttctaactttcaaatttgttgttcataaaattgctgatgaaactgaaagttacctttttcttttattgaaaaatactttaccagatagttacatgcaaattggtattaaaatttattaatcttacaagtttgaatttggatacatctttgttacaaactatactatttaacatgcactaaaacattaacatgttaaaaaatgctatttgggaattttgtttaaagacaccacctcccacccacccacccccaccaaaaaaaaaatggttgtaagactggcaaccacataaataggctagtaagcagattgtttcatccttctttatatagactagtaatccaaggtaaataaaattgaagttgcttcagaacagtgaattgatctgtagaataataaactggagggaaagcacgttgtctttaaaagggagtttcacatttatagaggtgaattatcttttcatctgactttcctgctactgttaaatgggttggaaactcaggagataaagtagtagttactaaacttcgtttataacaaaagttataaattgtttaagcgacaacttcactagcttagtgacttataaaattgtagaaacataatacagactatgtcacttcttttagttgagcagaaaattgtttagcttctattaacttatagagcttagacttgctgctacatgaagggacatttttggtgattttaatgtggagttcacataagtagtctttgtctactctagtgggtaatgtgccagcaggggttgtttctctgaagcctcttaaccactttcttctgtctactccaaccaataaagtccttgatacttagcaccaattagcagataaagaattttatttcttaaatctcagtgaagagtcatcaataatggtagcctttattcattggtgttattcattagaaactgaagtctctaaaaagaaaagactaaacatgctaaaggacttctgaatttgacaactgggtattggcctttattttcagcattaacatttctcagcatttaaaaatactaaaaatgccttatcagctgttctcattaagatatttatttctcctagatttccatacccagtccttaaaaaacaaaactgcagatttttctactcttctgtcatttagttgcctgtttctccattattrtgtgtgcttttttagctttgtggttcttttgcaggctctggatctccatttgcaatccagaatattctttatattgagatggccttttgcttacttgacagatagccagatctaataataattgaaacttcctgtagatggcctaagttatatcttacttccaatggatgggtgtttgtggtataattgccacccattttcatttttttgcactcaattttaaggtaaaatactggcagacaattccttgtataccatctgccttttgaagatactattctcttaagatgtacagcatttgaatacatctcagttgtataactttataaatagaatcaatgatcttgtttcctctggacttctgaaaggagttgcatttggcaatagaaatcgattctgggctggaatacatatcagtattattatctatcagtagtacattaagagctaattatatttgtcctttaaatgtactttattgttctgggatgtgccatatagctttttagaatattatgtgaattgtttataacttaggtgattgtgctgttatctcatttcccttctttagaatatgattttttatcactaatatgtatgttaatatgagaagctttaaaaaaacgattgctagatgatgtattacatttagaaaaaactcagtttttgatcctgcatatcattgtagatttaaattcaagaaaattttatctttaaatatgttgcttatctttgtagcatagaaacaaaggaattgaaggatgtcatacattattgggtgtcgttttaagttcatttcagactgacactttcaaagggcttaaagattgagtggtgacttggttccttatattaagctgcaaacaaagtattatcagtcataatggcttatttaaaactggaaatttttttgcatgttttttgacttatgtgaaaatttcargtaaaaatgtggcctgagtagtttttctcaactgtaactcattttcctatgatacctatttcctaaacttttctgagggtatagaagttacttaaaatttcactcagctggttacagtggctcatgcctgtaatcccagaagtttgggaggctgagctggagggttgcttgagctcaggggttcaagaccagcctgggcaacatagggagattcccgtctctataaaaaaattttttttaattagctggatatggtgtcacacacctatggtcccagccagctacttgggggactgagatgagaggatcgttagagcccaggaggtcaaggctgcagtgagctgtgattgcgctattgcactccagctagggggacagagcgagaccctgtcttaaaaaaaacaccagcactttgggaggccgaggcgggcagatcacaaggtcagaagatcgagaccgtcttggctaacatggtgaaaccctgtctctactaaaaataaaaaaattagccaggcgtgatggtgggcgccctgtagtcccagctacttgggacgctgaggcaggagaatggcgtaaacccagaggtggagcttgagtgagccaagatcgcgccactgtactccagcccgggtgacagagcgagactccgtctcaaaaacaaacaaacaaaaaaatgttttacaagagatacttgcttaagcgtttgtctctagtagagtttttaattaaaacaactttattgaggtataatttccagaccataaaattcacccattttaagtggacagttcagtggtttttagtaaacctgcctgttttagaacatttccatcactgaaaagatccttcgtgtccatttgtagtcagtttccttccctacacccgacgtccattgaggtccttggtccattttgaataaattgttgtgtatgatgtgaggtaagtatctcgttcatcttcttagatgtggatatccagctgtcctggcaccatttgttgaacggagtgtctttcctcattgaattgccttggtacttttcttgaaaatcagttgaccataaatgtgaaggtttattaccgggctctctaatgatctatacttctacccttatgccactaccaagccgtcatgattaggttgatatagctttatattttttatttatttatttatttttaaaacgataatgtcaagtttagcctgtcaaatatacgagttgaatttgtggaacatattttgcctgtgtgctgcaaggtaaacagaagtttcttgaaaygctcgatggtgtagggttaaaaatgggtcctagccctggccaggcaggtgggaatgggacaaagaagggtagagatggaggcttcagagtggactggctgggcttgggccatgaccctcaaggacacaggagtacagggtcccaaagggcagcccctttctgagtgagcacccaagcaacacacataggggctgcatgttgcaaactcatcagtgctcaacccctggcacaaccaccccctactgtgtaatgtacctgacaaaaccctactttctaaggcactcctcccaggcccccgaccagaatcctgaactcttaaagatagtttttaagaaaacatttaaacggttacatatgaaatgctatctgcatctttccagggtttttcttttgtttttttttttgtttgtttgtttttgttgtttttttttttgttttttggtgaggtaggggtagtgtttgagacagggtgttgctctgtcacccaggctggagtgcagtggagtgatagcttattgcgccttgaactcctggggttaagcaaaactcctgcctcagactcccaagtagctggaactacaggcacatgccaccatacttggctaatttttaaagtattttctgtagagatggggtctcactatgttgcccaggctggtcttgaactccagggctccagctgtcctcctgccttggcctcccaaagcaagggatcacaggtgtgagcagctgcacctggcctggcacacacaaagttatagcaggtgccctgccccaacccccacaggcagcaagctgtggggtctcctagctgtaaagggctgctgcagtggcgacagcacagagtgggcaaggcacagcagaggttttggcagcatggcccagttcctggtatctgctcctatatagtccatgcttacttcttcagggagagtgactgcattcactttcctgacaaacatgaatcatcttttgctttcctctctttcttcctcttggctttctcctgctatttccagataatcacctgctctgtctccccagctaaatgcaatttcatgtaatgctcttttgctttctcttctcaatgtcttcttttcttgaaatctcctttggcctgcccagattcagttgtgtgacctttctggttatctatggcatccaattggggttcttcatgtcaatgagctgttctgtgcctttgtacttttgttggcagtcagtcatcttcattctcaggcaatctcttgcctgatgctagagatttcttcttttttggggtcacttgcagcctccattctccactctcttcttgtgtcttctctggccttctgcttttcaacttggagctgtgcgttgatctgcttggggaatattgtactgccttgcttagcctttgtggcctccctttctccttcctttaggcacagaggctctggcaaagcagcacctcaaccacatatgagtcttgaaatcagaagtgaaagtcctccaattttgttctttttcaaaattattttgtttataatgtcccttgtatttccataaaaattttagcataagctcaccaatttctgcaaaaaaaaaaaaaaaaaagtctcttgggtcttgatagggattgagggattacattgaatctgtcattaatttgaagaaaattcccatcttaacaattcagaatcctctaatccaggagtctcaaaatcccgggctacggactggtactggtccagagcctattaggactgggtcacacagcaggaggtaaatgatgggtgaacaagcattactgcctgagctctacctcctgtcggatcagtggtggcattagattctcataggagcacaaaccctattgtgaactgcacatgtgaaggatgtaggtcgaatctaactaacgcctgatgactgatctgaggtagaacagtttcatctggaaaccatcccttgtctgttcccctcatccccagggaaatattgcctcccacaaaatccctggtgctagatatttttggcacttctggtaccaaaaaggttggggatcactgctctaatccattaatatgaaatgtcttgggccaggcttggtggcttgcacctgtaatcccagcacattgggaggccacagcaggtggatcgcttgagcccaggagttcgagagcagcctaggcaatgtgatgaaatcccatctctacaaaaatacaaaatttagccaggcatggtggcaagcacccgtgggcccagctactcaggaggctgaggtgggaggatcactggagcccaggaggttgaggctgccgtgagccaagatcgtacactgcactgcagcctgggtgagtgagaccctgtctcaaaaaaaaaaaaaaaaaaaaaaaaaaaaaaaaaraaaaaaaaaaaaagaaatatctccatttagttagatcttttaaaacttttctcaacaatgttgttttcagtatacaagttttgcactacttttgttaacttcatttgtaaatatttttgatgctgttggaaatgggattattttcttaatttcttaattttgtttttggatcattgattgttttagtatgtagaaatacagttgggttttatatattgatcttctatcctgcactcttactgaacttgtttattagttgcagtagttttttggttagaattttccacatacaggatcacattgtctgtaaataaagacatttttacctcttcctttgcagtcagatgcattttctttctttttcttacccgattgcttagctgagaactccaatataatggtgactggcaatggtgaaagcagacatctatgccttgctcccagttttagagggaaagcatttggtctttcaccattgtggatgatgttagctatagctttcatatgtgttaattatgaaattgaggcagttcccttctatttctagatagttgattattgagcgtttttatcatgaattgatgttggattttgtcaaacgctttgttctgcatgtattgaatttttctcatttattttgttaacatggtatattacattaattgattttttttggatgttaaaccaactttgcatttctgatataaatcccatttagttctggtatgtaattcattttatatattgccagatttggtttgctaatatttgttgaggacatttgtatctacattcatgagggatattgatttgtagtttttgtcttagatccttagtgtcagcataactctggcctcatagaatgagttggaaagtgtttcctctattttctttcttttttttttttttttaatggagatggagtctcactctgttgcccaggcaggagtgcagtggtaccaccttggctcactgcaacctctgcctcccaggttcaagcgattcttctgcctcagcctcccaagtagctgggactacaggcctgcgccaccactcatggctaatttttatatttttagtagagatggagtttcaccatgttggccaggctggtctcaaactcctgacctcaggtgatccgcccgcctcagccttccaaagtgctgggattacaggtgtgagccactgtgcctggcctgtttcctctattttctagaatagtttgtgaaggatcatcgttatgtcttcttcaggttgtttcatggaatttaccagtaaagccatctggttgtagacttgtctttgtgggaagatttttagttggtaattaaatgtctctgttatagtcagttcacatagtcatttactttttgagtcattttggtaatttctttctaaaagctgtctgtttcatctaaattgtctcatttgttggcataaagttcatggcatattcccttttaattcttgtgatttttgtaaagttggtaggaatatcccttctttcatgcctgattttggtaaatgttgttttctctcttttttttcagtcattctaactaaaagtttgtcaattcatcgatcatttcaaagaaccaactttgtgtttatgtgaacttgtctatttttgttttctttttcattgatttctactctattattattattgcttcttattactttgggtttaatttgcccttccttatctagttaagagtgactcttaggttatattgatttgatgtcttttttcttttcttcttttagacagagtctcgctctgtcacccaggctggagtgcagtggtagaacctccacctcccaggctcaagcgattctcaggcctcagcctcctgagcagctgggactataggcaggggccactgcacccagctcatttttgtatttttggtagagacagggcttcgctttgttggccaggctcgtcttgaactcctggcctcaaatgattggaccactttgacctcccaaagtggtgagatgacaggtgtgagccaccatgcctggcctttcttttctaatatagacatttaaatacctaaatatttacacataatatacatttatatataaatataagcgttgatgtagctgcatcacaagtttttagaaattgtgctttcattttcattcagttcaaaatatgttttaattttccttgtgatttcttttttgatccatggattatttaaaagcttgttgttcaatttctaaataatgtggattcccatgtttccttttgtaaagtttgaatttaattccactgttgttaaagaacatattttagggccaggcgcggtggctcacacctgtaatcccaacactttgagaggcggaggctggcagatcatctgaggtcaggagttcgagaccagcctgatcaacttggagaaaccccatctctactaaaaatacaaaattagccgggtgtggtggcacgtgcctgtaatcccagctacttgagaggctgaggcaggagaaacgcttgaacctgggaggcagaggttgcggtgagccgagatggcaccattgcgctccagcctgggcaacaactgcgaaactccatctcaaaaaaaaaaaaaaaaaagccgggagcggtggctcacgcctgtaattccagcactttgggaggctgaggcaggcggatcatgaggtcaggagatcgagaccatcctggctaacatggtgaaaccccatctctactaaaaatacaaaaaattagccaggcgtggtggtgagtgcctgtagtcccagctacttgggaggctgaggcaggaggatggcatgaacctgggaggcagagtttgcggtgaaccaagattgcgccactgcactccagcctaggcaacagagcaagactccgtctcaaaaagaaaaaaaaaacaaacatattttgtatgactttggtcctttttcatttatttatgtgattttatatttaatttttgcatgaccttccagtgaacctttttcatttattctgtttgtctatttatctacctatgtagctatcttttgagacagagtcttgctctgtcgcccacattggagtgcagtaccacaatcatggctcactgcagccttaacctcctggcctcaagtgatcctcctgcgtcagcctcccaagtcgttgggcctacaggtgcacgccaccacacccagctaatttttactttttttgtagaaacgaggttttgccatgttgcccaggctggtctggaactcctgggctcaagcaatgcccccatcttggcctcccaaagtgctaagatcacaggtgtgagccatcatgcccagccctttttcatttattgagttttgttttctgttcaagcttagaggtcagcaaactttttttttttttttttttaaggataggttgtattttatgctttgcaagctacacacagtctctgttgcatactcttggtttttgttgttgttttggttgttttaaacaaccctttagaaaccattcttagttcacataccatacaaaaaaaggccacaggcaagattggcccatgggccatcatagtttattgatccctggcttaacattaagtctttcctggatgactgttccttgtacacttgtaaagaacatgtattttgctgttattgagtacaatgttctgtaaatatcagttgggccaagttgattgatagtgccgttcaggccttctatatctttgccatttttctgtctaattgttctatcgattattgagagtgtagtattgaaatttcagactttttattgtattgtctatttctccctttaattctgtcagtattttcttcatgtattttgggactctgttgttagttgtgcatttgtttataattgtaatatcttcctgatgaataaacttttttatcattataaaatgtgccccttttttgtcttaaactcttttttwaaaaaaaaaaaaatagagacagggttttgccatattgcccaggctggtttcaaactccggagctcaagcgatctacctgccttggcctcccaaagtgttggaattacaggcatgagccactgcacctggccttacactctattttgcctgatattaatatagccactctagcttgcatactgtttgcttggtatatcttttttctttttttttttttttttgagacaaagtctcactctgtcactcagactggagtgcagtggcacaatcttggctcactrcaacttctgcctcccgggttcaaccagttctcctcccttggcctcccaggtagctggaattacaggtgcctaccaccacacctggttaatttttgtatttttagtagagatgggttttcaccatgttggtcaggctggtctcaaactcctgacctcaggtgatgtgcctgccttggcctcccaaagtgctgtgattaaagaaaggcgtgagccacagcacccagccttcttttttcatcattagactttgaacctatccatcttgaatctaaaatgtttctcttgtggacagcatatagttggaacttttaaaattcggtctgacacgctttgtcttttgattagaatattttaatatacatgcatttaatgtaattattactatgcttggaattatgcccgccattttgctgttttctgtatgtctcatttcttttggtggggaggggggacagggtctcgctctgtcagagtctgaagtccagtggcatgatcatggctcactgcagcctcaaactcctgggcccaagctgtcctcccctctcagcctgccaagtagctaggactacagtcgtatgccaccacactttggctgatttgttttatttttagtggagacgaggtcctgctatgttgcctaggctggtcttgaactcttgagctcaagtgatcctcccgccttggcctctcaaggtgctgggattacaggtgtgagccaccacacctaaccctttttgttattttgtttcttttttactgccttcttttgtgttaaataatattttctattgaaccatttcaattcctttgtggttttttaaattttttttaagttattttcttaggctggkytcagtgactaatgcctataatcccagtactttgggaggccaaggaggaaggatcacttgaggccaggagtttcagaccagtctaggcaacatagcaagaccctatctctttaccaaaaaaaaaaaaaaaagaattagcagagtgtggtggcacacacctgtagtcctagctactcaataggattacattttttttttctttcttttttttttttggaggcagggttttactcctgttgcccaggctggagtgcaaaggtgtgacctgggcttactgcaacctccgcctcccaagttcaagcgattctcctgccttagcctcccaagtagctgggactaaaggtgcatgccaccgcacctggctaaatttttgtacattttggtcccatactcctgagctcaagcagtctgcctgctttggcctccgaaaatgctgggattacaggcatgacccactgttcctggccacatccttatgtattactataagccaaacactggtttataattattgctttatgtaattgtctttttttttttgagacggagtttcgctccgtcgcccaggctggaatgcagtggcgcgatctcggctcactgcaagctccgcctcccgggttcacgccattctcctgcctcagcctcctgagtagctgggactacaggcgcctgccaccacgcccggctaattttttgtatttttagtagaggcggggtttcactgtgttagccaggatggtctcgatctcctgacctcatgatccgcccgcctctgcctcccaaagtgctgggattacaggcgtgagccactgcgcccggcctgtaattgtcttttaaattagttgaaagaagaaaagagaaaaaataatctaacttttatatatatttttatgagtattcttaatttcttcatgtagatttcagtggtactatgttcttttagcctgaaggagttctttaatacttcttttgggcaggtcagctagcaccagatttcctcagtctttggttttctgggaatatctttatttcacctttattttgaaggatagttttgctggatacagaattcttggttgataggtttttttttctcctgttggtactttgaatatgtcatsccactgacttctgacctccttggtttctaatgagtcatttttctcttgctgctttaaagattttctgtttctctcacttttgacagtttgattatgacatgtttgggtgtagatctctttatgtttttcctagttgaagtttgagcttcctagatgtgttgaccagtgtttttcatcaaatttgggaagtttttgaccattatttcttcaagtattttttctgttccttcctttcctctcttatatgcttgaacaattttaatatagggtggtgtcagagttcagtttatattttataacacaggggagaataggtaaggagaatgagtttaaaaaaggttattagttgacaaaaatactggtggaagcagatagaagaaataaatgtcctccaggtttctgggtggcttgtataactggatgatgcaggtaaattaaagtgagaaaagactgaagaatgggatagggtgacaaattacataacagtcttaggtttattttctgtgtaggtctgtattttacttattttgttttactgttgatttcaccattcttaatagatcataatttcatcccaaattgatgcagtgacttgatttcaattcttcctattttaaagtcatagtcaaatagcacttaataactacatgcatatgatgtgtataattaactgtggcatagaagcataaaaaaggtatttagtacaaatcagttgaatgaatgaatgtgtttcttggaatcatgagacattaccctgtctcaggctttttaaaaaaatagctttattggtatataattaacacatcatacaattcattcacttaaagtagacagttttaagatgatatttacagcacaaccatcaccataatctttctgttggtctgagacagtctcactctgtcacccaggctggagtgcagtgtgtgattgcagctcactgcaacctctgcctcctgagttcaagtaactctcatgcctcagactcctgagtagctgggatcacaggaatgtgccaccacacctggctaatttttgtatttttagtagagacggtgttttgccatgttggccaggctggcctcgaacttctagtctcaagagatctgtccacctctgcctcccaaagtgctagcggccctagcgaataatctaattttggaatattctgttcccccataaaagaaacccccaaaagaagtccctgttagcactcctttcctcccctcaactcctatccctaggcaaccactaatctactttctgtctctataaatttgcctattctggacattggaatcatgcaatatatgactagtttctttcacatagcatgttttcaaggtgcattcttacagcatgtaacagtacttcatttcttcttattgccaaataatattccattgtgtggttatatcattttattcattggtcagttgaacattttagattattcccacattttggctcttatgaataaataatgctactaggaacagtcatgtacaaatttttatgtggacctgtgttttcatatctcttgggcatatacctaagactggaaattatgggaaatctggtaactatgtttaactttttgaggaatcaccagactattttccaaaatggctacaccattttacatttccactaccagtgtatcagggtttcagtttctccacatcttcatcaatacttgttactgtgtttttaattctagccatccttgtaggtatgaagtggtatatcattgtggttttgattcacatttcctgtggctagggagactgtgcatcttttcatgtgtttattatccacttgtatatatcttattgataaatgtcaacttagatcctttgcccattttttagttgggtctttttttttttaccaaattataagagtttgtacaccaatttatatgaatctggatacaggtgctttattagatacatgatttgcaaatagtctcccattctgtatgttatttttttcatttttttactggtgtcatttgaaacacaagagttttaaaatttttgtcacctagtttatttgttttttcttttgttgcttatgctttggtctcattatctaagaaaccattgtctaaccaaaggtcatgaagatttactcctgtgttttcttctaagagttttgtagttttacctcttaaatttgggactgtgatcaattttggttaatttttatgtatggtgtgaggaaaggggatcccactttattcttttgatgatagagatccagttgtcccatcaccatttgttgaaaagactcttctttcccccattgaattgtctttgcaaccttctccaagattaactgacctaaatctatggttttatttctggactatcagttcagttccattcatgtgtatgtctgtccttatgctagtgtcacatggtcttgattatcataggtttgaagtaagttttgaaatcagaacgtgttgagtccttcaagttttgttctttttttattttttcccagatggagttgctctgttgcctaggctggagtgcagtgacacaattttggctcactgcaacctctgccacctgggttcaagtgattcttctgccttagcctcccaagtagctgggattacaggcacccaccaccatgcccagctgatttttgtatttttagtagagacggggtttcaccatgttggccaggctggtctcgaactcctgacctcgtgatccacctgccttggcctcccaaagtgctgggattacagatgtgagccaccgtgcctggcctgctctttttcaatattgttttggctattctgggtcctttgtctttatgaagtttttcctttttttttttttttttttgagacagtctctgtcacccaggctggagtgcaatagcgcaatcttggctcactcactacaacctccacctccaagagtcaagtgattctcatgcttcagcctcctgagtagctgggaggaatgtgcgtgaccacacctggctaatttgttgtttgtttgtttgtttgtttagagaaggagtctcgctctgtcgtccaggctggagtacagtggtgcgatctcagctcactgcagcctccgcctcccaggttcaagcaattctcctgcctcaatttcctaagtagctgagattacaggcatgcaccactatgcttggctaatttttgtatttttagtagacacagggtttcaccatgttgatcaggctgttctcgaactcctgacctcaggtgatctgcctgccttggcctcccaaagtgctgagattacagacgtgagccactgcgcccaacctaattttttatttttagtagagataggactttgtcatgttggccaggctggtctctaactcctggcctcaagtgatctgcctgcctcaggtcccccaaagtgctgagattacaggcgtgtgccactgtgcctgacctgttcatccaaatttgaatctctcatttacacagctactgtaattggaatcaaaactaagatgcatgtgataccatgccagttaaaaagtttaaatttgaggctgggcgcagtcacttatgcttgtaatcctagcactttgggaggctgaggcgagttgatcacttgagcccaggaattcgagaccagcctgggcaacatggtgaaaccctgtctctacaaaaaatacaaaaattagccgagtgtggtggcgggagcctgtagtactagctactagggaggctgaaataggaggatcacctgatcctgggaggttgaggctgtggtgagccatgatcatgccactacactccagcttgagtgacagagtgagactctgtctcaaagaaaaaaaaaagtttaaatttgaaatgggtagcttttgattcacaaatattaatacaaatgtctttgcaaaaggattggatttattattttgacaaagataayagttttatttataaggaataatcctttcatgttgtaacttttgtatgtgtaattttttaaattacacattaaaaattttgtatttttttatgtgtaattaattttgtatgtgtaattttttttaatttgtcttcctagcctagcatatatgttgagattgcaaaagatgaagaaattatattgagtatcagggaaatgttaatattattctgctttatttatttagcggaagatccatccaaaagctatgtgaaattacgagactttgtgcttgtgaagctttgtcaagatttgccctgtttttcccgggaaaaattaatgcaaggattcaatgaagatatggcgatagaggcacaacagaagttcaaaataaataaggtatttttattctgtaggaggaaaacagatttaaattacaaacaaatttttgaagtgtataccttaactaaaatattataaagacattaagaatacatgtgtgggaactagcaatggttaacagtacagctttgaagccaaattgcctgagttcaaatctagctccaacacttgctctgtgatttatsgcaatttaatttacctcgtgcctcagtttcctcattaataaaatgggaagataataggtgttattgctatattaagcataacaagcagaggaaagatggataataggatcttatttttactctttaaagtagttgtacccctggagacattattggtgggaagaatggttgaagtaaaacacgtatttcattttatatacttttatatatttatttaaattttaaagtggtaaatgtcttaagataggtacagaaaaaataaatatggaagttcagagaagaaagtttattacatttatgtaagcaaggaaatcagtggttatttcatagaaaggatggcatttgatataaaccttgaagaatgagtaggatttggattatgaaagtatgtgagatgggctgggagtggtggctcacgcctgtaatcccagcactttgggaggccgaggcggacagatcatgaggtcaggacattgacaccatcctggctaacatggtgaaaccccacctctactaaaaatacaaaaaagctggtcatggtggcatgcgcctgtagtcccagctactcggtaggctgaggcaggagaattgcttgaacctggggaggcggaggttgcagtgagctgagatggtgccactgcactccagcctgggcgaccgagcgagactccatctcaaaaaaaaaagaaatttgtgtaggccgggcgaggtggctcacgcctgtaatcccagcactttgggtggatcacgaggtcaggagttcgagaccagcctgtccaatatggtgaaaccatgtctctactacaaatacgaaaattagctgggcgtggtggcgcgtgcctgtaatcccagctactcaggaggctgaggcagaagaatcgcttaaacctgggaggcggaggttrcagtgagccgagatcatgccactacactccagcctgggcaacagagagagacttcatcttaaaaaaaaaaaaaagaaaagaaatttgtttaatagctcagcttttaaaagaacaggcatatgaatatatatatatatatatattttttttaattttttggtgctttcttaaaaaaagaattcaaactccctacctagagcacaaagagcccatgataatctggaccctgcctaccttgctagcttcagcctgttagtactttgccacatgctctggctactttgccacatgctctggctttactcatcttctagccatttcccaactctgccacatccttcttccttctgtattcctttacatattctgttctctttacctgaaatactcccttttcctaattgcctggccagatagtactcattttttcaggttcaactcaggttcccttccaggaagtcagaaaatattaccttcccaacctatccataccccaactccctgcccaaataaatacataagtgaaacaacatcaacagaaaaactgtggttctcctttggcttcagtgctaccaaaaacttcctgattcttctgatatttccttgataccatttgtctttttttttccttttcctttttttttttttttgagacagggtctcttgctctgtcacctgaggtggagtacagtggtgtaatcacggctacggctcactgcagcctcaacctcctgggctcaaatgactctcccacctcagcctcccaagtagctgggactgcaggggtacgccaccacacctggctaatttttgtagagacagggttcctacaggctgttctcaaactgctaggctcaagcgatctgcccaccttggcctcccaaagtgctggaactacaggcatgagccaccatgtccagccctgtctgctttttaactgtcactgtactagcaggtttctgacctttctccttttatcactgtatatgctttcctcaggtgaccttaaccagccttayggttttaactcttacctatatactgacattgcttaaatccttgcccttagactagaattttcttcagattttctattttctgctgcctcccaaatctctcctaggctgtgaaaactcacattttcacatccttctctcagtttttcctctcatatgtttctagagtccttgaccccttggtcttcttgtgctgttccagttcatgccctcatcgttttttatgtgatgtaataactcagcttcttgattggkctctatgcacttctttttgctaccatttctttgtagctgaaagagtgacttatttaaaactcaaaatttgtgcatattgcttacattcctatttaaaatctgtcatgaaggctggggcagtggcttacgccagtaactctaatactttgggaggttgaggcaggaggattgcttgaagctgggagttgaagatcagcctgggcaacaaagtgagatcccatttctacaaaaaaaaaaaaaaaaaaaaatagccgagtgtggtgcatatgcctatggtcccagctgctcaggaggctgaggtgggaggatggcttgagtctaggaggttgaggctgcagtgaactatgatcrtgccacattaaattatccataccataatcatttgtgttacccactagactgcttgagggcaactacttttattgcctttcctctggtttctagcacaattccttgctcatggcagatattaaatatatcctgtgttcttttgggaaagtgtcattatttttactttgaaaatgttcgcattttcttttgtttcattctagcaacacgctagaagggtttatgaaattcttcgactactggtaactgacatgagtgatgccgaacaatacagaagctacagactggatattaaaagaagactaattagcccatataaggtaggactttcaagaatcttaaacactgtattcttttcactgtttaaaacagaagaaaagctaccaaatatcagtatatgagagagtccaagtcattttgtaaaattaacttttacaaaagtagaaatattcttccagtaatttataaaaattctcactcatggccgggcgtggtggcccacacctgtaatcccagcactcagggaggccaaggcgggtggatcacctcaggtcagaagttcaagaccagcctggccaacgtggtgaaaccctgtctctactaaaaatacaaacattagctaggcttggtggtgggcgcctgtaatacagtgacttgggaggctgaagcaggagaatcgcttgaatccaggaggtggaggttgctgtgagccaagattgcaccattgcactccagcctgggtgacaagagcaaaactccatctgaaaagaaaagaaaagaaaagaaaaaaaacccgggtgcagtggctcacgcctgtaatcccagcactgtgggaggccgaggtaggtggatcacttgaggtcaggagttcaagaccaccctggccaacatggcgaaaccccatctctactaaaaatacaaaaattagctgggcatgataacacgtgcctgtaatcccagctgtttgagaggctgaggcacgagaatcacttgaacccaagaggtggaggttgcagtgagctgagattgtgccactgcacttcagcctgggtgacagaatgaaattgtgtctcagaacaaacaaacaaacttatcccaaggatagtctaccatggttagcttttctttcatttgtatgcatctttaaaaaatctgaatgcctagtctcttccctaacaaattatgttgtttttcccaagtttcttgtcttctcagttgttatatatatatattctcttttttctctcttcccagataaaagcaaagttatacatatatattctctttgcttttgctttcttcttcctaaaaatagcctttattgctatttattaatataatctttgtactttaccatagccgaaaccatgttagtactattatatttttaaacattcttcttgcccttttttcccacttcgtcgtcatcttccatattttccctcctagatcaaattggccttatcatttggacattgtcaggatggatattgtttatgccaccttatgtgaatgaaaatttgctatctaggcaaggcgtggtggctcatgcctgtaatcccagcactttgggaggccgaggtgggcaggtcaccagagctcaggagttcaagaccagcctggccaacatggcaaaacctcgcctctactaaaaatacaaaaattagttgggtgtggtggtgggtacctgtaatcccagctacttgggaggctgaggcaagggcatcacttgaactcgggaggcagaggttgcagtgagctgagatcataccactgcaatccaggctgggcaatggagcaagactccatctcaaaaaaaaaaaaaaaattwaaaaaaaaaaaaaggccaggtgcggtggttcacgtctataatcccagcaatttgggaggctgaggcrggcagatcatctgaggtcaggagttcgagaccagcctggccaacatggtgaaaccctgtgtctactaaaaatacacaaattagccaggcatggtgggaggtgcctgtaatcccagcttctccggaggctgaggcaggagaattgcttgaacctgggaggcagaggttgcagtgagccaagattgcgccattgtactccagcctgggtgacgagcaaaattccatctcaaaaaagaagaaaatttgtcatctagttgcagctgagtagtgggatgattggcagaatatttaatttattcaacatataattattgagtacagttgctcaatgataaaatgttgttgctgcatttatatatactatacctatagggttatacatcacaatagctgggaacataartgaccaagttgattctacattacaatttgagaaagtaaattaactaactgtatcaggtacacatagttttggttttcctttgtaaatttaaagaaaatttaagttttatttgccatggattctgctttatagagccagtcttgaatgctgatggttcattggctgacactacttgctgaatcccaacttttccttcatagcatctttttactttgcagtgcaactgtatttcctaatttgtcattgtaattctgttcacattctgaatataaaattattatttgcctatgactaaatcattttatcttgaattcatacacagatgtatgaatagttcctcatagtgtcatttcattgcagtttaatagtttttctattttacagaccatcatctgcatatagcaggtttgtaataaattataatggtctcctcaaaagttatccaaagtagcattttattatttgatgttatcaattcagaaacatcagaaaatgggtaaaaatggtattttccaaaggttttgacctttaagtaatatttgttagctagaaaatgtcttaatgatgaaatttgggcacagagagcagtatagatggcaacatttaagagttattaagattttactaaagtaaaataatttattgaattatatattttagatattaatgtgacttttatataaaatataacaaatgaaagatggaaattctgagtacaaatagtagtcacacagctaatgccaaataatgggaacctctgtagttcataagtgcaagtattttctactcttaaagaatgataattcttttttatattattattaagtacctttacctgtccagccagttcaccagtctaaaaggccagaactgggccgggtgtggtggctcatggctgtaatcccagcagtttgggaggccaaggtgggtggatcacttgggcccaggagttctagaacagtatatccgaaacatgaaagcttcatatttgcaataatgccacccaaccaggaatcctggagttattcttcattcttccttcctcatatcacccagtattttctcccctaaatctgccctgtcctctccatctctgctgctgctgacttgatctaggctttcatcaactctggcttgaactactgcagtagctgcccagtcctccagtcccatcctaaacatctctgacacagtgtcctgcataaaagttgttatcagctacctgttgcaaactccttagcatagcggtatcctaagtcaaaccaggagggtttagtatgataatgtatgtctggaacttaataaagactcaaatgctatttaatatatttttaaagtatagcagttttccatttgtctttctgaaacatttctaacagtttatgttaaaattagcatgtggcccgtaagtacttcactgggtggaatttaaaatgtaattaattaatgactgaatagtaaaatgaagaataatagcacttaatctcagttgtctttcttcagctaatgtcttctatctattaagcaaatatttgagtgtctatactgcccagagttctttaaagttttggagggggctgctagtcacatgtctgtatttaccatcattggacacaaataccaggtcttcttgttaactctttttagagggtttgcaattcatggttaacattatgtttaagcttccttaaaaaacaaaacaaaacaaaaaaaaaacattgtgggacaagtttgggcgtattcatactattcttatttttaacattggagacttaaaattgtaagactataaggaaatatatttactttcttcgtctaacaaataattgtttgtcacttagaaaaagcagagagatcttgctaagatgagaaaatgtctcagaccagaagaactgacaaaccagatgaaccaaatagaaataagcatgcaacatgaacagctggaagagagttttcaggaactagtggaagattaccggcgtgttattgaacgacttgctcaagagtaaagattatactgctctgtacaggaagcttgcaaattttctgtacaatgtgctgtgaaaaatctgatgactttaattttaaaatcttgtgacattttgcttatactaaaagttatctatctttagttgaatattttcttttggagagattgtatattttaaaatactgtttagagtttatgagcatatattgcatttaaagaaagataaagcttctgaaatactactgcaattgcttcccttcttaaacagtataataaatgcttagttgtgatatgttaatgtgtgatgatatgattcttaaatacttacaataaacctcattcttaaatacttatcattccttccacactttgcttctaagattttacatctgacacctttaaaacatttctttaaggttatcctggtaattttattttttcaatatgatttttctttcttttttaacttttagattcaggggtacatgtggaggtttgttacataggtaaactagtgtcttgggggtttcttgtacagattatttcaacacccagatactaggcctagtatccaatagttaatttttctgctattctcccaacctccaccttcaagtaggccccagtatctgttgttcccttctttgtgtccatgtgttctcatcatttactcccacttgttaagtaagaacatacagtatttggttttctgtgcctgtgttagtttgctaaggacaatggcttccagctccatccatgtcctggcaaaatacatgatcttgttcttttttatgactgcatagtattctgtggtgtgtatataccacattttctttatccagtctgtcactgatggacatttaggttgattccatgtctttgctattgtgaatagtgctgcagtgaatgtttgcatgcgtgtgtctttatggtagaatgattgatattcctctgagtatatacctagtaatggaattgctgggtcaaatggtagttctgtttttagctctttgaggaattgccacactgctttccacagtggttggactaatttatacttccaccaacggtttataagtgttcccttttctccactaccttgccggcatctgttattttttgactttaataacagccattctgactggtgtaagatggtacctcattgtggttttgatttacatttctctaatgatcagtggtattgggcttttactcatatgcttattggctacacgtatgtcttctttgaaaagtgtctgttcacgtctctttttaatggggttgtttggttttttccttgtagtttaagttcttactgatttttcataataggaaatgttcttagtataggttttattttgttttaaataaaatcctattaactctattaactgtttgggaaggcaggtacgagggaaatcaaactagatacagcctaaaagccaaaattttggcatcaaatattatttgaagataacttagaagttagcataaacattctataaataaaaatagaagatagaaatcagtgtataaaatacaatttacacaccattattaaaatatatcttgtgtaaagtgagacgcccatctgttcggatttgctgtaaggttaccaaggtattgaaatacagcaagaaaaaataatgacaaactgcttaatatagtcttgtttttaatgaagtagagtataaatagattgctggaaacagaatcattcaaagtaaaagtttgagatgtttataatgtatgctagtaaacaaggtattatataacaaaaacaggatgtaagttgaaatttacttttaaaaatctgatttgatggatgcttggggcagaatcccaagttggacaggcattatctcgtcctttgatcaatttccatccgtaaaatctgtcagagaagtaactggtagcctctggacacaaaatagctgtggccagcagcataccaacagcactactgttcccttaaaatgagggagctataaaagtttcaaaccatctcatctcagaagcctgtatatagataaaacttgttgacttctgagagattatatctgtgtacataatttgctacagataaaatgaactagttcagttaaaatcctttctgaaatgatatgaaagcaatttgtctttcatctaaattggctaatttttaatttttttattgacagttcacagctgatacttaaagatgagctctgaagaaagcatcaataccatctaaaccagttatctttcaagattttttttttgtataaaaaccagaaagaaaatgtgatgctgattttcctattgtttgtttgttttgagacgaagtctctgctgcctaggttggaatgcagctcactgcaacctctgcctcccgagttcaagtaattctcctgcctcagcctcccaagtagctgggattacagccctgagccaccatgcccagctaatttttgtatttttagtagagacagagtttcaccatgttggccaggctggtcttgaacttctgacctcaaatgatctgccctcggcctcccaaagtgctgggattacaggcgttgagccactgtgcccggcctcttactttttccctgtcctctataaattgcgttttctctacatatatttccttctgagcatcaggtttttcatctgtgaaactgaggttgtactagaatgatctctaggctcactccctccctgttctaggttctgtgtttgtcgttttcatatcctttctccttacccttatacttttatactcagatgtgggtgtagatgtggtatatgtctaaaataaaacacttttctaagtcacacaaggatattcatagtttatacgtgacatagtttgtgtgagaagggagggaaaaaggactgtgtccctgattgtctccaaattgctggggccccagtttgttgtaccagagccttgtctaggctgaaaatctatcagaccttctgattaactgccatctttacctactagagaagagctggcagcaaagctactaaggccatatttgataacaagattagaatcatacacctgagaggtcaactgatttaattccttaaattcttaagttctttttcttagaatttaaaagccagtttaactattaaatactgatttaataaagtactcaatacttccaaataaaattatttttgcatttgtatatctctgtgtatatacttggaacatagtagtatatctttgtgcatgtatatatttgtatctgtgaaatcatttcctgggaaatgtagttaactgagttaaaggataagaatatgtctatggctctattacataaacatgccatattttgcagaatcgttaaaatactacccgatgtgaatgtatataccaattttaacagaatttcaatgacgtgggatgttgtttccatagataaaatatcttatttacatttattttactgggaaggttgaattgtgtgtgcgtgtgtaaaatcttttccttgatatgaattacctgtttttttaaaaaatgtatgttttgcagtctacactgtcaatttataaatggacagtaaatccagaggccacactacaagtaactggcaaagccaggaatatacactaggctcctgacttctactccatctcatcttccatcaagtaggccagccaagtaagcatgccagcccactaggctgttctaagagggacttttagaggagcaagtattaagaaaagtattctcggccatgcacggtggctaatgcctgtaatcccaacactttaggaggccaaggtgggggactgcttgaggccagtagttcaagaccagcctgggcaacatggcaagcccccgtctacaaaaaaatttaaaaattaggcttggtggccaacatagcgaaaccccgtctctactaaaaataaaaataattagctgggcatggtggcaggcgcctataatcccaactacttgggaagctgagggaggagaatcgcttgaacctgggaggcagaggttgcagtgagccgagattgcaccagtgcactccagcccagggaacagtgtgagactccatctcaaaacaaaacgaaaagaaaaattaggcttggtagtgcacacctgtggtggtgcaagccaggctacttgggaggctgaggcgggaggatcgcttgagtttaggagttcaaggttgcagttagctatgttcacaccaccgtactccagcctgggtgacaaagccagaccctgtcctctaaaaaaaaaaaaaagaaaaaaaaaaagctggacttggtgtcacatgcctgtagtcccagctacttaggaggctgaggcaggaggatagcttgagcccaggagttcaagactagcctaagcaacgtagagagacccccatctctaaaaataagaaaaaagtaaaaaaacacaaaaaaccttaagagtctgtttgatagcaatgactgaaattatcaatgcctcttgaaatatggcctgaagttactcttcctctcaacatttaatcttcaacttttctgtgttcccatatgcctttacatttctattataaatatttcattcttgttttatgaggtgtggtggaattacacagtgcatttagtttactcactgagttgggcagagctgtgtttacgtatatgtgatatttcaataggaagtatgcacacggaaataaaaagcaacagggcatgcagtgaaaatttcctcactgcattcctccagaaacaaccagttatcaatatcttgtgtatctttcagagatacatgcaaaagggagcatgtatgtatatatattttttatataccatatgtatatgtgatgacctaccacgttttctaactgcttttttacttttggggattatttgagctatcttgtttaatggcagcatggtattccattgtgtggatatatcatacattactctaccagtaacatatttatgttgtttccaatattttcctttacaaacaatgctgcaatgcctattgtatatgtgctatgcatacatatacaagtataccaatagatgaaagtcctagaagtcatggacattagtctaacctcactcttacagtgactctactacctttacaacagttaaaattatcaccataaactaaggttgtgggaactttataatgtcccaatttgaataaactctatgcaaacaggagcatattggacttatccaaccatctctttcatggctagaaatttgaattacctttttttttgttgttagagacagggtctcactctgtcatccaggctggagtgcagtggcatgatctcggctcattgcatcctcagcccctccaagtagctgggaccacaggcaagtgccaccagacctggctaatttttatatatttttgttgttgttggtagagacagggtttcaccatgttgcccaggctggtctcaaactcctgagctcaagcgatccacccacctcagcctcccaaaatgggattacaggcgtgagccactgtgcctggccttatcttaaatgcacaatgatttgaatggttaggcatatgcacctttctgtttattcctttagtcttgcttagctcttctcaaacctttgcatccttaagaatcactgtatttccgggtgtctcagcttcagtcctactgacattttgggccagataattttttcttgtgtggggccgacctatatattgtgggatgtttaacagcatccctggcttctacccactaagatgccagtagtgccacccccaccactagttgtgacaaccaaatatgtctctagatatgtcctgtggggagcaaaatcatccttcattgagaatcattgttctatgggattgaatatccatctactttaagcactatttttttaaaattatgtaacatatacttagtaaaaaaaaaatcaatgcagtcatgggctttctaagtaaaaattaaacatttaaaatctatgaaagtatttgatgagaaataaactgccctcccacaccgccacccaattcacttctttacaattacttttaccagtttctcttttatcccccagatttatcagtctacaaatgtccatttctattacaaacacaaatattgatatactacatgcagtactctgagtatcttttccagttaatgcatatctctaccagtacatgttacttcagttctaaacaccttaattctaaacaactgtataatattccatagctcgatgtcaatgtttgacccaatactgtattaaaggacatttaggttgcttcctatcttctactacaagcaatgctgcagcaaatagccttttgt

SEQ ID NO: 96382 - DNA, 208041 bp, Homo sapiens
gctatttggtcttaattatttacaggaaaaagagaaaaaaaggcagaagttgcagctgcatgccttgtgacccaggttgcatagttagaatcctctcaaggctcagggtaatttaaagttccaacagatttaagtttgaattatttaattttacaatatcagcttaaaaagtgaaaaaaagaataacaaatgagtcaaaagaaagcacaaggaagaaaacaataaaagtaaaagcagaaaaatagtaaaggttaagaatagaaagcagtgggtcaaattaataaataaaaattgtggttctttgaaaaaagtaagaaaatatgtaaaccactagctaaattaatcaaactactaaagggagaaacatatttatacaaaacaagacaaagaagaaataggccgggtgcggtggctcactcctgtaatcccaacactttgggaggctgaggcaggcggatcacgaagtcaagagatcgaggccatcctggccaacatggtgaaaccctgtctctactaaaaatacaaaaattagctgggcatggtggcgggcgcctgtactcccagctacttgggaggctgaggcaggagaattggttgaacctggggggtggatgttgcagtgagccgagattgcgccactgtcctccagcctggcgacagagcaagactctgtttcaaaaaaaaaaaaaaaaaaagacataatgtggaatatgaataggcatgaacaaaccaaactgttttgtaaatgaataacataagcattctaaacagggaggggggcaaaagcctaagtaatttttgagcctaatattttgactgtgtacattaagaccaaagaaaaacactgcaagcaaatattgaactctagttactaggtttgtctcttgttttacaaagacatgagttaggtgttctgaggctgctttcagggtcttgtagtatagagcaaataagtaaatacagttgtccctcagtatacacgggggattggttccagcacctccgaatataccaaaatccttgaacactcaagtgccatggttggccttggagaacctatgtatacaaaagtcagccctctgtatatgtgggttttgcttcccaccaatattttattttatttttacatggcaaagttgcaacagtcagcacagcagagaaagggctgtctgccccacgaataattttaaaagtctgtgtataagtggaccaatgcagttcaaacctgtgttgttcaaaggccaactatattttgaggataatgggaatgagatttcttacagcttgagcagagcgtcaccagtgcagaaaggggaataccagcagggacactattatgttgattggaattggaggtatgagcataaacttatgacttttaatatatctttttctctgtatatctatatcttcatctttctatctgtagacagaaacttggcacatttcaccttagcccagtgatcaaagagaacctcatcattgatggtaaaagcacattatgtgcctgttcctttgatgaactagaaggacacaacagtcctcctgtggcgttcttgtccaaaagccataaactgaatctcctcatgaggaaacatcagtcacacctaaattgaagaacattctaccaaatacttggcctaggcttttttcttttctttttctttttcttttttttttgagatggagtctcactctgtcgcccaggctggagtgcaatggcatgatcttggctcactgcaacctgtacctcccaggtttaagcgattctcctgcctcagcctcctgagtagctgggattaaaggcacctgccaccacgcccggctaatttttgtattttagtagagatggtgtttcgccatgttggccaggctagtctcgaagtcctggcctcaagtgatccgcccgcctcggcctcccaaagtgctgggattgcaggcgtgagccaccacgcctagccatggcctatccttttcaaaaatatcaaggtcacaaaagacgaagaaagatggaagaactgttcccaattaaaggagaataaagagacatgacaaccacgagacatgacaatcaaacaccatgtgtgttgttgcatcagattctgggtcaaaacaaattatttttctttttgctaaaaaaggacattataggccagatgtggtggctcatgcctgtaatcccagcactttgggaggccaaggcaggaagattgcttggagccagtagtttgagaccagcctgaacaacatagtgagacccttgtctcaacaaagaaaaaaaaattagccgggcatggtggtgtgtgcctgtattcccaactactagggaggctgaggtgggaggatcgcttgagcccaagaggtagaaactgcagtgagccgtgattgcacctgggtgacacagcaagtccctgtctgcaaaaaaaaaaaaaaaaaaaggacattattggtacaattgcaaaatttgaatatgtattttagattagaaaatagtattataaggccgagatgggattgcttgaggtcaggagttcgaggccaggctgggcaacataatgagaccccatgtctacaaaaaataaaacaaattaaaatagctgggcatggtggcacatgcctgtagtcccaacgacttgggaggctgaggtgggaggatcacttgagctcaggaggtggaggctgcagtgagtcatgatcatgccactgcattctagcctgggcaacattgtgagaccttgtctcagaaaaaagaaaacagtattgtattaatattaaatttctgattttgattattgcacttcagttatataagagactgtccttattcttaggaaatacacactgaagtatttaggagtcaaggggcatgatatctgcaacttaactctaaaatgtaaaagatatatatggggagaatgacaaaattaatgtggtaaaatataaaacaattggggaatctgaggaaaggataaatgagagttatttggactgttcttgcaactttttactagcttgaaattatttcaatttaaaaagcaacagggaattttaaaaatgtttgtaagaacatgtaggagaataactgttcttttggagtagtataagatttttgaattcacatacaaaacaccaaacaggccaggtgcagtggctcatgcctgcaatcccagcactttgggaggccaaggtgggtggatcacttgaggccaggagttcgagaccagcctggccaacaaggtgaaaccccgtctctactaaaaatacaaaaattagccaggtgtggtggcgcatgcctgtaatcccagctactcaggaggctgaggcaggagaatcacttgaatccaggaggcggaggttgcagtgagcctagatcacatcattgtactccagtctaggtgagagagtgagattccatctcaaaaaataaaaagtagaataaatcaaaaaacccaccaaccataactgaaagaatgatatatttgagtaaagtaacaaatttatgtacaataaagaactctatataagtggagttaaaagacaaacgacaatgagaaaatatttgctatgcctcggattagtatccagaatatctctatatctatctatctatctaaaaaaaaaaaactacaaatgaccgaagagaaaaatctgcaaaggatatgaatagctgagtcacaggagaaagtaacaaccatgggaaaacatgaccaactgcttagggagaattagggagaaacaaattaaaataacaatagtataccattcacacttattcagatgattatccaaaattatataatttggtaatacctattgttgaaaggatgaacggggaaggggactttcttaattggtttatctgtctgtagatcatctagcaaaatctagtaaagatgaagccatgcactcagatatgtacgtaattccatctttcagtatgtgccctagatcattgccaaaggaacaggcagagtcgctcactgcagcattgttggtaactagtggaaaattggaaacaatctaattgtcatcaacagatgagagcagatagttaaacaatttgtggtataatcatacaatgcgtttaaaattaatgaacactacatgtgtcaatgtgtagaaatctcaataacagaattttattattattattttcaagacagagtcttgctctgttgcccaggctggagtgcagtggagcaatctcagctcactgcaacctcagcctccccggttcaaacgattctcctgcctcagcctcccagtagcatattaatattctactaatatttttagtagaaacggggtttcactatgttggccaggctggtctcgacctcctgacctcttgatccgcctgcctcggcctcccaaagtgctgggattacaggcatgagccaccgcgcctggcctcaataacagaatcaggcaaaaaaagcaagtagcagaaatttagagtgtaaaatttataaacacagaagcaataatggatattgttgatgaataaaaaaggagatacagtccctgccctggaggtatttgggggcatttaaagaaatgtcaagtaaacaggtaattacaatgtagtaggatgaaagccacgatcagaatagacaccaaatacagatggaggcggcaggaagaaggtgaaagaatatattgaagaaatggcaataccttctatgccccactcccacgctggcctcaagtcctgaaagacaagaaggggttacttatgtgaaagataggaaggaagggtgtttctagacgatagtgttatttgcaaaagccccaagaggagaaaccgcagagcctgatttagaaactgccagtggtttctcagagctggagtagatggaggagggggcaaagaaagggatggagggcattggtaggtgccctctgacaaaagctcctcagaccaggctataaggagtttcaccaccttctgaaggcggcgggaaggctagattattgaagcagaagagtaacagctgcaccatgaattataaaaacgacggctctggaggcaagatcagttagttttttgtgtgtgtttgtttttctttttaaagaagaaaaccaggcaagaaacaatgggatcgcagctgaaatagacgaggtggtgactgagagagagcatcgagtccaacctttagggcttcagggagggattagacgtaggtgtcgggagaggaggttcctggcccggctatcttggggtgaacgatggagtgacaggggttgcgatttgtgacacctgactccgccccggccacccctgattgggccttacaaacgtttagttcaaatacaaaaatgggccggacacggtggctcatacctgtaatcccagcactttgggaggcagaggcgggagggctgcttgagcccaggagttcgagatcggcctgggcaacatagtgagaccttgtcttaaaacaacaaacaaacaaacaaacaacaaatataaaaatatccagaagaaaaactgaaggcggtggttaccattacaacgcgttttcgtcagggtatatgtggctttagattcatcttgaacgttttaattacaaaataaaagctgatgtctatgcaacataggaaaatatcgacttgtgtaacatctcagtgagcacacgggcgtcatattactttctgtactttgctgtgtgtttgaaccacatagcaaaaaactgttggcgacaagaattggaaaagcaagaaagtacaagaaaggctttgagttctataagggggttaaaccagaaagcggcgggggcagggaacagtcaatctttgtgtgtgcacactgcgtgtgcagagagaagactcctcaggagaccaggacctggctgagtgtgtgcggggatgaagcgggtggaggggaactggggctggggaggaggtacgcgccgcggaggtgtcccccgccccccacgatccttctcgccaaccccccgcccctcctccctccgtgacgccgcttcccgtctccaggcaacgtgggggccaaacaacacggccgggaggcggccgctgcctgccgggccctctcttctgggaccctggattttcggacactgagcgccatggccctgcctctgctgccgggcaacagcttcaaccgcaacgtgagtaggaagggcgtccgaggtcacagctcccggctggagtctggggtccaggcagggtcgtggcgtggccacctccgcagactctcctggaggccccatgctgctgccctgggttggtggcaacttggaccaaactttataggctgcttctcccatctctccarctgcatctgaatgtttttcctaatttagaaatatatagagagagtccttataggtggcaggaccctcaaaggtaacaaataatagtgacgataaccattgggggtttaatgtgtgccaggcgctgtgctttaatcaccttatgcagcatccagtgtcccaacagccctttgaattaggtagtttttattcccagttactattgaggaaactgaggcacagaaccacacagtctcagtggtgaagctgggtttctttcaagcaaccttgtctccacagctcaggagcctaatcattatccccagtatcctgtgtgaaaaaagataccgtttcaattatcaaattgaagaaatctggcacttatcaagaggggtaggtggcagataagagttctatcagcctgtaaagtttactcccaaactttatagagacaggcacccaaacttggagggattttttttttctctatttataattgggaggggttcatttctttttttttttttgagacggagtctcgctctgtcgcccaggctggagtgcagtgacccgatctcggctcactgcaacctccacctcccaggttcaagcgattctcctgcctcagcctcccgagtagctgggattacaggcgcccgccaccacaccggctaatttttgtatttttagtaaagatggggtttcaccatgttggccaggctggcctcggactcctgacctcaagtgatctgcccgcctcggtctcccaaagtgctgggattacaggctgagccactgcgcctgtcctggaggggttcatttcaaaagaagatgaacgtacagaacaaagcaacacaacacaaaaaaccctgagcatgaaagaacttttgccaataaatagcacctcatttaaacgacagcaggaaaatgattcaggcttttgtttatactggttactacccttcacttgggtcagccatctgtgtctgcaggagaagctaattcccaattagatgggagggaattagatggagccactcaaggcaattgtgtaaacctttgataactttagaaagcaggcagcagattgaagtatttggctttatggtttccaaacactgtctgtatctaagttgttggccctgaagtacaagttttttctttgtagcttcacgccattgaattctgacccctacacgtctggtcagtccaactttgaacactgatttgtgcatttcttggttgatgggcagaggctggccttccagcatagcattgccctttggtaagtttaagccagtcacgcaaacaagaaaggcccctgagagacgggacatgaaaacagattccagaagtaaagaagcatgctgtgtaaaagtaattttaataaaaaatgaaagtaaagcctacagctttttgcccagcaacactctgattaccagtgcctgcctcctgcagaagtatcatagctctcacgtgcagtgattaaggatgggaaggaaaaacagtggatggatgaaatattaataaatctgcaaggttctgcgtatatttttgctttttaaaaaactttaagatcatgaagtacaacacatatacagaaagatgcacaatggatgatcacaaaatgaatatcaagaaattaaatatgggggctgggcgcagtggctcacgcctgtaatcccagcactttgggaagcagagatgggaggatcccttgagcccaggagttcgagaccagcctgggcaatatagtaagacctcatctctacaaaagattgaaaaaattagccaagcgtggtggcacatgcctgtagtcccagctactcaggaggctgaggtgggagaatcatttgagcctgggaggtcgaggctgcagtgagccatgattgcattactgcactccagcctgggcaacagagccagaccctgtctcaaaaaaataaataaaataaaatatgacctgttctccaaaaataccacccttgactggggttgccagatttagcgaataaaaatacatatctcaaatactgcrtggaacctgtttatgggaaaggattatttattgtttaccaaatttaactgagaatcttgtattttatgtgacaactctacctatgaacctttctgttcattaccccatctctactctccagatataaccactgttctggctcctatcactataattaggttttgcttgcctttgaaccttttatcaatggaaatgtttggtgtttattcttttgtgactggcttttttagctcaacagtatgttcgttagatttgtccatgtggctgtctatagaggtagtttgtacatttttattactctgtagtattgcattgtatgtttttcacatcatttatatatacattttactcttgataaatatttggcttgtttggggttgttaagaatagttttactgtgactatttttgttcatgttttttggtaggattgctagatcatacagtattcgtatgttcagctgtagtagatgctgtcaaagtgattatactacttaaattcccaacagcattttatgttcctgttgctccacattctttctaacacttggtattgttagtcttttaaattttagatattttggttggtgggtatagcaactctttgtagttataatctgtacttcctgattcctaatgaaattgagcatgttttacacgtttgttggtcatttgtatgaccatttattggtcactgcttttttttttagacggagtcttgctctgttgcccaggctggagtgcagtggtgcaatctcggctcactgcaacctccgccttctggcttcaagcgattctcctgcctcagcctcccgagtagctggaattacaggcatgcgccatcatgcctggctaatttttttttttttaatttttagtagagacggggtttcaccatgttggccaggctggtcttgaactcctgacttcaggcgatccgcccgcctcagcctcccaaagtgctgggattacaggcgtgagccaccgtgcctggctttatttgtatgaccatttattggtcactacttttttgtgtagtacttacttatctcttgtctaatgtttactgggttgtctgcctatttcttagtgatttgtagaagttctatataaattttgggtatcttcttgtctgtgattggccttttccttctcttaatgatgtttttgatgaataatttttggaaaagatcactctttctccatgtctctgcagagccactttgtcaaaaatcaagcatccagctacgtgtgggtctatttctagactcatgaatatttaaaacatttatttactttatgcctgagaacaatgggagtgtgtgcgtgcatgtgtgtatgtgcgtgtgtactagagaatgacagtaccttggactcattcaacaaatcagtatttatttattgagtatcctagtatatgccaaaattaggtgactacatttaaaaaattgttacactagccttggtactaaatgtactgtgtgttgcccacaaattaatattttaaaaacttgtacttagttaaaagattggatgttctctggcatagaatggttagaaagtcagtaaagccatatctggccttttagtcttgcccttcccccctcccctgcttgctgaattaaattaccaagtgaaaaaccttggcctcctgtagatagcataattacttggctgtttggatttaaaattataacacagctaacttttattgcttttccatagaattgaaaaggaacttatgtgccccttacttagctgccagtggtcagtcaaaagcaatagattgatttctgtccacggctaggtgatacgcaacctgtatttctctctctsaaatacaagaagtatggtgccttctaaaatatgaacatttgtacctctgatgacattacaattattttgatatgagttgaaaaccttagggaaatatcacaactaaattctagatacactgtatcttttttccaacaatttccatgctgaacttgtattgagcaagagaatcttgggcatattatcaaaattgaaaatattaaaattaaaagggacatttccagccaaagccaaaaatcctttctgcagtattttggacagatggttgtgtggcccatcctgatcctgagtgtctctaatgaatgawgaagagctcactctttctgctttttttttttggagatggagtctcgctctgtcacccaggctggagcgcaatggcgccatctcggctcactgcaacctctgcctcccaggttcaatcgattctcctgcctcagcctcctgagtagctgggattacaggtgtgtgccaccacgcctggctaatttttgtattttgagtagaattggggttttaccatgttgatcaggctggtctcgaactcctgacctcagttgatccacccgcctcagcctcccaaagtgctgggattacaggcgtgagccaccgcgcctggccgctctttctgcttttaatgaagctaccttgccaccatcttaggagggtttgctgtaaatagcccatcatctaatttgtagtgaagcaaagtcctccttaagaaaaaagaaaacatatttgaatttgcagcaataaaaaaaaaaggaatttaatgaatcatgaccagctttttttttttttgaaaaggaaaaaagaaaaagaagagagtggggtagaatgaagaattagagtgtattatgcttgagaggagttaagtgttgcacggacctttttgtccttcctgtgtgtgcttgtgtatgtatgtgaactggcctgcactaaaatatgcctattactgtggttgtgcaatcagtgtttgaaaaacactcattcgagccatctccatctttttttttttgcgatagggtcttgctctttctcccaggctggggtgcagtggcaggatcacagctcacagttcactgcacgcagcctcaacctctcgggctcaagacatcctcccacctctgttgccacagtagctaggactacagacatgcaccaccatacccagctaattttttaaattattatttgtagagatgcggtctcactgtattgtccagactgggcaattcttatttaaatttagatcttcagcttctttcaaggtcagatctcatctctcacccttcaaagagccttgtcagcctttcttaatgtatatttttaaattttttgaggtaaatttcatgtaacatgaaattaaccactaactatttaaaagtatacaattcagtggtacttggtacattcacactgttgtgcaacaactaacacctctaactagtttcagaacattttcatcacctcaaatctcaatcttttcaccctggaggagtctttgaaatgattttgaggtcttagagaactcctgcataaaaactatatctatagcccatggtacattagcacaatctgtgataataaatatgtaattacataaaaagatgttcaacattatagctattagggaaataagaattaaaatcaagatgagataccactgtatacctattaaaatggctaaaatccaaaacacaataccaattgctcacatggatttgaaataacaggaattctcactcattgctggtgggaatgcgaaatggtaatttcttataaagttaaacacacacctgccatatggccagttccgaatttatgtgaaataaataaattcccataaataattctgggttaaactcaaaataagcacatatcaatttcattttcaactggaatgagaatattgtagctataataatccaataataattgtctttttaaagtaaaaaatggtagttttctgtggatctcttgatttcagccaacttatttacctactctttccctttctcacaaagggttatcaaccctaaagcaagtgggaatgtagaagaggaaacttcaggttgttttatggtaaaattttctacttgatttatttttcctttttaccttatccaagtaggcctaaaagttctctatagtttctattatagagggtgctattgaggaatgatatatggtatatggtatgaacaaaagtagttttctcccctattaaaaactgaaaaggactttttaccagcttttttgagggaaaaaaaacccaaaacagatagttaaacttagcttacctttctttcctttccatacattcaaaaaacttttcagtcagcataatataaacatgttaaataattcaagttatttctgtttatatctaagatggaatttactttttcaaaaagtaggctaagatgatttaatttaaataaaggttgtaaactcgtaattaatgctgttttcaacatcaaaatgtattgacaatgttacataataaagctactaaaactatatgacaaagcattatgagtaaaaatataacctaagatataattttatacaagacttaaaaattaggttcttttactgactgacatgattgggcttaaatataggcagttacaaaattataatcttgatttctttatagacctgtatgtacataacagtcttattttttaaaagctaaaaataaataataaaatttacctctccactctgaaatctgtgtttatattttgccacataaataattccgggtcaagcttgaaataagcacacatcaatttcattttcaactggaatgagaagatttctggccttttcaatacttgttaaacaaggaaagctttgcttacatgtataagaagttgaaaattatagcaaaatggtcattgctctcctatgaatggcaggatgcttacttttatgtaaattttgaactggccatatggtaggtgtgtgtttatcttgataagaaattaccattttgcattcccaccagcaatgattgagaatttctgttattccaaatccttgtaagcaattggtattgccagtgttttggattttagccattttaataggtgtatagtggtatctcctcttttctctctctctcttttttttttttgagactgagtctcactctgtcgcccaggggagtgtagtggcgcgatcttggctcactgcaaccctctgcctcccagttcaagctattcttctgcctcagcctcccgagtagctgagattacaggtgtgtgccaccacgcccggctaatttttgtattttgggtagagacggggtttcaccatgttggccaggctggtcttgaactcctgacctcaggtgatccacccacctcggcctcccaaagtgctgagattacaggcctgagccaccacacccggcctggtatctcctcttgattttaatttttatttccctaatggctatgatgttgaacatctttttatgtgcttatttgccatccgtatatcccctttggtgaaatgtctgttcgtgtcttctactcatatttaattggggagtttccttacttgaattcctgacctcaggcgatccgcctgatgagttttgaaagtcatttttaatatagtctggatacaagttggrtgcaagtctattattgaatgtatggtctgtaaatattttgttccagtctatggcttgaattttcattctcttaaagcaaggctaaaaaatatgtacatatatttaaggataaaatataacatgagttcaaaaactattgttttcaatgcaaattaaggattatagggtttttacttctttgattttatatatttacatgtaatcttgcttcataagtacattagctgaattacttatcctaacmtaaataaaaatatacaaccatataataatttttaattaataataacattattaacaatttgagttttgaaaatagtttaagatttctttatagctatttctgttgtgagagtatatcccaccaggaatgtatagtcaaattactgggttttagtttcatttaaatcattgctgtcggtatggttaagtcaccaactcagtatctagttaggttcatttgtttcattgtgcttttgtttctgaacttaaaaaaaggcatttgtrtggtctcaaagtcaaatttgcaaagtaagttactttcagagagctctagcttttatctctgtctcttcaatcttattctctccctctctccataataacttaaaraaaaaactttatttagtttgrggttatcctctttctcttcctccttctcttctttcttttttttttaatttttaaaacagcaaattgttaaatttattcacatgttccccttttattcaatacttggtagcataatctacacagtcttttgaaccttccttttttcattttaacagtatatcttggagatcacttggtagtggtatatagggctcttcctcatttctttttatagttacatagtactccattttgtagacttacaatagtttattcaaccatccccttttggtgtacagttacattatttccagtcttttgttatccaataatgttgcaataaatagccaaactgtgcttcaaaagacactatcagaaaagtgaaaaagcagctgacagtgtgggaggaaatatttataaagcatattatctgataagggactatattcagaatatgtaaataactcccaaaactcaataataaaaagacaaataggccaggtgyggtggctcatgcctgtaatcccagcactttgggaggctgaggcaggcggatcacctgaggtcaggagtttgagaccagcctgactaacatggagaaacctgtctctactaaaaatacaaaactagccgggcgtggtggcgcatgcctgtaatcccagctactcgggaggctgagacaggagaatcacttgaacctgggaggcagaggttgyggtgagccgagatcgcaccattgcactccagcctgggcaacaagagtgcaacttcatttcaaaaagccaacaaacaaacaaaaaggcaaataatccagttttggtggtatgggattgctgggcagacaaaacaattgctgtctactatgctagatcacaggatagttttgatataaagaattctgtcactttgttcccagtaactattaaaatatccttgaaattacattatttcagattgggccgcttattgaagctgccatccatactttggaaataacatattccattgctattcctaaatgttcatttgaatttcaggaattagagtctctttgcctatgtaggattcaaacacctaattttggtcaccatgcattctgtactgaacttcgtagctctgtcacctagggtacatttgactataagtcacagaatacctgactaacagtggtttaagccaaattaattttctcataagaactttagaggtgtagcagtttcagatttaggcagtgactgatgaatgtcataaagaacccaggctctttttatctctgcattctgccatcttcagaatattggcttttctttcttaggcttgtgacctcatagttgcaaaatagttgcctcagttccagtcatcacaactacatgtaaccatgttcaagacaagcaggaaggagagggaggggaaacagctcttcttatatgagaaaacaaaatgttttccaggagccccccagtagattccctccttccatcttatttgctaaaattgatgcacatggccatcctttactacaaggaatgctgggaaattatcttgttttttttttcaccatctacttttggaggtgggaaagggaaaagagggttcaatagtggccaacaaactttgtcacaccagccacagacaatacctgtgagtctggtattgtcagacttagtagtatccctttcattacaatttgtgtttttaaattatacaagtaacacatgagtatatcaatattgcgaaggataccaagaatactgttctttgtaaactatcttcttttccataatgggaaacaagcctaatactccagttaatccagcatgttcactgtttgtcctttgggtatattttggacttttccactcaattattagtttgtttgtccccttgcctgatagcagcatcctcatgcctcttcctcttcccatctagatcctgaccttccctcaaaacttggctttaatcccccctcctcattaaagccttccccgatcatctcagcaagaaccatctgtctacataagcttgcatgctcatattgcccatttaccgccttatttcctgcgttgtgttttgtgttctttatgtgtgatcgtggcagtcctcagttgactaagaaactgtgattggtggctctttgggttgcccttcacgttctcagtgccttccttacacaaaccgggtccttaataggtgattgtccattgctgcctctacctgcagcaaccatggttgaaacatagatggaaataaacacagcttgggggaatcttctctggaattagtttcctgcttatgtcttccgctgctgctgtggaacaaaatagttcttgttttagcaatagtgaatataaaggatgaagaaagtcatttgcttttgtggcttaaataggagataagtctctcgggatacatggtttatacacagcagccagggcaatatgaagatgtccctatctaaattgtgacacaaagcctctctgtggcctcttgcaccatgctgagggatagttttctctctcttattggcatccagtttgggttttcctggaagcagcaggtttgtctatgcatattcatcagtcaggactcctaaggagaccattctcccctcagtaggattccrgctatgctaatggtaaagggatttcttaggccatttcctgggggagtttattctgtttctatagttgcagaaagggcagagccaacttcttgcagaggggggattccctaaagcaaagggtattgagggatgtgcatttttatttcccccttacccaggcccctgggtgctcaaattctacctggtgactccagtgtggcaaagtgaacagcttgaccagctgaatactgaacaaattctttgctttcctaatggtatgtttgacatcccaaaggagggaatggtcaaaacaactagatttttttggggttgggggtggggggaagtttaggtcaattgcatggtttaactstaatttagactaccttttcttcttcacatgaatttggtaattgaaacatactgttctgttaaattcaagcacagatgtttgtttaatcacttacaggactatttccatatcatttcggttagagtttagtcatttgttgctcagctgtgttcagacctaaactttataaaaggcacgtgagtagagcctctcctagtgactaaggaacgtggaccttctctttccttttttttttaaattgaagtttttattgagataattgtaaattgacatgtagattcacttaagaaagagtacagagaggtcctatttacccctcaccccatttgccccaatggtaacatttttcttttcttttctttttgtttgtaagatagggtcttgctctgtcacccaggctggagtgcagtggcatgatcatagttcactacaacctcgacctccctggattaatcgatcctcccacctcagccccttgagtagccgggaccacaggtgcacaccaccacacctggctaatttttaaaaattattttttctagagttggagggtcttgctatgttgcccaggctggtctcgaactcttggactcaagcgatttgtctgcctcggccccccgaagtgttgagattacaggtgtgagctactgtgtccagctcatttttcaaagctatagtataatatcacaatcagtatcttgacattgatatactccactgatcttattcagatttccccagcttcacttgtattcatttgtatgtttgtgtgtgtgtatttagtctaacctacacatgtggtgcaatgtatacatttccaccacagtaaaggtataaaacagtcttatcaccacagggattcctcatgttgtccttttataaccacacctcgctcccttccaccaactcccccaaccctaccattcctaacccctggcaacaacgaatctgttttccatttctaaaattttgctatttcaaaatgttacataaatggagtcataaagtatgtaccttttggaatttgttttttccacttggtataagtccctgggcatttatccaggtggttgcgtatatcaactgttcattcatttttactactgagtagtagttcatgtatgtatcacaatttctttacatttgcctttggaaggacattggggctatttctagtttttagctattatgaataaagctgctgtgaacatgtatgtacaggtttttgtgtgagcatacattttcatttctctaggataagagcccaagagtgtaattgcgtgttatttgatacttacatgtttaattttataaaaagacaatcaaactatttttgagagcaaattaccattttagattcccaacaatatatgagtgatctagtttctttgcaccctggtccgcatttagtgttatcactatttttattttagctgtctgagaggtgtgtagtgatatctcatggtgggtttaattggcatttctctgatggttaattaattgaatatcttttcatgtgcttatttgtcatctgtatatccagctaagtgaaatgtctgtttatgtctttggctcatttctaattggattgttttttactaagatttatttatttatttatttggagacagagtctcactgtgttgcccaggctagagtacagtggcatgatcttggctcactgcaatctctgcctcccaggttcaagtgactctcgtgcctcagcctcccaagtagttgggattacaggcatgagccaccgtgcccagccttgttttttttactgttaacttttgagaattctttatgcattctgaatactagtcctttgagatgtggtttgcacatatttcctcccagtatgtggcttatcttttcatcctgttaacagtatcttttgtagagccaaagtgtctcattttgttaaggtctaatttatcggtttttttcttttatgagttgtgcttttggtgtcaagtctaaggactcactgcctagccctacatcatgaagattgtctcctgtgatggtttattttgagatggagttttactttgttgcccaggctggagtgcagtggcacaatctcggctcactgcagactcaacctcccaggttcaagcagtcctcctgcctcagccccccaatagctgggacaacaggtgtgcaccaccgtaccaggctcattttttttttttttttttttttgtagagacagggttttaccatgttgcccaggcttgtctcaaactcttgaactcaagagatgcacctgcctcagcctcccacagtgctaagattacaggtgtgagccactgtgcctggcctcctatgttgttgtttttttctaaaggatttatagttttacattttatatttaatgtgatctgccgggcatggtggctcatgcctataatcccagcactttgggaggctgaggtgggaggattgcttgaggccaggagttcaggaccagcctgggcaacataaggggactttgactctacaaaaataataatacaaaaaagcccggtgtggtggggtgcagctgtggtcccaactgcttgggaggctgaagtgggaggatggcttgagcctgagagatggaggctgcagtaagctgtggtcacactactgtactgtatcctgggggacagtgtttgaccctgtatcaaaaaaaaaaaaattctgtgatccattttaagttaatttttatttaaggtgtgagatttaggtcatgatgaacttttttgtcctatagatgcccagttgctcaagcaccatctgttgtaaaggatatccttccattgaattgcttttgaatcttttacaaaaccatttgagcatattcgtgtgggttgtcttttgagttgtctgttctgttccattggtcgctgtgtctatccgtctgccattgccacacagtttttattactgtatctgtatagtaaaccttaatatcaggttcagttcttcctcccactttatttttctttgtcaagattatttgtcttttttttgtttttcctaatatataaagaaaattactctttagrtcagttaataatcttattctgctaaaaaaattaaaagatagcttttagagactgcatgcgttagtttgtaatgctttctcctgaaagtaatggaatacctgactaatagaggcttaaagaagcagggatttatttttttcaccaagtaggaagcctggaggtgttaccagcggagggtgttcaggttcttggcatcgtgaacaaagaattggacaaaatgcacaaacaaagcaaggaaagaattaagcaacaaaagcagagatttattaaaaatgaaagtacactccacagtccgggagcgggcggagcataggggctcaagagcccctttacagaattttctggggtttaaataccttctagaggcttcccattggttacttgacgtagaccctatgtaaatgaagtagtggcccagcaatcagtttgactggttgcggaaagcaaccaatcagaggctgaagtgaagttacaaaggttacaccctatgcaagcatctgattggttgtggaaagcaaccaatcagaggctaaagtgaagttacatagttacactcctatgcaaactttctgcaatcaatcagagatactttttgctttctgcagccaatcagatactttcaattttccatctgccatgcagaaaaaggtgggggtcacggggagattgcaaagggagtagcctcccttgggtctttttgttacttaggtgtggaaagttgtggttttccttttgatttagttctaagaagtcagcgtaaattggccttaggttccctgcctccagaccctattctcttgcttcagaggtagatggctgctggcacatgtatagaggctcagcattgtctcagccagcatttctgcaatcttgcccattatcccaagatggctgctgcagctccagggatcatatatacatttcaaggcaagaagaggtgaatgaggggaacgtgacctgtatctgtcccttggctcaagagagcaaaaatccttcatagaattccaaaacagactcctaaaaagaggctgaggaaacaagtgcagtgtgtagctttttctggagtttttaaatggagacttgcaagggagaaggaatttgggaatggctgcacgaatcagctaccgtgagccagtggtttcaacttactttgggtaaaatctttagaattctgtttattgattggtgccttaagttgaattatttagagcaaaaatatcatagccttatgagaaagattctgcagatctccagatcttattgatttaaattttgtttttcactctactgatttaaatacattattaaatgtataaaatcaatcttattgttatattgagttgatggctaagaatcatgagcacaacactttttcaagttacttttagaaagagaggaaattagcttaaaaaatgtttgagattttctttgacgtgcctttttaatttgcacatttggggttagtttttgagtgatttagcttaattaataagtaatgatggctttcatgctcttatagtcttacattcttagatcccactatacctgaggcaattttgttattttctctgggaggttcacagtatctgctgaatgactttttcttctccatgaaagtacagcaaaaaagaaaagaataaatgaatttttaaaataaatattagacgagggaggaaaaaaccccacactattcacagaatagaagcaaattagtccagaacctgatcaggcagaaatatctaagaatgatagttttagataattctgtatcaaattttctattaacctaaaaaaatagaaaaataagttgtgttaatgtttattgaaatattaaatattaactatctctcttcaattcccaaatttccagtaactgctggtgactgtagagggatttctacagcactctcttttaatacttccccagcttttaagggattgagtctagatccaattatttggtctatttcctcccttccgggtcatggtggatgtttttgctattatatttgccaaaagcaaaagtaacaattcaatcctgatgacttaaacaaggagacatctattacttttctcaaaaagcacaaagaatatgaggcccattgcttaagggctcaggtgttgggtttgcattcctggattcaccacttatactagttgagtgaccttgggcaaattactaaaactctgtctctcagaatccccatctaggccagacacagtggctctgcctgtaatcctagcactttgggaggccgaggtgggcagatcgcttgagcccaggagtttgagaccagcctagtcaacatggtgaaaccccgtctctacaaaaaatacaaaaattagccaggtgtggtggcatgcgcctgtagtctcagctactcaggaggctgaggtgggaggatcgcttgagcccaggaggttgaggctgcagtgagccatgactgtgccactgcactccagcctgggctacagagtgaggccctgtctcaaaaaaaaaaaaaaaaaaaaaaaaaaaaatcagactccatgcataaaatagggatgatgatagaatatactcagagatttttctctctgaggattaagagcattaaaaaatttgcatatctcatttattaatgaggttaactatattttagtatgtttattggctatttccatttcctttttttgcaaagtgccttttcaaatccattgcccatttttctgttgggttttccttttcttagtgtacatatatatgagataaagagtggtctttccatatgtgtatacaatgtgtaatgagcaaatcaggcatatttatcacctcaaatatttatcatttctttgtgttgagaacattcaaaatcctctcttctagctttttgaaaatatataataaattatagttaaacatattcatcctacagtgctacagaacaccagaactcatttcatctatctactgtaattttttatctgttaaccaacctctccccacctcctctccttcccctttccagcctttaatactcccaatgattaagagaatttaatgtggccagacatggtggctcatgtctgtaatcccagcactttgggaggctgaggtgagcagatcacttgagcccaggagttcaagatcagtctgggcaacatggtgaaatctcgtctctacaaaaaatacagaaattagcagggtgtggtagtgtgtacctgtagtcccaagctactcaggaggctgaggtgggaggatagcttgagcccaggaagtcaaggccgcagtgagctgtgatcacgccactgcactccagcctgggtgacagagcaagaccctgtctcaaaaaaaaaaaaaagtttaatgcttctaaagtgcttagaacagtgctacaattgttagctattgtggcaatagaaatgacatttatattggcttatctagctcatggcttatctagtaagctgtcccattcttaccaggcacctcacactacctgcctttgtcttgtggttgtcaagcatctgggcttttgagtgtaggctagaaagaaacaagagactgctgtgctggagttcwgaaatagaggttgcaaacagatcaacagctcctgatgtagatgactatagccagcttctcagtttggattaactttacggtttctgtagcggccttgataactaattgattaatcaacttatgcatgtgataaaattgcccttccaatttttagcaacgaggaaggggtgctgattgtagctttgaatttgatatgaagcagagtctggatttggctgccacctttccaacagtggtggaatgggaatcagggagttgagatgccaaggagcactgacctaggatctaggaatagttatgttcctaactttatcatttgctragacatttgctaatttccttaaattgagactgagtaccaatacacagtcactatggcaaaggcaggttgccatgccatcttaagaggctataatggcaaatctcaagtttttgtaagtgtctgggggtgtgtgtgcatgggggcaaacattttaaataagtgccctatggactgttacatcatatcaaacaaattctcaatgcgttagtttctaaggtatagaattctgaattgaaatttcaagctaatactctaatagtgcaaaaatggagttttgcatgctatgtcaattagaataacaatagcaattggcatcactgracttaaaaaaaagtgtgtgtgttttgttgttttgagtttgaatgtgtgaattcacaactcacaagccaagagttttggagaggttttagtaatagttcctttcatgctaaaagcattgttttaaataattacgtgtggctgattttattttatttagcaagagaattggaaatgattaacaggtatctggataatactctttgggtggagaatttgctcataaatttagctgcaacttggttgaatgaactgcattctgactttgatatattttggtttcttctcaatttttatagcattgttggattttatgggccccacatgcttccacacaactctgttggccttggtggattttaatgtttaaaattaaaaggccccatcatatattcttagttattgttactattatagctggacaaagatatgctggtaagagtttgtagcaattgtgtgtgtgtgtgtatgcaggggttgggggaggtgggtttgcagtggttgctgcccctcaaagaagcaagcatgtagctatccaatgggttcttcttacccactgcccagatagagccgatttctcaaaacagaggaattgcaatagagtttcatacactcagagccagctaaatgggagaccagagttttattactcaaatcagtctccctgaaaattttgagacagaggtttttaaaagatagtttggcaggcaggggcctaaggaatggggaatgctgattggttggtttggggatgaaatcatagggaattgaagctgccctctttcactgagtcaattcctggatgggggccacagatcagatgagccagtttacctgtctgggtggtgccagctgatccatcagaatgcagggtctgaaaattatcttaggttttataatagtaatgttatctatgggagcaattggggaggttagaaatcttgtggtctcaggctgcgtgattcctaagccataatttccaatcttgtggctaatttattagttttacaaaggtgatctggtccccaagcaaggagcaggggtttgttttggggaggggctgttatcatctttgtttcaaatttaaactatcaactcctcccaaagttggtttggcctatgtccaggaatgaacaagagcagcctggaggttagaagcaggatggagtcaggtaggtcacatttcttttactgtcataatttttgcaaaggaagtttcaggcatacctcttttgaccttgttttttccagccccttctctttctcttgcagctgtggtagtgagtaggaaaggaaggttagccttgtggagggctcttgaatttcaatccacctcttcagcctcctttagaaatactagcagaaatgagcctcataccccgtaagatgttgtttaagtgtctgattttgctatttaaggctctctatggattgatttccacattaactcttcaaagttcatgtcccactactataggaaatgcccctgtatctagctgggtctagtcctggtccttcaacatgtttcagtgtcttttactctgcccaaattcagtgcatggttcaaggttcactttaagactcaaattctacatgattttttctctggcatcgactgctccatagtatactcctttgaattcctgtaaccctaatctatatacatagggttggctgtttgctacagtggattgcccaaaaaataaatcataaaaatagatggtatgtttaagttgaagaactattgactcatgcctatcaggccctgtgttaaatgttgaatgtttcttattcagcatttaacatgtggccctgcttccatggaactaagaggaacagtgttaaaagtgacatttaacccaggaatgaagatcacataatttatgtatgttcatggagcaaatattattatggcyaagaatgtcataaaagtggagataaatctataaatctatttgtggaaaagaacatataagctcttgggttggttagtaagggagtcatacttggtcccttttttttttagacggagtcttgctctgtcacccaggctggagtgcagtggtgcgatctcggcttactgcaacctccacctcccaggttcaagtgatcctcctgcctcagcctcgtgagtagctgggaytacaggtacgtgccaccacacctggctaatttttgtatttttagcagagacggggtttcaccatgttggccaggctggtcttgaactcctatacttggtccctttttattggagctctgactcagttctctctaaaagccaataccaagtccttcctcttgagaaaacaaaataataaatgctaacaggcaggcacaggcacagatattctctcacttagtcctaaccactgtctcgtgaagcaggtattattattctcactttagacatggcaagcctctggagaagtaaagtgastgctccagcatcacatgacccatagaggcaaagctggaaggtgaatgccaggcttctgatgccaggtctcctgtcctatcctttatgaccctattactccctggtgctgctctccattccaaatgtttgattattagatttaagggggtctaagccaggtaacatgaacagggaaagatcagctgacaatatctgattgtttgaaaataatccacagcttatgttctattcattcgatagatgctcattgaacacctactatgtgcaaggccctatagtccttactgtcagaaagtacaaagcctagtataagatgcaagtatataaacaggaaactatagtataatatggtgagtacagtgatggctgtacaggaattatgggtatagaatgaatgaatcaagaatgaaccttgtgagattgtttgtctgtaccactgctgccctttcaaggagcacgtgtattattttttagaaaacattttattctctgttctaggcacttggcctggccctggtgatacagctgggggtgggggaggggaaagggtaagttcctaaatagttaaagagagggtaaccttccagactttaatagaagatctatgcaggaacagaatgttctgcctctggcagtcagagaagactttaagagatgacatttagatgatcttttatttatttcttgcatttttctgagcttgggttattttaaggaaattataaatactagaaactcaagagttttgatttgcaataccttacctagagctgttcaaagagccatatggttcacaagctatttctgtccccatgattctgctgaaaccattctcgtcaaggtcaccagccacctccatgttgccaaatcagggggtcaagtctcaagcctcgtcttcatttgaattattagtagcatttaacacagttagtcacgtgttccttcaaatgctttctttaggtagtttccatgatactaaactctcctggtgttcttcccatcttaccagctgcccctttttagtcttgtttgctaattctaccccatctccctgatcacgtaacattgggatattttaaagctcagtcttggacttcttttctgcactatcatcattcattccagcactgtagccttaaataccatccatcaactgatgtatatcaaatttttatatccagcctcgacttcttgcttgaacttcagactcccatatccacctgctagtccacatttctacttgcttgtctgagtggtatcttgaatgtaacatgtccaaaatagaattctggactcctgtgcctgcctcctacctccagaattctcatttaagttctctcccaccattctacatcccagcacctaaaactccattcttctcgttgttcaggccaaaatacttggggttgttaataactcatctctttttccacaccctacatctaatctattggtaaatcctttttgttctaccttcaagatacatacagaacttgatcacttccactgtctctacttctattaacctggtctaggccactatcatttcttgcctggactattgcaatatccccagttctttgtattgtggccagagcgatcctttctatgccctgctcaaaacaaaatccagtgttccttaaacctctaaggcactggcccctgtttatactcttaacctcatgtctcaagttagaggactctagacctttcaaacaccagaataatgtggtgtcctgcaaggtaaggcctaacaggggaggttgtatgataatccagagtgcaggagtgaatggaggggagaagggactctcggtgactgcagactactgtttcgtgaaacatgaagatagaggatgggagggagtcaagatggtaacgaaagcaagactaagggcactgaaggaggcttttcttcctctaagagttgaaagacttgagtgtctttatgagttcattgaaaggaggccatggaagggagaggctaatgctgttgatcactgacttatcagggacacaagtaagccagtactgcaaggagagacagttaggacccacgtgaatatggaaatcataaattgactgcagtcacttttgtttgcttagttgcatggctttatcccaccacttcactctgtcttctggccagagccttctaattatcttcagtctactaccagcccttttgttatgcctgccagttaatcccagtgccttctcccttgttctgctccaggctcctgaacactgtggatgtgacacaggtcctgagggtcacattgcttcctggatcactattctttgtctcttaattcctgccctcctcccaggtgctttaaacttatctactccaagccagttgcagtggctcatgcccgtaatcacagcactttgggaggccagggtgggtggatcacctgaggctgggagttcaagaccagtctggccaacatggtgaaaccctgtctctactaaaaatacaaaaattagctggttgtggtggtatgcacctgtaatcccagctacttgggaggctgaggcaggagaattgcttgaacccaggaggcagaggttgcagtgagccragattgcaccactgcactccagcctgggtgacagagtgagactccgtctcataaaaataaaaaaataaaaaaataaaaaaaataaataaaataaataaaaacttatctgctcctgtgacatttgtttgatagggtcagaggctgtgaaactttagaagcatacatgctgtctttggaatttaaaaaatgtatctacatgccaaccgatccattatttacttaatatctctctgtgaattgaatcacttttggaaaactaaaacatatttaaaagggaaactttatatccttaccataaatgaaaaccacatcatttgatctaagtggaaggtcatggtaagaaaaaaagaaatgaaaacaaaacagtgtttttagatttgatgcctacaaaaagttaggagcctgaggcctgctttcttttttataggcaagtatttgggaggtatagtcagtactaccaaattgagactcacccttgccttaatcgaaaggaagaggatagaggaagatgaacattcttgcgcgccctctgaaatcgtctccattaccaactagggtggcatccctggaaagagtgaggcccgggtgtttgtgtgcagagacagcgcaagggttggcatgctgtggcttgcttaatcagtttcagtttaagattggttgaagatcttcatgttaagatatggcagtggcctctttaaaagtcttttgtgcccggcgcagtggcttatacctataatcccagcactttgggaggctgaggcaggcggattacttgagcctgggagtttgagaccagcctggccaacgtggtgaaaccccgtttctactgaaaatacaaaaagagccaggtgtagtggtgggcacctgtaatcccagctacttgggaggctgaggcaggagaattgcttgaacctgggaggtggaggttgcagtgagctgggatcacgtcactgtactccggcctgggcgacaagagtgagactctgtctcaaaaaaaaaaaaaaaaaagtcttttgccttcagaccttcccccttccaacccaccctgcccactgttagtggatctgtcttcagacgtgctgcctcatattgtccctgtgtccctcgggaaactttaatggctccttgttgcctatttgatccagaccacaatgttcaatttggcaaccagtgaatctaccactcaagttttatgggcttcctgtatctgcagcaatatgttagatggtgaggggacatagaaaaaggcagaaatatacaccatggtcccagagtttaaaaaatgtgtcatctagttgagacaaatcaaacacgagtatgtgcacatattatggtgcatgtacmcgacgaagggctggtggtcagagaaggcctcatgaatctgcccatccctgggcttggtcatcatatagctcatttgtggtgtgtgaatctcatgctggctggggttttcttttttattgtggtaaaatatacaaagtataaaagttaccattttaaccatttaaattatacaattcagtggcattttgtacattcacaacgctgtgcagctgtccccactgtttcaagaaaattttcatcacttcaaaggaaacctgtacccggtaagcagtcactccccattctttcttcctcccagtccctgccaaccattaatctgccttctgtctctatgaatttgcctattttgtatatttcatataaatggaatcatataatatgtggccctttgtatctggcttttttctcttagcataatgttttcaaggttcatccacatggtagcacgatatcagtgctttgttccctttggcggcagaataacattccattgtatggatataccacaactgtttaaccattcatcagctgatagacatttgggatgtttccaccttttggctattgtaaataatgctgctatgaacatttatgtgtaagtttctttctgtggatgtatgttttcaattctcctgagaatatactgagaagtgcaactgctggatcatatgatgattctatgtttaacttaatgagaaactgccaaactgttttccacagcagccatactagtgtacatccccaccagcaaggtgtgacagttccaatgtctccacatcctcaccaacatttatttttcattttaaaaaaattatagccaccctagtgaatgtgaagcgttatcacagtatatgtatgtatatatgtatttatttttgagacagggtctccgtcgcttaggctggagtgcagtggtgcgatcatagcttcatagctcactacagcctcagcctcgtgagcgcaagcgctcctttcacctcagcctcccgagtagctgggactatacgcatgcaccgccatgcctggctaatttttgtattttatgtagagacaaggtctcaccatgttgctcaggctggtctcaaactcctggactcaaatgatctgcctgcctaagcctcccaaagtattgagattacaggtgtgagccactgtgccaggcttcattgtacttttgatttacatttccctaatgactaatggcattggacatattttcatgtgcttgttggccatttgtatatcttctttggagaaatgagggtcgtggtcaactcagtataccactggaggctatatgagtaaacagcaaactttctcataaatgcagaatgttggcaaactgacaaactgcgtctgccacccagaaggaatgctgagggcagttatgccccaagtgcagtgtttattgtgattaggtacatcagaagcctgttagtaataatatgaacctgtgatcaattaaggagctgaccaatcattacctcctcctccctactcattctacccaataaatacgaagggctgtggaagctcaggggggctgcctttgctcactagaagcagggagctctcttcttccccggacccttcctttaaaacagtttcttttgtcttaagttttcatttctatgttcatcccccttcgttcagtctcgtaatgacggtctcaagtagtaacaatagtaactcttgtaatgacggtctcaagtactaacagtagtaactgttgtaatgacggtctcaagtactaacagtagtaactgttgtaatgacggtcttaagtagtaaaagtagtaactgtcgtggtgacagtctcaagtagtaactgtggcagtctaccacatcctttgcccatttttaaattcaattgtttgtgtttttgctgagttgtgagaatctttatatattctatataatagacccttatatgatttccaaatattttctgtcattctctgggtttctctgttttttagaaatgacatctcactctattgcccagggtggtcttgaactcctgggccccagtgattctcccagcttagcctcttaaagtgttgctgggatacaggcttgagccacctcacccaaacttcattctatggattttttcactctcttgatagtatcctttgacacacagttctaattttgatgaagcccaatttatttttccttttgttgcttgtgcttttggtgccacatgtatgaaacccattgccaaatccagagccatagtgactggcttctattctagggttgggagctgtggcttgcccaaggccatgtccccaaagtctctcacaacttagcacccaatggatgctcaccagatgtttgtagaagggatgactatgtagtgggatgtgagctgacccttggtggggagaggggtttgtgtagaagtatagcctgaccagggacatgactttgaatagacattaaggtaccttataagctgtaagatgtggtctgaccaaagaggagggtacacatgaacaaattgtggaattctgggggacaggtagctgagtgaggccttcaacggtggcaagggctttttccatgtgattatggaaacctagatccatggaggaaacttgtgagtagtggagaaagctcctcaggggaaggaaggctggctgtgacttcatctttataccatactctctagaatagggcctggccggtattaggctttagtaaatattccagtggcctgatgagggagacttttaagatatttacatgagaggcttttcatgatatagtcctccttatatattctactctagctcgccctccttccaaacttgaccttgactttctttttttaccagattcgcccctctcctaggtgctgtcagctcagctgcagtacatcactcctaaccctgcttggaacatccttgcctctcctctcctatctaattcatctcattcctccaggcccaagacagtatccagttatccacagaacctcaacactactactccagcacatcagtgtatggctctagtcagccatacacttagctatacacttaccagagcttagggtcacatgatcttaggttcagatgcaggctccactagttactgtgtaagcttgggtgggccagtctccctctctctgccttggtttcctcattggaaaaatggcagtaataacactgctaaaacagttctgtgacagtgaaatgagataataaatgagatataaaacccttagtaaagcatccagctcatagtaagcggtcaaaaatggtagctgtactgttttctagttgtttgctgtatttggctgttctcgtgttgctataaagaaatacgtgaggctgggtaatttattaaaaaaaaaaggcttaattggctcatggttctgcaggctgtacaagaagtgtggtgttggcatttgcttctgatgagggcctcagaaagcttccaatcatggtggaaggcaaagggagagccagtgtatcacatggtgagagtgggagaaagagagagaagggggaggtcccagactcttttaaacaagcagatctcatgtgaaataactgagcgacaactcatttatcactaaggggatggtgtgaaaccattcatgagagatctgcccccacgatccaatcacctcccaccaggcccccacctccaacactgagaatcacatttcaacatgagatttggagaggacaaacatccaaacggtatcattttatatatctaaatcttgcttcctccgcaagattgtgggtttttttcttcagggcaggggctgagtcttatgcttattttaactcgtatatttggcacaaagttaggactatagtaagtacttaagaaacatttgttggttcgaggtgactttgtgattactcggagttacttgctttaggagacagtatatcattattgaattctatattattctacgattcattttctgaaacccaacttttgctttgttttatggggatctgggactgacttgtggtaatctgattgtatgtgtgagcaagtgtgtgtgtgtgtatgtgtgagagagagagacagagagagagagtggagggaatggtggaggtrgcgacaattgattccctaagggacagagccagctacagctcaccatcctaaccactgcatctagctttcctctcccagccctagagctgggctgttatctgcccagggcagctgttatggccctgactcccctggggagggctgctcaggccttcctcattcttccaggctgcctttaccacaaaaggaaatgaggtatttttgaccttatcagacttctctgccaaggcatcatgttttgcaagaggctattgccctggctatatacagtcctgggcagtgtgctaacattaaagaagcaaattcaggataatggttacctctggataagggaggcagggctatgagctctgagataaagcttcagttatctctgaggtatttattttttatgcagggctgtggggcatatgagtgttcatttattatcatgaacattgtataatcttgtatttgctgcttatcatttctatgcatgtattatccataaatattaccgtatttttcgagtattttccagctttacatatgtgtcgtgaaattttatgtgtacttcagctacctatattttttgcctggcagtttttgagatttgtctattttgtttgtttgtttttttgagatagagttttgctcttgttgcccaggctggagtgcagtggcatgatttcggctcactgcaacctccgcctcccaggttcaaacgattctcctgtttcagcctcccaagtagctgggattacaggtgcccaccaccatgcccggctaattttttatatttttagtagagatggggtttcaccatgttggccaggctggtctagaactcttgacctcaggtgatcctcccgcctcagcctcccaaagtgctgggattacaggtgtgagccactgtgcctggcctagatttgtctatattgatacgtgtaatattagactctgtattaatattccatgttataaagagatgtatcttttctgctattgggtagacatttcagtggtttcctatttttcacttttgcaaacaatgctataacaatagtctgatatgcagttccttgtgcctaagacaagatacttctgtaggagtggattggctaggccataggacatatatgcctctctctttgctcgtattgccacatcgctcctcagagtgattgtcctactttaccttcccaccagcagtgcacaaatgttgatgttggccatgtccttgccaacccttggtagttgtatctgtgctttctcctctctctccagatcaccagaaaaggtgggagttaaggtttttcaattaaaggagaatgtcagctctgaagaatttcctgttacatttactttaatgaggaaaagattttgttctctgttttggtgaaaataatgtttagacttctgtggaaaacagttacatacactttttattctgaagcagagcagttttttctttctttctttctttttttttttttttttgctgtttgcattcttggcaaacaagtaggaaagaccaattagcaagctaatgttctaaatatttacttgcagtaacagtcattttttaatgttttatatagcatggaacattaggtttatgtgtactgcttttcaatgttttgaattgattaaaatgaattaaatttaagaatgtgacacaactttatggataaagattgatcataattatttgccactttatttgcattttgtgagggaaaaatacatggtaagaaaatgtgttgacattttacaaacaggttagaaaagtcataaagagtaactttggctattttatgttgtctcttatgttcacaggtgggaaaggagaagtttcacaaatcccaacattggggcttttgcaacartgttatgatgttggtgagtgatgaaaagcctggaataggtggagaaccacttctggggcaaaagataaascctaaatrtagcatatatcctaaaggagatggaagtgatgtaccatcatgggtagcctttgataaacaggtaagtcacatgacactgggaggaatgcagtcttagcattttacagatgctaaataatttagttttgagaaagtaggagtcttcagtgtaaatgttaaggctagttctttttctttttgccttttctacttattattgcctttatttttagtgttttatttttagtgtttctccctttgtctttatttgtttaaattgacaaacataattgtatatatttatggtgtacaacatgatgttttgaartatgtatacactatggaatggctaaattgagctaattaacatatgcgttacctcatgtgcttctctttttttgtgatgaaaacactattgtcttacaattttcaaatatacaatacattgttattagctatagtcattgtgttatacaatagatctcttaaacgtattcctcctaagtgaaattttgcttcttttgactaaggttagttcttctgaaaagataaattcaagaacaaaagtatcctaaacaaagaaaaatcattcttgctctgctcttttttatcaggcacattggttgcagaatgccaaatgtttatctttcttggctaatgcttattaacctttctctcatctccttcactggacaggataatctgtcctatagaaactaagagtctcgtcagattgtcacttttgcttttgagttgccattgactaaataattgtgtttgagtctgaatgtggctttaaataggaatagaaaaatgccttctcttcttttctccatactaattagtaataaaccgtagtaatgattccccatccctaagggctaaaatgtgatgtggcaagaagaatagtgaaaggaagtgatgccattattagacaagagttggaattttttaatgtatatgtctatacacatacacacacatatacatatggacatattggcagttagaaaaaggaatgtatttgaatattttttaaaaaggctaagatcagaggaaagaaaaggcgaccagctatatggatatgctgtgtttatcagatagccctgtatcacagcccaatgttctgttctccagaaagaactagttattagattattttagatcctgtaattgaaagatagttcaggactagataaagaattgaaaccatagcatgctaagtttaccaggtggtttttagcagcttttaacatggattggttggcagtactttgattctaattaaaatgtcctcaaattgacacatccccatgtcatctgtgatagggtagatcaattagagtgcacatttttttttgaagcctagttctgacacttatagtgatctaacagaccacagggaggcttccttcctgggaaaccatttctcctttcaacatgggccaatattcttttcttggattattttcagtacctggctcagtgctggacccaaagctcaaaaacaattctgggctgactgacttgggtggattatgcatagttttctgttactctcaatcttataggatgtttactttgcatgggccaaagaaaagattctatttttacctcatgtaaaatagagggtatcgacaatattttaaactaatccactactgaataagtatcgtaggccacaatgtattaatattaaactattctcttgcatttcaagtcgaaaagtcatttcatgtttttctcaatatttaatatgtgcctttcaagcctattttgcaggcctttaattacttatgtagaatatttcatgaatctggaataattttagcttcagactacttgagtaaacgaagagcttgctcatttcagggctaactaaatgcaacataattctttcagttattttgttggtcaacttctattaaatattcattgagctttaaatgagacactaagactgaaatatttacgtgctctgatgagactgtgaactacagactagatcctggttaataccccaagcaaattataaagcgctttctacattagcggttcaacaaaaacaagtcaacacttgttaatcatttgtcttaaaaatgagacattttcagtgcaccccatcccagccgcccggtcccggcccctcactctcctttgccgcgctaccaccatgctctccgtccgcgtcccgctgctgcacattacggacccgcagcagctgcagctctcgccgctgaaggggctcagcctggtcgacaaggtgaacaggccgccggccctgagcgggacccgggttctggccagcaagactgcatggaggatcttccaggagcccgcgagccgaaaactaaagcagctgcccccggcgtggaggatgagccgctgctgagaggaaacccttgccgctttgtcatcttccccatcgagtaccatgatatctggcagatgtatgagaaggcggaggcttccttctggaccaccgaggaggtggacctgtccaaggacattcggcactgggaatccctgaagcccgaggagagatattttatatcccatgttctggttttctttgcagcaagtgatggcataataaatgaaaatttggtggagcgatttagccaaatagttcagattacagaagcccgctgtttctatggcttccaaattgccatggaaaacatacattctgaaatgtatagtctccttattgacacttacatcaaagatcccaaagaaagggaatttctcttcaatgccattgaacgatgccttgtgtcaagaagaaggcagattgggccttgcgctggattggggacaaagaggctacctatggtgaacgtgttgtagcctttgctgcagtagaaggcatcttcttttctggttcttttgcatcgatattctggctcaagaaacgaggaccgatgcctggcctcacgttttccaatgaacttattagcagagaagagggtttacactgtgattttgcttgcttgatgttcaaacacctggtacacaaaccatcggaggagaaagtgagagaaataattatcaatgctgttcagatagaacaagaattcctcaccgaggccttgcctgtgaagctcattgggatgaattgcactctaatgaagcaatacattgagtttgtggcagacagacttatgctggaactgggttttagcaaggttttcggagtagagagcccatttgactttacggagaatatttcactgaaagactaacttctttgagaggagagtaggcgagtatcagaggatgggagtggtgtcaagtccaaaagagaattcttttaccttaaatgctgacttctaaatgaactgaagatgtgcccttattttgctgatttttttccatctcataaaaaaaatcagctgaagtattatcaactagccacaccatgaattgtccataatgttcattaacagcatctttaaaactgtgtagctacctcacaaccagtcctgtttatttataatgctggtagtatcaccttttgccagcaggcctggctggctgtgacttactatagcagtgacaatggcagtcttggctttaaagtgagggttgaccctctagtgagcttggcacagcaggattaaacagtcatttaaccagcacagggagttgaaagttgaaagatgcagcctcactgcttcagcgcagatttcaatgtttacttaaatataaaactggcactttacaaacaaataaacattgtttgtactcacaaggcgataatagcttgatttatttggtttctacaccaaatacaaagcattctcctgaccactaatgggagccaattcacaattcactaagtgactaaagtaagttaaacttgtgtagactaagcatgtaatttctaagttttattttagtgaattaaaatactcgttaaccaactttaaagtcagtcctgtgtttagatagatactagtctgttggtgccagatagaagacaggttgtgtttttatcctgcggcttgggtagtgtcctgggattctctgccccctctgagtagagtgttgtgggataaaggaatctctcagggcaaggagcttcttaagttaaatcactagaaatttaggcgtgatctgggccttcatatgtgtgagaagccgttccattttatttctcactatattttccccaatttctagttgataagaaaaaactattgaagagtttttttttcttttttttttcttttaatacaagaatatgtctctttttattgaggtcttttttatgtgctatgattaaattaaatgagataatgctttaaaagcacttatatgtgggagctaaggtagtattgtaaaacttcaagtcatccttaaacaaaatgaccaacctaagatcttgctcctgttaagtggtgaaatcaactagaggtggttcctacaagttgttgtttattctagttttgtttgtgtgtaagtacgttgtgtgagttaattcatttatatttactatgtcttttaaatcagaaattttttattatgtatgtccttttagattttacctgtagttcatactttaaaataatcacccagtgtcttattctagcattgtctaaatctgagtattatctaggggaatcttaaacttcagtaggaaaccatgagttattcatacagtttccattcaaatattaatttcagaacgaaacaaaatttttttttttttttgagacaaagtctcgctctgtagcccagtctggagtgcagtggtgcgattttggctcactgcaacctctgcctcttgggttcaagcaattctcctgtctcagcctcccgagtagctgggactgcaggtatgtgccaccacacctggctaatttttttatttttagtggagatggagtttcaccatgttggtcaggctggtctcgaactcctgacctcaggtgatccacccacctcagcctcctaaagtgytgggattacaggcatgataaacaaatattcttaatacggctactttgaattaatctgcctttatgtttgggagaagaaagctgagacattgcatgaaagatgatgagagataaatgttgatcttttggccccatttgttaattgtattcgctatttgaacattgtcctgttctattgttagtttccttcatcatttatggtatagtcaatttttaaatctctgtaatataatacattttcctatcttttaagttattgttacctaaagttaatccagattatatggtccttatacttgtacaacattaaaatgaagaaagccaaaaaaaataaaagacgttttcaacttgttgccagtttttccagtagcttttaatcctagcaatatatctagcattacactctcaaataatacaaagtaaaaataaagacagttctttggaaagtgtattaaaattaatatttgtagtagatgctctttgtgcccacccagatccatgctggggtggtgatcccccacccccagctgtgacaaatggtttgacaaacagctcacacctgtaaccctctctggagacttgctcttggctgatgggagttgcatctctcagagacacctgagaggttacactggcccctttcccctaagagggggcagctaataactgatttatcaagggtaaaaaaaggtcagcttccttgcctgaaggggggataattctttgctatgattcaggctccatagcccctcgtgcatcagaccaaggctacacttgacctgagaatgcatccttgcttgcgcggttcatttccctttcctttgctgcttccctcactcccttacaggtttctcccaagagtctgcccttaataaatcacatgcactaaaatccctgtttcaggctctgcctctatggaaccccaacctaagacaacattccrggttttaatccataattctgaaagcaaccaccaaaatgccttgctcaagtagactatcacattacaagcagagaaaatgccttttgcaatcatgaaaaggagccagtatttgttatcccgcatggcccctgcggcagacacttctagctgtttatcctttatgcattctacccttccttcttataggcagaacggttttatgcaggctggaattgtgcccacttaaatgtgttacctccccaggctccttgcagctagggctggccgcatgactcacttttggccaatgatatatgcattaagatttattgggtggggctcgtgggagagttactatttttctaatgaaaacaggctcagcaggtatgattttcctaccctttgccctccttttgtttttcctgtctggaactagtgttaccgaaccaaactgggtccatttacctgcatgcaagggaaagccaaacgccaaagcaccaggtttttgcagcaagaaaggtttattgagttgattggcaaggagacaggaggaaacactcaaatctgtctcctggagctgggggctgggtcgggttttataagcatagtgtaatgaggtgtgatctgattgcatcttgcaatgaggtgatgctgggaggcataatctgattggatcctgctatggggtgacaccagagcacgatctctttggttcctggatcctgccatatggggtccacttcttaattcagtccctgttccttggtccaagcacttaggtttcacctgtgcacacttggttcaactgggcatgctcgggttgtatgaccttcaaccctggggtccacggcaactgaaaaacaactcacgattttgttttataaaagttgaactagattagtctggtgcggttacactaggacataattcctagggcacagcagctatcttgtgagcatgacagagataaaggaaacctaggtccttgttggcatcatggagccactgtttaaggcccaggctgcctctctttggacttgtagttatgtgagaaaaatcaggctatatttcagagattctcaacctagcaaggtatttggaaatatgtggaggtgttttgagttgtcacaatgatcaggagcagggccagactagggtaaggcaaatgaggcacttgccttcggtgcaacatttggggtgccccaaaactcagcaattaagctagataatattttattatctaattattattattatctgttattaagctagtataatattttaaaaaatcaaattaatgccagaaattcatgatgaacaaaatgccaacattttaaataaagacaagatcagcaactgtgccatggaagttatattggagcctgaggcaaaaggaaaaatcagtaatactgatccaatcttcattaaaaatttggcattttgatattttgtttctcctggatattttgcattaattttgttttattttattatttttttttgaggcggaatctcgctctgttgcccaggctggagtgcagtggcacgatcttggctcactgcaacctccgcctcccaagttcaagcgattctcctgtctcagcctcccgagtagctgggactacaggcacccaccaccacacccggctaatttttgtatttttagtagagacgggatttcgccatgttgaccaggctggtctcgaactcctgacctcaggtaatccacccccctcagcctcccaaagtgctgggattacaggcatgagccaccacgcctggcttgcattaattttgatgttttaaatcgcctcaccctagggccagccctgaccaggaggtgctgctaccattgagtatccaggggccaagtgtatattttatatcctgcagtgtggggaaggcaaccctacattggggaaaaattgttctacctcaaatgccaatactgtttccaccgagaaacacagtgtgtgtactacttgcttaaaacccgtagcattgggagaatttctaaaaacaggcaaaagaattttgcttaatactgcacccacccttcaaagacttcgttatttcattgaattcatttaaataaaagcagactatgatggggccaagacaaaaacaagactattccataatcataactgtctgaacacagaacacgaacactgtccaagtcacaaaatgcatcactcacgccagttatttccagtcatcatcccagtacctccatgagtaggaagcaaatatagacggttgtcctcatcatataaatgaagaatcattctcaaggagaaatggagcaggaaccagagtctgagactgggtgttggaggcactgattctggttctggtcccgccattaactatatgtgtgattgtggcttagtcactttacctctctgagcctcagtttccttaactataatgcaggacttggctagctgatctgtaaggcccttttacctctggcaatttacgtctaaaacttgactaaagtcaaattcagcttgtttatcctagaactgagcccagaccctggatctaatggcctaggactctctaattacatcaggcacccactacttcattattaattgaaatttggcatttagcagtttatgctacgctatggtggctgtataagatctatagttagctgcttttataaaacgttggaatatttagaaatatacaaatgactgaatgtttttatatgactttcgtctggaagttaagccccatttacatagactctacaattttgctctcatttttcatttgtcaacagctcctagttagcctaatttgtttgctatttcacaaatgactcagttatagtaagtggcaagataaaagttgatcttatgggatatgcatacatttgaaaatattatttctttttttttccatctattgtaaacataatggttataatcaaaactactgaccgcacaattgaattttaatcacttacattaattgacatcgagcttgtaatgagctgattatttatgtagctgattatttatgtagctgtgtgactctatgatttgaacaatataaaaataaatttttaaaatataatttggtcccctgggtcatcttgatttttttttttttttttagattaaacaagttagtttattattcatttgcagcaagggaaaaaacataccctaagcaactgtgggatgtctaatgaagcaggtgttagaaaaggcttattataggatttgggcttgtgttaagtaattgtggggagtgattaaggaagcagggctttgctctggattgggtgctatcaggaagtaggggtacatctacaactgggtatcttaataaatctcagagggagagaacagactagagtgagtctatacctataattgggagagaagcagctgtcacttctgtgagccaggagagggggatgtttgacatttcatggctggacaaggttcattttctgtgtttagatgtgactgtggagtggtcttggttttgtcttgatccgtcacggtcacagagtggccttgtctgatgttggtggtctctgaaattattcttgtttagcaggagaacaccaaggcctagctgtggatgccaggccagcttgtaacagcaccaagaccagctgatagtataggccggctcctggatgtcaggggctacttttctctttcttacccagtactagctagaatttttaattttcctgcrgtaggattaacgaatgatcaggtacattataatttcacttgcttaacaaagaacaatacgtaaatacagattcttgaagttttgcctaaagccagttaggaatgttataaaatataatcagaatatataaaaataaaatacaattaagcttttaaaaaaactggaaaatacattagatataccattaaaccatacccgaaatttcaaatggaaatctttctataggtttatataattctcagattatctgactcttgctattaccatgtcataaaagacaccaacatgtataattataagacaacgtaattgcaatacatttgccgttttaatcccatgttttacatcacaagtacacagatcttcagctatttagttttagagaagaaataaaaaatcttgcctgaaatcaaccatgtcataccccaaattctcaactatgcattctgcatttgtcactaagaataaaacacttagtctttaaatttatattaaagtgataaagcttccaatttcattgtattatgtaggtttctttaatcttcttttgaaattcaaaaggcacttaataaaaataatccccaagtctggaataaatgtttttggaataaaaagaatgagaatcataaatgagccttttactaaagaagagagttcttccttccctcttttctaaaacctagaatttagctatttgacaacattttaaggcccttccctcaggccaaaactttttatcagtaactaggcctgtggcttattctgattagtccaaagttaaaattgtctttttgaactttaacttttgtaggtaccactacatccccattagaatggctataattttaagaytcttaccactaagtgtcggtgatcatgtagagaaactagaaccttcatacattcctggtaggaatgtaaaatggtgctgccattttgaaagacagtttgacagtttcttagttaaacatatacttgctgcatgacccagtaattccacttctatgtatccatctaaaagaaattaaaacatgttcacacaaaaacttctgtgtgaaatgtttatagcatcattattcgtagtagccaaaaaacagggaacaacccaaatgtcccttaagtaataatggataaacaaaatatggtatatctacataatgaaaactatacaacaataaagaaacctaatgatatatatgttacaacatgggtgaacctcaaaaacattacactaagtaaaagaagccagacacagaagacttcctattatatgattccatatatatgaaatcctagaaaaggcaaatacataggaaaaagcagatcagcagttgactggggctgatggtgggagaggggacttttgtgggggaagtgatagaaatgttttaaactggattgtggtgatgattacacagctctgtaaatttacaaaaagccattgaactgtatgcttaaaagtagtaaattttatggtatataaattacagcttaaaatattagtttgtttgggttgccattgtaactgcccaactggttcaccatgcctgctgcctagacagagcccatttatcaagataggggaattgtaatagagaaagagttattcacacaaagctggctgttcaggagaccagagttttaatattactcaaatcagtctcccacaaaactcaggaattgggttttttaagtataatttggtcggggggggagtgggttggaaagtggggagtgctgattggtcaggttggaaatcatagggagttgaagctgtcctcttgcactgaattgttcctgggtgggggccacaaggccagatgagccagtttgtcaatctgggtggtgccagctgatccattgagtacagggtctgcaaaatatctcaagcactgatgttaggttttcctttttttttttttttttttgagatagagtctcactctatcacccatgctggagtgcagtggcgtgatcttrgctcactgcaacctccatctcctgggttcaagcgattctcctgcctcagcctcccaagtagctgggactacaggcgtgtgccaccacgcccggctaattttgtgtatttttagtgtagatggggtttcactgtgctggccaggatggtctcgatctcctgacctcatgatctgcccgccttgacctcccaaagtgctggtgttacaggtgtgagccactgtacctggtgatgttaggttttataatagtgatcttattcatccccaggagcaatttggggaggtttagaatcttgcagcctccagctatatgactcctaaaccataatcactaatcttgtggctaattcgttacttctgcaaaggcagtctagtccctaggcaggaaggggttgttttgggaaagggctagtatgtttttgtttcaaagtttaactatacactaagttcctcctgaagttagtttgacctatgcctcagaatgaacaaggacagcttggaggttagaagcaagatggagttggttaggtcagatctctttcactgtaataattttctcaattatgatttttgtaaagacgatttcaccataacaaaatactacagactgggtggcttaaacagaaattttttttctcacagttctggaggctggaagtccaaggtcaaggtgctggcagggttggtttctcctgaggcctctcttcttgtcttacagatgactaccctcttgctgcctcatcctctgtgcacactaattatagttattttgaacataaaatccttgtcatttataagattttagttcacaaattaggaagaaactgatagtcactatttgacttgttgacttaaattttaggctgatttatattttgttctgaacttttaatctataaaagtcatggttatttatgtattcttcccccccgagttcaaaccagctgcaagtttatttgaaatattaaaaaaaaaattatttaccttcctttattttgtatttgcaggactctgccctatggtaaactcactttttgtaacgctgatggtgggtgatagcacaaatgccatagaccatataatctagctgtattcttaaaaaaattttttttaaagtaattttggactcacaaaaagtcacaaaaatagtacagagagttcctgaatacccttttcacagctttccccgatgataacatcttatataacagtttgatataccttatcaaaaccaggattttaccttctgcaacatggtaaaacaagaacaaaaatgcaggaaatcagcattggcattgtgaaccccaaagtatctgagacaggtctcaatcaatttagaaagtttattttgccaaggttaaggatgtgcctgtgacagcctgaggaggtcctgacgacatgtgcccaaggtggtckgggtacagcttgctttcatacatttttagtgagacataatacatcaatcaatatatgtaagatgtacattggtttgatctggaaaggcgggccaacacaaagccggggagaggcttccaagtcacaggcagattcaaagattttctgattggcaattggttgaaggagttattatcaatataaaggaatgtctgggttatgataagggcttgtggagaccaacgttttatcatgcagatgcagcctccaggaagcaggcttcagacagaatagattgtaaatgtttcttatcagacttaaggtctgtgttgacgataatgctggtcaacttttcctgaattccaaaagggaggagggtataataaggaatgtctggttcccccttcccatcatggcctgaaactagtttttcaggctaacttgggaatgtccttggcctagaggagggatctgttcagatggctggggggcttagaattttatttttggtttacagtataatactattaactaaaccgcaaactttatttggatttcaccagtttttacatgcactcactttttcccccttagtttaacagtcctgtggaatcttatcccatatatagattcatgtaaccaccaccatgttcaggatacagaataactgtgttctttaggattttgctgtttgagtcctcatttattgaggtaaacttcattttaattcttaaaatcaactttattgaggtataatttatatgtaataaaatgagcctttttttttttttttttttttttttgagacagagtctcactctgttgcccaggctggagtgcaatggcgcggtctctgctcactgcaacctctacctcctgggttcatgcaattctcctgcctcagcctcccaagtagctgggattacaaacgcccgccagcacgcctggctaatttttgtatttttagtagagacggggtttcaccatgttggccaggctggtctcgagctgctgacctcgtgatctgcctgcctcagcctcccaaagcgctggcattacaggcatgagccaccacacctggccaaaatgagcctattttaagtatacaattccattagttgtgacaaatgtatgcatctgtgtaaccaccaccccagacaccgtctagacgtctctgttgcctcaggaggttcccttattcccccaattcgtttagccctttcccattgttctgacttctatcaccatagcttagtctttcatttttttctcagatttcagataaacggaatcttatggtgcatctgccctggaatctagcttactgtttgagatttaagatttgaggcgcagctttgacaatgtgtatataaacaaagtgtagcaaattcatgtaataatatactataacagatttctgggcattttacagtcctttttagtcctctggtttgatatccctttactttaaaacattctgcttcagttttttcaaattactcttctaacctccttcagaggttttaaaatactttaagatgttaataacaccacattattcaaagatatgaagaaatgcttatctccattcttttttcaatgttgtcccatttccttttcttttattccatctctctcaaccttcttgtcccttcccttctggtgtttttttttttwaattttatttttatttttatttttttaccttttttctgttttcttttctcttttattggacttctgtctcttcatcctcattctctttactttcatccatttttattcatcttctattgtgagtgccctatttaactttcttcctttccttactttgtcttcgcctgtttctggccttgcagttgctgacttctcttcttaggagagtatcatcattgttgtcatcatcatcatcatcggttttttttttttttttttgagatggagtctcgctctgtcgcccaggctggagtgcagtggtgcaatctcagctcactgcaacctccacctctcggtttcaaatgattcttctgccttagcctcctgggtagctgggattacaggtgcacgccaccacacccagctaatttttatatattttttttagtatagatggggtttcaccatgttggtcaggctggtctggaactcctgacttcgtgatctgcctgcctcagcctcccaaagtgctaggattacaggtgtgagccactgtgcccagcccatcattgatattattattactagggcctttccccttcccctttcccctagggctggacccagggtatatatgtctctccaaatggagtgttgtctgaaattaactctgtgtgcagtgtctagggtgttctttggaaacatggcctgcctgcaatacctccttaatgagaggctctttggtatagtagaaagaacaaggcttttcagttagactgaggtttagaacctggatttaccatctattacctatttcatcctggccatgtttttaacctctcttagcctgaattccctcatctgtcaagtgggaataacaaaacccaccttagagttgccgtgagtatcaaatgggtaatgcatgtcaaatgcccaggtcatagtagtcacgaagaattatttccttacatggggtggggagagcagttttcctaggggaagtgaagcataagctgggactatcccaatgctcatttgtgctacaggattcttgcatttttctttgggaaaaattctgggattttccagaagaataaatttggagatgctaccactgagcccagtgagttctaaaaagcagctattaagctatcattgtattgctctttccaattgttctgggcaccatttatgttgaaattagggtagttcataaaatcatatattgtttaaacaaaagattttgtcatgtctcttctattttagcaaatttacttaatggtcttttaggaggaaaggtgataaataactaccttttaaattattttattttttcattattctgaactaatagcagtcagtaataggctgctacaactgtatttacatgcctattattcataactgtactcatagattttataccatgatcctctaggttctagaaatttcatgcaggtccttttatgtttagttgaaattgtacttcctttgcagtctaccatgttcccccctttttttggcttaaaatatgaaatatgttttgcatgcattttattatttctctttgattctacttgttgatatttttcattcagaatttcaaagcatttatttttgcatttatatttacatatcaaaaatatcatattttaatagttttacatattaaaactattttcarttctggtctacttggcttttacagtcagctttatgaattgaagctttggttcttatgggtaggtaatggagataatattattgtgtgttcccagctttctccttttccacataccctgcctgctaaacaaaaatttgtctttgctcactccacttttctccacctccatcctctaaggattcttctgactttttcagttgttcttatgctttgtgggatataggaaaggaagaagtggataggagggagagagagtatgagtgggagagcactgatggtgatgaaatgtgaaactcgtgagaatcgaaaaagagagaaaaggcttttttgggggagaagtgtggatgtgcagcataaattggatcacctttagattttccttggaggtctaagtgaagatgaaacaggattttcaattgctattagttgctgggccttttctttgaatatactaccatgctgagactaagccacactggcttattatttgagttacttctaaatgttaacttactaaatgatatatttttgtgtatgcttacacaaataagagaactgccattacccacccctctcccaacactgatcagttgacctaagtcctctcgtctccctctgaaatctccctttcatcagtctgcttctttccatggccactgctgccatcctagttcatctttcacctggagagtagcctccgttgaaggcatccctgccttcaatataattccctttctcaactgcccactctgctacagagttaactttctaaaatgtttagactcctttgacctcctttgcatggcttagggaccacctatattttggctcttgtacctttgtagtctcatctcctttgctcccccatcaccactcaacccttagccacacaaaatgacttgcagtaccccacataccgaacactcctatgctcccataactttgcacatgctgttcccctttgcagagaatgcccttcccttcttgtccacttactccgtctttcagcccattgaagacccatttcagatgttacctccaccatgatgccttctgcttaatactttcaggtgactggcaattccctctccttttggagcattttcataaacccttattactcttctctgtgtcctccactgagcaggagtgagtggagattttgtggcagttcagggcatagtggttaagcttgtggcctctgaggctaggcatcttgtgttcccagctgtctcattctcttactttgagactgtgtgtagattacttaacctcccaaatcttgaattctataaaatgagaatcacagtattacctactttattggtgttttgtgaggagtaaatgagataagagtataaaagtacttaatacaatgcctgacccattataagtacttaatcagtgttggctattttatttagctttgaattctcagagcttagcacaacgcctgacacatggaagacaacttggcaatatatacggagctacaatattattaagtctttcctaatggcttttagcttttatctccaatgcattatcattatttggaggtaccatactctgttttgcagttatttgcatatagtcttattccccttacttgactgtgtactctttgtagctggagagattgtcttattgagtgttgtatccacagcacagagctttgaacttagcaggtattctgtggctggtttggtttgtattattttccattagtaatggaagtacccattttgtgaccttggttggtgatgcacttgtgggaaataaataacatactttgggatcattaaaatcccattaaaatcatccaatgtactgggaggtccaatttattgggtaattactagaattatagaacaaattctttggactggaggagaacataaagggcatcatatccaagcatctttcttctgactcttttgcatggaatccagcttttaaaaaatattgcaaaatgatggcatgaaggagtgtttttgccttggttctcatattattcctgctaattttacacacacacacacacacacacacacacacacacacacacgttgagtataccaaatctgaaaactttttgagtgctgacatgatgccacaagtggaaaattccacacctgccctcatgtgatgggtcacagtcaaaacacaagtgcacaacacagtttattcagcatcccaagggaagaaaaagcccttccaacccccttcacctacagtatagattctttgcacatgtccagattcccccaaacaagcatgcctacaaagtgtaataaaatggcacatgtgcaggctggatatgccaacggcacgttccccacaattccccgtgtaggaccaagaccttcgtgcattactcattgtgtatttttgcttattctctgctctgtggtgtaaagatattgttgaaaatgtcaaataggtctgaagatagccctatgggtaagaggaaggatttatgtgtatccatagcatagaaagtcaagctgtgggagaaactggacagcagtgtaactgtgaagcatcttacaggagagtatggtgttggagtgaccactatatatgacctgaagaaacagaatgataaacagttgaagttctatacaaaagtgatgtatagaggttattaatgaaaaatagaaaaacagtgcataaagctaaaaatgaaggtctcaaacatgtattgaaagagtgagtccatcagtatcacagtgaacacgtgccatttaatggtatgctgattatgaaacaagcaaagaaatggcaaaaattttgccattgctttcaatggcaaaaactgtaattatttttgcaccaacctataatagctgaaatggttctaaatcaaggtgatgatgaagatgacattgctaactgtaaaaaaaagtgcctatagatgatgtggtgaaattgtgatgggattattggatgactagagccatatgcatccataacagaacaagaaatcatgtcagttgataaaatcaggggcacttataagacaaaaacctctattaatgaggctgataactctggaggaaacatttaagaaagccatccagcagaatgcctcctcatctctagaggacctacttcctggtccctcaacttcttctgatgtttcttctcacctaaaaaaatagagtgtataaattagctgggcatggtggcacgtacctgtaatcccagctactcaggagactgaggcaggggaattgcttgaacctggaggtggaggttgcagtgagccgagatcgcaccactgctgcactccagcctgggcgacagagcgacactctgtctcaaaaaaaaaaaaaaaaagaaagaaaggaaaagaaatacctgagactaggtaatttataaagaggtttagttggttcatggttctgcaggctgtacaggaagcatggcacatctgcttctaaggaggcctcaggaagcttccaatcatggtagaaggcaaagggggagtgaggcacttcacatggctggagcaggaagaaaaggagtggggaggtgccacacacctttaaacaaccagatctcatgagaactcactatagtgaggacagtaccgagggggaaatccacccccttgatccaatcacctcccatcaggacccacctccaacattgggaattacaatttgacatgaaatttgggtgggtacacagatccaaaccatatcacatgtgaataagtgtaagaaaattattgcttatccaaagcatataaattcagtcaggaatgatgattatgccaaataaccacagattgtccatatgagtggctgagatagtgacacctttgctttctgatggttcaatgtacacaactttgtttcatgtgcaaaatcattaaaaatagtacataaaattatctttaggctatgtgtataaggtgtgtatgaaacataaatgaatttcttatttagacttgtgtcccatccccaggatatctcattatgtatatgcaaatatcccaaaatctgaaaaacatctgaaacactctgttctcaagaatttcggatatggggtaccgaacctacatatgtacatacatatgtgtttctgtgtgtgtgtgtgtatgtgataaatgaaaaatattataaaagataaaggaacaatcatatatgtatatatatacacacaaaaaaacacacatatatataattttttatatggtaggtgtttttcttttgtatttttcatattgaatgtcagttttcttgattcagtttataaaactccatgattagcaatgtgatttctgcaggatagggtgaccccctttcttctagtcctagtatcatttttccaggaagtctgattttaaacagtggtttggaatctcttctcttagtaatatcaagtgttttttaattgcttgcgcaatagactccataaggatgtgaagactattttagatatggttttgacagtattttcaagcttccagctttgcatcctacactgatttatatattattcagtatttttatacattcattttctctccaaagctgttatatatacataattttcttaattctttaaatagtgctgtggttatcactgtggttagcaagtgttgattttctaatttttgctgaaaggttaatcagtgaacaaagagcttaagtggtttgtaccagtgatgtagttaattagtgataaagctacgtgaacattctagcattctagccacttccctttccattttcatgcatcataaaatcatgtcttatgcagacaagtaaaactaaattttatgaatgcttatattgcccatacaggtgcattttatcttaaaccatagatttagtcatgaaaacttgagtatcgattataaataggtttatgatatttttgtaatacaaaaaaattctttggaagtcatccctctgtaatttatcttttttgttattcatttatgcaacttacctttattgaccatctcttatgttcaacatgctaaatgagattcaggtttgtataacttgagttttcttaaaataagatacgcctatataaacacagtatccataggaacataaatttatcaaaaaatgaagtgagaggaaaaaaataagaatttggagtgagattataacttgagcattggtatttagatgtacccccacctccacaatcccaattgaaatcactgcaaaattttaaaatgtggagaaactaaattcatgctggaggccagggaggtgttccaccttcatgttgcaaactttgaagagtttccacctgatatagtgcagatgggatgatactgaaagaatatacccaaacgaacttgcaatttcacttcccgagaaagtgacaagaatcgagttgggggttaggacaacctgtaggggtttccacatggtttactttcacaactattgatggcttaagagtgtcactaggagacccagaaatatagtcacactgaagtcaaagcaggccctgcattcgggcttttctctgatggaacaggcaacggcatacaaaggactggccactcttcctggagtggaggttgggtcaactcataaaatgtttatatggaaaattagaagtttttcctgctggggactacccatggttccagctcccttcctacttctcttgaccactctacatgaatttatattaaccagagaggaggtatctaagaacattaggatagatggtgaagggagtgaaagaaaacccacccacccaccctattttgtggaaaacaccagcctagatagactgctctttgttcaggaatgaacaaagaaacttaaggtttctgaaaagattctacaacataaatggagaacatagtattcaagaggcagaggaagaaaaatacttattttaaaagtatgttttctacagaaaaaaataagtatttttgataacaatgtgctttgtgtaaggaagtatataatacaaagtgagaagtaaaagcaaattaaaaatattattgaatgagactgcaggcaaaaagtcaaagggagattgctgaagaaggatgaaatgtgaggaatctaaaaatgcattatatgtagtaaagaaaagtattaaaactggggagaatgggatgagtgatggaaaaggtaaacttgagaaattctcctgaaatgcaatggaaaaagataacagagcaatgagatgatggcaggttggacagaggattgagctctaacatgcagacaattgttcctaaagaattaaagtctagattaaaagcaaccaaattgattaagcataccataagaaaacaatacaaacaaaagcaactttctggattacagaaagacgtagaccgggccgggtgccgaggctcacgcctgtaatcccagcactttgggaggccgaggcgggcggatcacgaggtcaggagttcgagaccagcctggccaacatggtgaaaccccatctctacaaaaaatacaaaaaattagctgggtgtagtggtgggtgcctgtaatcccagctattcgggaggctgaggcaggagaatcgcttgaacctggaaggtggaggttgcagtgagccgagattgcgccattgcactccagccctggcgacagagtgagtctctgtctcaaaaaaaaaaaaaaaaaaaaaagaaagaaaagaaagatgtagaccggcagataaaatacttattctgtaccagagaaaataaaaaagagatcaataattagatctaccctgacaaattttcaaggataaagcaaggaaattaccaagcatcaggatagaaaaagtaatttaaccctcaaaggcaaagttgacattggaattctcagcaatactaaatgccagaagacaatgaagccatgtctataacttttaggggaaaatgtgactcagaaaatctaaactcagccaaggtgttatcattagtgaaaacagcagtaagatctcagttatataatttatcactaatatgctatccacatacttttcctgaaaaagttgcttaattgctagtcaattaagagataaagcaaattaaacagttcaaccatggggaggtcatgaaataaaatgattagtggtgagtagtagaaagaaacatatataataggtcgtgaaatataaataaaattcaaaacataacataaacattttgagtatttattgaaagataaaagaataacaatcataaaatgagccccaaatccaagatagggatagaaaaaaaatatgaattatttagaagaatatgcaatttaacaggctayatggtcacaactatgtcaaggaaagacatcaacaacagtggggttctaggtaatagaaatgccatatactttttcctgctactctctatttccatatttttgtaatacgtttgtatttttatagtgtgtaaactttatcaaattaaatctatgtatacagcagagttataattacagacacatttgtagtattgactgctttgttattgctctccaaattaaaaataaactaagcatttagcttaagacattaaaaaatacacaataaaacagacatcagagaacaaaaagaaaaataaatttcaaagcacaattttttgtatcagtaaacaatagttttgaaaaagcacatgccgtctgagttgagtatttaaaacaaacagaattaaacctaaacaaaaaatacagaaaacaatgtatttaaatcataaactcagagaaagtaaaatgtatagctatgctaactatgaagtgaatagtattaattagcaaaattgacttaagtacaatgctggaattggccaatatatggaaatattagagaaaactgccaaagagctactccaaatgttagtgattgtctctaagtgggtagcattatgggctattttactccctctttgtgtgtttttttttttaatttttactttttacttttttccccactacaagctactttaattctttgaacaatttttccatgcgggtaaactgttaccatattttcctattaagaaatattttcaatagattttttttctacaataaattttactggaaacatttggttcattaatttttgtctatatgaatgctgtccatcatggcttttgacaatctgagttttttttgatgatcacatttctaccaaaatcaattttcctaagtcaaattttgtatatccagattttgtaaatatttgactcttctattgatttttaaaaaatcaattttaccatgtgcatttttccttctgttgcttttattttgtttgggtttttaaaaaatcacgtttatttttttgcttgtctcaaaaatttttaataagcaggtatgaattttgaagttagatatgaataaaaaccaactgaaaaagcaaatccctctgtctcccaagacaaagtgggcagtttgtttcttttgagctttaaaggtagaaatagctgcctttctaaaatttaagtgaagcgaaatgttgacatgccctgaaaggactgccaaggttcagggagcctgttaatgggccttgagaggctctgtgactctggactaatggcccagggaccactaagagtaaattgaatttctagattactggctactttcacagctctctgatgcctccaggatgggagagtagacacaccaaatgccagaaaaataaatgctaaataataattcttcraggttcaatggaatatctatcacttaagtagcaaactatttactaagtgtcccaaattttgcacatttgcattgcaagattttactagtaacatgagtaagtgaactgttctttacctcactcatggaataagtaaatgaaggttgtgctttttgatttaggccactcttgatatactacactcagaactacattgctcactccccttcctaaagaaataaaggtgaattgcaacaaggttctctcctgcatgttagaaacactgcagagtataatacttgcatttgccacacagaaatgcagggagagaggagcaggttggaaaagtagttttctcatctaaaattaaaaaaaatttttttgatagaaaaattttttttgaaaggaaaactcattgtgtgtatatcttgcttaccttgttgagtgtatacttacattttttatttaaaaaatttttttttagaaacgaggtttcactatgttgcctaggctagtttcaaactcctgggctcaagtgatccactcacttcggcctcccaaagtgctgggattacaggcgtgagccactgcgcccggcctatttttcattaaaaaacttttttttttttttttttttttttttttagagatgggagtttcactctgttgccaggctggagtgcagtggtgtgattatagctcactgcagcctgagactcctggattcaagtgatcctcccacctcagcctcccaagtagctggaattacaggtgtgtgccaccacacccggctgttgttttgttgtttttattttttttttgtagagacgaggtttcactatgttgcccaggctggtcttgaattcctgggctcaagtgatccgctcgcctcggcctcccaaagtgctggaatgacaggcgtgagccaccatgcccggccgatttttaaatttttttaaatagaattcctataatatacaaatataatacacaaatcacctacctcacttttaaaattctacatttttttaaagacaagtaggagggtgactttattcaccaagcgatcaaaagcaggctgcagaggacagggatttagattgggaaactctttgtattctatcaagctgtcttctttactggctaccttaaggcatttttgctgggaagaaaaaccttaataacatcaagggcagtttaccttaaccctcctgccatcccattgtaccccaccctaccagccagaaacagaagtcttacgaaaaggttttgaggaaaatatcctgtcctagtttactccgttccaacgaattcttcaaacacatccttgacccaggacatacgcagagttcaaatctagtctgtatgttttgttaggctaccggtctcctttcttgggaagactcctgactgtgccttttctgtttaaagatggtagaggcgatgggtgttctcccgcaagacggtcaaggtgtgggagagcgacacacctttgattctggcaatctctcgcacagtatgcagggccaggcctgggtgggcatactggcaatagcttttgggaacccagcgagggaggaagaagggagcatcggtttctacaataattctctctagcgggatctttctcacagtttctcgggcttgcccagcagaagagtaagtcagaattgccgtgaagcccacatacaggttgggaaagtggttcaacaggggctcgatgactgagtaactcccagtgaagcaatggcgatgtatcttgtggtcagagggcacgtaatttttcaagatgtgcagtaggtcttcatcggcttctcggcagtggatcatcatgggcttctttagagagacggccagccgcagcagtctcttaaatactttctgctgctctgggatatgcgtggtgcacttactggagtaatccaagcccatttcgccgaatgccacagccttggggtgtcgtaaggcttttaaaatacttctttcttgatagttgttataataatgggcaaaatgagggcgacagccaaagaccccccaaaccagatcatctttcaactgatcctcccacaggttatcacttaggttttgaggattgcagaagcaagaaatgcagccctgaaactccttggggaaggtgttgctataaatttttctgaatttggtaaaggtgcctttgaaaggcagcctggaatatagcaagtctaaatgacagtgggtatcaatgaaacccggttgctctggctgccagatggtccttggcggaaagctagatgcacgtcctccataaggatgtcctaatgtctcctcttgatatactctctcctccttcgcctctgcttccacatttctggagtagtaaaataaggaagaattcttggatctgccttcctctgtcatcttcagatctctggatgtgttttcggagctcrctggaaaactggtggaataatcactcaggaagctctggtggctgctcctctcaccctggaatatgttgttgttgcttctgctgctgctgctacagctgctcttcccagcctgcaatgtgttactgctgctgcccaaggagggayagcaagaagacttggtactgctgaaccaagagctggtgtagtcatgccaaggactataatgaggtggaaaagtggtgtagtcagtggcgtagtatggaggctctgacactacaggaagacacagtgagaatggcttctyttcagagaatatgactgtggttccacctacatcagaccagtcactccctgaagaggggcgctcaattgccatcttttctttgygcttttgaattactgaatgggagttatagttatccggaacatttaaaggtggagagcttttttcacaaatgactctactttggttgctaaktcgcttttggattattacatgggggttatagtcatccagaaaatttgaaggctgagagcatttttcacaaatgagtgtattttgtkttttaggtcgcccctcactgaatttctcaggaggattaacagtcaccctcttgtcacaggagctgctcatttctggggctgactctttctctttttgaggagcaaagatagtggcattcctggctggtctttctccacagtagggacactctcctaggtctgattgtgaactaatgacagcctcttcctttacttttggaatgtcatctcccaggatctcctggagaacactcagagacaatgaagagccactatcttgaggtctacccttcctgctctggaacttgtttggttcctcagtttcattttgaccctcacttccagctgtaaattgagggttcatggaattataggagctacgtttggaattaattttaaggctgtagataccctcctccagagaagccatttctttaaaaacggggctggcagagtgcactggggatcacaaggacgaaaggaactccaaatgctccaaatgaggcagtctttggagccggccctaatcaggccagtggctgaggaatgggaggagaaggaggagaaagaatttctgtggcaggatgaaccttgagaaaaacacggtgtgcaggccacaaagtagcctttaggcctttcaggcctttggggcctctctccccttccaaaccacgttactgagctccgcggggcacctgtgtttgctgcaaaccacgttactgagctctgcggggcacctgtgtttgctgggggatcctacctaagtgccgctccggtggtacttttctgcgtgccgacgggccccagagctggagggccctcacgccactccggcgcctccttttttcaactgtctatcacagttctcggtgttctagagatgccaaagcccttccacaattatttcaaagtgctctggagaagtcctaaggatccaggcctggtatggcgtccgagcccggaacgtactcctaagactgtcccaaatggtctgattttgcgctgtgcaacttcccggatgtaaaaaaaaaaaaaaaaaaaaggtacttccgtggagtcaaagtgtttccggggagtcaaagtggcctggtatggcgtccgagcccggaacgcactcctaagactgtcccaaatggtctgattttgcgctgtgcaacttcccggatgtaaaaaaaaaaaaaaaaaggtacttccgtggagtcaaagtgcttccggggagtcaaagtgcttccgatcggccgtgcgccgtggcttacgcctgtaatcccagcactttgggaggccgaggtgggcggatcacgaggtcaggagatagagaccatcctggctaacacggtgaaaccccgtctctactaaaaatacaaaaaattagctgggtgtggtggcgggcacctgtagtcccagctactcgggaggctgagccaggagaatggcgtgaacctgggaggcagagcttgcagtgagctgagatcgtaccactgcactccagcctgggggacagagccagactctgtctcaaaaacaaacaaagtgcttccgatcaaaactcttacttttggtttggaatacaaggccctttggagatgtcagagtccatgaaatgactacaagacaccttagggatcagacacagggtgcccctgggtgggcttctggcctagatgccctgatccccaacggccagctggaggacagggcagaacatactgtagaagccgagtcgggaagcctgcccagcccccatcacctcgcctgccagcctgggtcaggccagcagcccgctccatctaagagcaacactcacctccccacggccatccagcccctcctttaccacgcctcttctcactgcccagccacgtgtctacccgagctgcagccattacatgctttttgttcctcccctccaccctcagtttcttccaaaagcgtagtcatggtttttagagcatagtttaaaaacatagttttaaaaaacatagttatgactgtggtatataacaattttcagtcttgtggtgttttttttttgtttttgtttttttctttgtcctcctctcccacccccccacccccccccaccccccccccccccccgccccgagagggagtctcactctgtcgcccaggctggattgcagtagtgcgatctcggctcgttgcaacctccacctcctgggttcaagtgattctcctgcctgtgcctcccaagtagctgggactacaggctcgtgccaccatgccaggctaaattttgtatttttttttttttttttagtagagacggggtttcaccatgttggccaggctggtctccaactcctaatctcaggtgttccacctgcctcggcctcccaaagtgctgggattacaggtgtgagccaccgtgcccggcccagtcctgtgttttagtcacttaacattactgtatagcctcagtatttttcttattgcctcatgtttttcaaaaatatcatgctggtgcctttataatactccatggagaacgtagatgtgccgtaattcaccaagcccttccctttttgttaacttttcaggtccccttattctacctttttttttctatgataaaaagctgcaaagaacatctttgcacatacaagtttcttctgtattttgggttgtttctttggactacgtgcggggaaatggagttcctgagaggaggtaggaattttaaattggttcctcataacattacattgccgcagaaaattgtactaacttaaaatctcatccgtaatgagtggtccatttaataggagaaacacacacataaaccctatgcctcgttgttattttaatttgcacttaatctgacagtttcttagagtgaacttctttttatttgttgaccctctcatgaattttgtttatgctgttttcccatttctcttttagggtctttaaaaaattaaacatttttataaaattaaagtttagccatattttctaaaatgttttgttagcatgtttttgtttatattttagtatatcggagttataacttatgtagttaaatcttaatttttaaaaatgttttctttctctttttctcccaagcctgcaatgtcattcctccttctgaggcttgacacatatttatttttttggaaggtgaaaggaattgatttattatatttaagccaatacttcatctgatatttgggttggattttacaggaaggaggctatacactgatgcttttccaagttggtactttttttgcttattgatatgtgactcctctttcattatgtgttaaattcctgttaacagagtctatttccagggcatctgttcttttacacctactatgtctcttgttactgtggtattgtactactttaataaatgaactattatattaaggtataaagtctgggagagctagatttccttcattacacttaaattttacaactatctttaataggctgaactatttatcaggtagacttaaaaaaataattctaggccaggcccggtggctcacgcctgtaatcccagcactttgggaggctgaggcgggtggatcacctgaggtcaggagtttgagaccagcctggccaacatggtgaaactctgtctctactaaaaatacaaaaattagccaggcgtggaggtgtgcccctgtagtcccagctactcgggaggctgaggcaggagaatcacttgaacccgggaggcagaggttgcagtgagtccagatcacaccactgcactccagcctgggtgacagagtgagacttcatctaaaaaaaaaataataattctaagtccctccagaatgacattgaaatacccacttgaaaagttattttagtctgcttatccagaatatacttcgcctatccttttagtcaagctcttctattaatatatcttctagtaaatatttttagagttttatctgggtcacagagtttttattaaaactatttttaagtattttgtaattttgtattatgaacatactttccccccattgtatggtctagctggttattgctaacacataagaatattttaaattcaggtatggttgtactgaaatctttgttagtttttcagcctttgcctaggtcattattttatctacccataatgataatttttgtctctttcttgctaatatttttacttcatatctttctacgttgtccagagcttttaaaaacaatattaaataatgatgctagtaggggcattattgttctattcctgattttggtaggcacatagtttaattaagtattatgttagatatttaggctgttgttttaaagcagatctttttgtaatcttgttaaggaactacccttgcatttaaaaatgtatgtggtaggaaatggtgtgagatcattatatatttgctcatatttcctaattgggaaacatgttggcatctgtgagtaaaatgctgttttttttttgtgtaggtggcttgtaactgttacagactattaaattctgtttgcttgtattttacttaggatcttctgtaaatcataagtagtgaaattgttctgtagcagtagttctcaaccttggcttgcagtttgtaatcacttggggagctttaaaaattactgatgcctaggcccaccctgagagaatctgatttctgtgtgtgtgtgtgtgtgtgtgtgtgtgtgtgtgtgtatgggggatggtggatgtctgtggcgggggttggggggctggtggtggacagtgtggccaatgcatcaggatttttaaaagctctataggtgattctaatgtgtagccagggtgagaactattgttttacagttacttttttttcatggtacgtctattaggcataggaattcacctttgtagctttccatcatttttggtatcctggagagttatataatttggtaattttcttttccttgaaagttggaacaaattcattagtaaatcatcctggttggagactttattggggcaattctttggtaatttttttcactgcttacttggttattagcttattcattgtgtttttgataagtcacggttcttacagaatatcacttatttaattgcaattttaaaattcattttcatatgtttgcatgattattataagataatttatcttatggtttatatcttataattgcatctctgtcatgcactgtatcatttctcattttatttatatttttcttgatgagctttctaaaatcttatctattttatttatttaaaaagtccttggatttatttattgcagttgtttttcttctttcaaatttatatatccttactatcttttttgctttctgtttttcttatgacaaatttttgctttttcaaaaccttttgtttattgttttgaggcagtctcattctttcgcccaggctggagtgcagtggcacgatcatggctcactgcaacctctgcctcctgtgttcaagcaattctcctgcctcagcctcctgagtagctgggattacaggcatgcaccaccaggcccagctaatttttttgtatttttagtagagacggggtttcaccatgttggccaggctggacttgaactcctgacctcaggtgatctgcccgccttggccttccaaagtgctgggattacaggcgtgagctactgcgcccggccttaaaagcttttgtttgaatcattgctcactggttctaaactctggctatgtttcagaattacctggggagagtaggaaagaaaaagaaggatcttgtacttgcctatctcaaagttcatggctgagacctctataacaaaagacagattaacaagagaaaagcacacaaatttatttaatgaaagcttcaggagacatggagccttcagaaatgatccaaagaaacaggaaaaactatttttatggacagtcatgtagaactgtgactggaggacaaaaggatatgatctaatggtaataaactggggggaacttataatagcaagatttgtttgttccgatttttattcttcatccttatgtgacactcctttcctctgggtatagggcaggacacctgtcacatgcgagtctatagggaaggaggaagggagaaggtcagagaatgaccttcctaggtgttatgacctgcctccggggagaatgatggaagaaggtcagagagaccttcctgcttctgcctttttctcaaatgccaaggtgccatgtgcctcggcatatttgccgaggtagcatgtcctgaaccccatcagtagcttttaaaaaatagtaatagtcccctccccaaggttctgatttaacttacttaggcaagggtctgggttttttgtttgtttgtttttcacggaatgtcactctgtcgttgctcaggctggagtgcagtggcgtaatcttggctcactgcaacctccacctcccaggctcaagtgattctcctgcctcagcctcctgagtagctgggattacaggtgtccaccaccgtgcctggctattttttgtgtttttagtagagattgggttttgccatgttggccaggctggtctccaactcctgacctcaggttatccactcaccttggcctcccaaagtgttgggattacaggtgtgagccattgcgcccggccagatctggtctttcaaattttttttaaagttcccaatgcatagccaaggctgagaaacactgttagcaatttatcctctctctcagactctaaattcttttatgtaataattttaatccattaatttaccccagattgcaaatttgcctatatcctataggtttgtatggccttatattttattatatacttttatataaatttattacatacatgtatataaattttatttgtatattttttatatttttagatttatttttggtacaattatgaggagtgacaattttcgtttataggtacattatacacttctagttgtattactttgtgatcagtgaatataacttgtataatttttctgtttttaaaatttattaaaatttttgtgaattagcatatgtttcagatatatttctgtaaatatatatattgtcatgtataaaggagccatcctctatatgcaacacaaaatgtattatcgtttatttccttgattatgggacttcataatcatgagagaaaccattgatttaataacagctttttcaggaagaataaacaacactgtattaaatgtacacaaatttttcttgtctactaacatatagagcatgcatttatccttaccattatatcccttttatagtacttcacaatttaagtctgaacctttttcataaaacagagcttaaacatattaaacttggacatgtgatgttgacctctttataaaatgttgaggttattgaacattgccgatgttttgtctttctttcctgacagcttctctagaaattcagctgtaagatttttttttttttttttttttttgagctggagtctcgctctgtcgcccaggctggagtgcagtggcgcaatctctgctcactgcaagctctgcctcccaggttcatgccattctcctgcctcaccctcccgagtagctgggactacgggcacccgcccccacacctggctaattttttgtatttttagtagagacagcgtttcaccgtgttagccaggatggtctcgatctcctgacctcgtgatccgcccgcctcggcctccgaaatgctgggattataggcgtgagtcaccgtgcccggcctcagctgtaagtttttgacattagatgtttgattcctgaagtgatagtctttctgactcacgtattggccacatcagcctccccatctttaaaaattatatgctttattctaagaaattaggcttttgcctttgccttacagttgcatggtctagcctgcaatggacaaccttctccacgcaattattttttgtgtcatactgcatcagacaataatcattttcaaacattttaagtgaaaattaagaatctaatgttaaaatccagctgtttgggatatgcaatgctaagcaaataactcaactgtcatgaagataggatagattcttctctacaaagctaaatttgcaccatatatcaagttagaactacttcccatcaaaatgcattcttgactgctttgagattcttttggctttaattgtaagaagatcctgaattcagaaacattaacatttaaaatttttcctttgtaatgaggaaatcatatacctgttatttaaagctaattgatttcagatttcaggagttttttctttttcttttttattttcttttctgtttttctgtcacccaagctggaatgcagtggcatgatcatagcccagtgcagccttaaattcctgggctaaagcaatcctcctgcctcagcttcctgagcagcttggactatgaggcacgcaccaccatacctgactagttaaataaagaaaaattgttggagagacagggacccatgtgtcacccaggctggtctagaactcttggcctaaagtgtttcaatcctcctgatgtagcctcctaacgtgttgggattacaggcatgatccactgtgcctggtctaaggttttatatcctctaggctaagattaaaattccaaatgccttgaggatcaggtaggtaacctcatataatatcatagggcctgcagagccagagaggcctgtggaggactgaagatcacatgcccccaccaaatgatatttatattccgttttcaagaaaattgcagccaattacatcctctaggaccttatttttcttttttcttttttttttttttgagatggcgtctcactctatcacccaggctggagtgcagtggcaccatctcggctcactgcaacctccacctcccgggttcaagcgattctcctgcctcagcctcttgagtagctgggattacaagcatgtgccagcacgcacggctaatttttgtatttttagtagagacggggtttctccatattggtcaggctggtctcgaacccctgacctcaagtgatccacctgcgtcggcttcccaaagtgctgggattacaggtgtgagccatcatgcccggcctaggaccttatttatctagtttctgcttgacatcataaatgatgataacaccttacatcataattatgttcctataaattttcatttttaacagtttttattttaggttctgttttctggattctctgatacatcaagttccattgcaattagatcatttatttttgtgagatcactttttaatctatttggtgtctctcctcttacattctacttcaccacattttataatttcctcttcctcttccttttttatctttccatctctacctcattctgacttgctctgtatctttcatgctggagtttgacagccctgtattctcatgggagcagactatgaaatatcagtctgtccctcatctagacatattgaagcccaacctaagataatgtctttccttttctctgtatttcaatttagcatccttctcttttaatgcatcatttgattgataaatatttaatgattacatacatgacagttgacctatgccagttgtcaattgacctatgccagtgtagtcattctcaaatttatactggcagcattcagtatatagaggtgggtgacagccaagaatattctctctacactttcctacttgattacaaagaaaaaaaaatctcagattaaatattacgtacactgaaagtttgatgaagccccagctctttctccttttaggtgttccaacatctttttttcctcctccttttttaaaaaaaattatttttgagacacagagtctcgttctctcacccaggctggagtgcagtggcgaggtcataactcactgcagcctcgatctcctgggctcaagcaatcctcccacctcagcctccctagtagctgagactacaagtacacgtaaccaagcccgactaatttttaaatttttttttgtaaaaacggggtctcattatgttgcccaggctggtctcaaactcctgggctcaagtgatcttcctgccacaggcctgagccactgtagccagctccctccccctactttttaaaagttgaaatataattcacataacaaaaactcaccattttaaagtgtccaacacaactcagtgtctaatatctttttttaactgaggtaaaattcacataacatgaaattaaccattagccattttaaagtgtgcaattcagtgacatttaacatatccacaaggctgtgcaaccatcacatctatctagttccaagacttttttgtcaccccagaaggaaactctatacttgtccaacagcatcttatctgaaatattcactcaatacaaatgtgacagcattctagcaatggggtttagctaacctaattggagtcaggccagacaaattctttaagaaagcagctgaacataggactatttgggaatgaagccaaaggtgccatcctgaagggagtagatctctgggttcaccagactcttataacctgttcctgtaaggacagtgcctggttagtatttgtaactgatatgtgcattttgaatacaatcatttcactaaaatttattctaatatcatttatggcaattgacaaagcttcttgtgttgatcaaagaaaaagctactgaggcattctgttagccacttctgaagtgtgggcttctgataaaaatatgctaaacactcctggagtatatattcttacttaggttaactgaccaccacccctagagggtagattgcatctaacagactcactcatatatatcatattgtccacattgaataaccctggagttacatcatatgcacagttaagttttgcaacttcaattataaaaattgatcaaaagtgagagacaaagagaatatttaaatggagctctcacagagcttgagccgcaggtcaagcttgaaatggtagcctgaatctacttttcccacagttgtcctcaattaccttgtcgtgctcagtgtgtgagcaggatgccatattaagaatgtttccaatggctaaagatatatattattcatacaacatggcacctaagcataaagaaatgattttaactggtcttcaactgaagaagcaggcagtcatctgcttcaatatgggagaaaaatgggctgtgttttacttactgagaggcacagttttctaaagtagttaaggaattttcaaagatatttttgactatctctgaattttaccataactgctttagaatccacctgtccttcccttccttattccctaccgcccccatacaagatgagtctgagtctagcattgggctaggctccttgaggttcccgaagtgtaaggtggggtctccagggcattggatgaatttcagatatgcctgcttgaattgcctgaaggcaagcaatcatcaggactaacagtcaggataattttatgccagaaccaaggcagctttgtgttattgttaatgggaaaaaaatgacaaaacttattcatcttgtgagaaagaatattttgtctctataacatatacatttagaatcccactgtgaaatcccaaaggcagactctagttcagtttatggtagagctgaacgatggatgtattacttgaatatcatttccttgttttaaccagatggtgataaaagtattaaataatctttatgtattgtatcttagattgtatatccattcgcatggctgatgtgtagaatgagttcttggaaaaattctctctacytttttctttatattaacaaaaagtatacaggcagctgctttgttaattttaagtttgctgaattttcttttcatttcttagtttctaattattattccaacaggtattatcttttgatgcctatttggaagaggaagtacttgataaaagccaaaccaactacagaataagatactataaaatctacttctaccctgaagatgacacaattcaagtaaatgaaccagaggtgaaaaatagtggattacttcaaggtatctatttaaagcagagttatggttccttcacttctgactcctgcctttatatactgcctgcctttagcttttcaaaagactgcatgctactgtttaggctgtctaacctgctggcagtggtgaatataaacatgccattagcrtgtagttattgattgtgacttaccagctttctaccctctgcatgtcaacattggctgggtctctcactcctccgtggcatacttgtatcctttcaggtgctgctctggtatgagtaaactctcctgtgcctttgactttttcctcaaaccctttggtcgccttgccgtgagcagatcacttccttcacaacaccattaggggagaagagaaagctgttctctactgcagcttccagattggcattctcttctttcttgaatttactgtcatttgtttcaaccaccccctcctcatcctcatacctgttaactacagacttcgatggtacctcaccagagagtcattgttccttcacyctgtgtatgccagtcatctttgtccatactcctctcagccacagataagagttaactctgtgatgtggccaccagagaagctaatcctaggttgcattaagtatggcagagatcaatggagatgactgatttcttctgtttgtgctgtgggtccttctcttgggatgctgcggagttctgaatgacttcaggggacagcaactatgacggtgaaagaactgaacatttgtcatgtgcaagacagaatagtgaaaagggatatttgtctgtaatggggagactccagtgtgcttgataaatgtcctcaggaatctaaagggctgtcatgtggagaaggggtgaccttattctctttatgttcatggatgggacctaggggtcagagttcaggtcagtaagaggaagaactttctggcagagagctgctagaagttatagggaatggacctgggtagggttggggttaggggtctggtgtaggggcggaggagaggagagtcacagatttgtttgttccctcgtgtagatagatggccctgggggcaggtcaggggtggtttttcactgacagcctgctggaagtatgagaggatttgagtgtttgtttggttgctggtgtaaatgacctttcagggtactcagttccttgacgagctgattcttgggtgtgttgttgtttctttgccttttagagtattgccacctccagtatctcagtctctgaaattgtcttctctaactacaatatatactccttttactttccctacttgctcataactaccatccctgttcttcactctcctagaaaaacatatcctgaatatgtccatgtctttccatccccttcactaccatcctcacctaagctaccctcatctgttgactagaggaatagaatagctgcctaacgtggtctccctgtttccattcttgctcctcctacaatctgttctgtatgcagcagggagagtgttgtgtgggatgttacctggatacagtggtggcctttgagaattgtacatgcaggctctcccagaggtcacaaaacagaaggctcatggatcacattaaaatgcatgaatcacatgttacattaaagtaatttaaaacacatgatgagaagaaagagggaaagagatagggtaggttcacacacttgggacagggtacaagtaggcagaaggaccatactgcctgaatcctggggtcagcaatggttctgtctctgtttcactaaccttccctgctactagtatggtttagagaccagaactgaggttcaagcaaggagaaccacagacagaaggggcttcgggctgagggcacacacttgctctgttggggagatgcagggagaagtgtgcctggccatggctgtagcttgtcaataagcctgctggatagtcttgggttttgtttgtgtttcttgggcagaggtcacatggggctagaatgggtgtcaccgatgaatgagtggccaaattgaggcctcataaatattgggtgctcatgaatatttagtgtccttatatatttagcatatcatgaatatttagagtccaggtgcctcatgtatatttacgacctactgaaaatcagttatcttttggtttttccatccctttctttctatgtttaacatgcccatgctctacttagcatacctacctacctattgttatttaacacatctcatgatttctgcctatgctgaacaaattttgcttactaattactaatctaggcctgagggctctgtattgatataccacaatgagttcaagggggagaagcagggatttgagggccatgggctctgagaataaggttgtcatgcaacctcattaagtgtgcagaggacttccttcaatgctcatgagattgaggtttttcttagagcatggcttcattgtgtctggtggttggaataatgaatttggagccagccagcattgccaagaagtatttgttggatgcctattctgtgtcaggcactgtgctatgttttgggaaaatggacaaaaggactgagtcccatcatagccctatctcatggagtaataataggccaccagattggaaaggaaagggagcaaggccaccagtccaagagttttgcaattgttcaggctagaaatgctgagtgtccaaaccaggacaatgatggtaggaatagaaaattggggaaggatttgagagacatttggttggcagagttgatatgcattggccagtgattaaatacagagagtgaggagggggaatatctaatgaaaaagtgcctaccttatcattatctcatttaatctcctgatgaccatctaaagtagttactgtcactgtcagcttttacagaaaaggaaacaggcttagggaggtaatttgctcagtctgttttgcattgctctaaaggaatacctggggctgggtaatttataaagaaaagaggattatgtggctcacagttctgcagactgtacaagaagcatggcaccagcttctgcatctggtgaggcctcaggaagcttttactcgtggtggaaggtgaaaggagagcaggcgtgtcacatggcaagacggggagcaagagagaaaggaggggatgccagactcttgttaacaatcagattttacggtaaccaacagaaagaactcacacattactgcgaagacaacacaaagacattcatgtgggatccacccccatgacccaaacacctcccagcaggccccatctccaacactggggatcacatttcagcatgagatttggaggggacaaatatccaaactatatcggcctcagaggtctctgtggttgagtcatgatacctttataaagcccaggagcacagagcaagaaacaggattggggtttgaatctggggtgtgtttcagggcatgaggcctttgaaggggtgttagacatctgtgtggtgatgcccctccaggcaggtacaaacttaggatgtgttttcaggaaaaaagtcaagactagaaatggagattgggaatcagaggtgcccagatcatgaccaggctattctaccatgttagaggagagccactggtgaggtgatggaaagataaagggaattcaatttagtgtctctgcttggttttactagtggtgggaaaagacgaagattagtatgaggaggtaatatgaactgtcctcattgttctttgtgttccaactgatacactatccactccctggccattttatttggtgaatttggcctaatggtaaatctttcaggaaatatggaaataccataacattttaaaaacaggttttcacaaattttaaggttaaaagtatgacattttattttacaaagggacaagaggttttagattctttagggtcatttaaaacatataaggcagtttttaaagattggcaagaatgcattagaaaatggttgaagattatttaagaacaaagaatttacaatttataatttttgtggacatctattttacttacgtgtatttgattatataatagtattgctgtggcaaaaagaaaaaatttcttacaggttttcacctaaacattttgttctgatattccctcactaagctctgcttattttctgattactttcccaccatgacaccaaacttgcacaaatgatagactggaggtcacaggacaccccaggcctgggttagtgacttgcattattgttttcattattacctttaaagtgaaagctcataatcctatagctcactggcccctgtccagttcatcttagttttattaaactatccaagaagaaatatgaaatgtagcttcttttagaatcttggaaaggcttttattaagacttctcaattctttcagactcttgatttcaaatctcacataggcagattccaaaggcaagctgaagatagtcataatgatgtacttgaaaatcattcttgtgtaaggagggaggaatgctatcataaagtctcagaaaaaaaagacctgagtaaaagacaactttaaagtctctggaaattttccgaatttttgattggctcactgtggtcaggacatttccctgtgtgaagacacagctcaagagttgtgtatagaatacacagtaatcacgctgcgtaatgacattgaatttgtcagcagagtagagaaatttggaaggctgtagcaaatcctgtagaaagcaaacatgaataaccactctgtcaccaagctttgtttagagagaaaccagtctcttgaaatatttaatatgataattcttgttaaggaaggtctatttggactgcagatagtttgaaaaatcatttaaatgccttcttcaagcttttctaaattaagtgattggaaaaaagaaaacacttaatgagccagtggttcagacgtcagtgggacagggtaggtagtgtttctttcagttgtgacttgagtggcccgggcttgctttccatgcatctgggccctgggaagaggcaaatggtcaagattaggtgctgtgcagtgatggcgttcctgtcacttccataggattttgatattttctagatgaacttggaggtcagatgcacttgtttcttgtgtgaccatttggaaattagtgcaactggaggaattataaccctcccctgctcccttttggttgcctctattatcatgtaattttttagggtggggggagtttggaatcagccagaaacaaaagaggcatccattagcatggtaccaaaataggcattcatgcagcttctaatcagaacaacatatttttaatattcacaagttcttgttggcaaggagatttgtgtgtgttatgagtcaagaaagccagtattgcacttcaaggcttgctttcatttcttgccaggacatcactctcttttcggttagatgtgttatatttacagaacgtgttgcttttctgctggaatgtagttaaaacaacattatatcaagccaagaatgtcagaggttaatccagtagttttacctctaattgtctaacagaataattgtcagttaaatacaccaagtccagcctaatctgtgctaaagaaaggataatgattagaaatgtgccgtgattttctggtatggtctataccagttgttctcagttgaaagtgatcctcagaatctcctagcccaccccagaattttttcttctgtagacatggggtcaagaactggcttccctatgattcttagtgcatcttggttgagaacactgatttccactaatgacttgttttggccccttaataaggtagtatttctcatatatatattttttaatactctaagataatctgcttgatcaggcaaatgtaatcacacaaaatagaagtcagtcattcatatgccattcactcttattgggcatgtactatatataggtattatatcccataaagtggtggaggggtggtgggaaggttgccagatgaagtataagatactcagttatatttgaatttcaggtaagcaatgaagtttttagtataattatgtcccaaatattgcataggacatagttatactaaagaatttggctgggcatggtggcttacacctgtaatcccagcactttgggaggcagaggcgggctgataacttgaggccgggagtttgagaccagcctgaccaacatagcaaaacctcgtcgactaaaaatataaaaattagctgggtgtggtggcacatgcctataatcctagctactcaggaggctaagacaggagaattgcttgaacctgggagacggaggttgcagtgagccgagatcacaccactgcactccagcctgggtgaaaaaaaattaaaaaaatttaaaaaaaaaaagaattctttgttgtttatctggaattcaaatttaactgagcagcctatattttaatttgctaaatctggtcaccctagagggtggacactggggagagaaccaggtacttgagggattagaggaggaaaagccaatatccactagagaatctggcatttgaatggtacctcaaaagtttctctagataaagatggaagagaaaggcagaatagtcaaaaggagcaacatgagataaagtggtgggacaataaattgggaagtatttgggagcagatcatagattgaatagggaaaacagggcaagaaggtggtcatgcaagaggacattaaagcatctgttattttggtgctttttcaatagctaagggggagatgcgtagggttactgtttcttattgtgagcagaaatgtggaatttttaacttcttattcttttgctgcaaggtgagtgcccggttgtgtatataaaaataattattcttgtgaaaccgaaactctaaaggtgacattttagaaaaataaaagtaaaagtatacaagtcattttagtagaggaatatagtaagcacaagaggaagaaaagacactctgttatgtgtgattgtggttaagcctcttagtatttttagggcacaaacttgtagatgtgatgataagtggcaattgcagttatatcttcatttacctaagaaatatctgcctttagacttggatgtactctaggcctgcagcattactaaaatgaaattaacatacttaaattaaaatagaggtgacccaggtgcagtggctcacgcctgtaatcccagcactttgtgaggccgaggcaaaaggattgcttaagtccaggagttcaagaccagcctgggcaacaaagcaaggctgtctctacaaaaaataaaaagttagccaggcgtggtggccatgcccgtaatctcagctacacgggaggttgaggtagggaggatcgcttgagcctgggaggttgaggctgcattgatccatgatcatgccactgcactgtagcctgggcaatgatgtgagaccctgtctcaaaaataaataaataaataaaaaataaaatagaggtgagagtttggagtcttaattctggaaggtgaattccagaaaagtaaatttagtggtatgagcaaagatctaaggcaagtctcaactgaataacatgaaaacacatgaaacataaatggatatatggtcactttgatctaaaccacagggaaatgttagaaagttaaagcttgaagagcatagccagatagcagggcttttacaaaggaagagaaatgtaaaacatgaagatgaggaaaagctggacatgtgtcccaatagtctttattgggcagttaagataaactcctgaaaatttaaagggcaaatatggtgctttagttgtttttctgttttgtaacaatatctttatttatctaccttgatgatttcacctgctcttcaatgtgggtcaaggacatggtatcctgcccatttctttgatatcccaaaacaaattcctgctgatggagtttctgccatttatcgtggaagactaaaaacataaaaattctgataattagaaattttaattctcaaaggacacagttgagaaatcctatgaatatgttattgaaagctctcatgtgcaactgtacatttcaaatggcccaccttggttttctgattaatatggaattgtgacgttagatttttggttatcaaaactttactgttagtgttagacctgccttttctttctaactcatgggtgttcaggattcttttttgtcaccaagaagagcttccctggccttttctgagaagcatctagtgagagaagtgtagcggctaagagaaggaagagttggggggcttgagatctgcaggctcctgggagaggcaagtcagctggtggggcaggccctgcagggtgcattgccatagcagtgggtgggcatctctggaaatttccccttcgaggagagaggctgttctttcggaagagcagcttcatctctcttttcttttcatggtggctggtagctcttttatccatttccatcctgttatgcctatggctcttcctcctcaagtaatatgtagctgcagtacagtgagatacagctcagtgcaaactatggaaagtaatggtatttagttagagtctgaaagcccaacttcaagatcttttactgccatttgttagggcatgaccttgggcatggcatttaacctctctgagctttggttttctcatccttaaactgaatattcatatttcatgtattatctgccttatagaattattgaggattaaatgagaaaatgtaagtgaaagtttatcctagggctatgatgatgattgtgattagtattatttaaaagcccagtgggtgggccagtttttgccacctagaaaaatataggactcctattcaaagtcttatggaacaaaaatcatcgctaacttgcttatttgaatttctataatgaagtaaaaatgcaagatagatggaatttttgaagaagctcctgactgttgaataattcttatatattttaaaaactgtcacaatataagtatttttaaagtagtatataatggttcctgaaaatacctgaaatgcccatccttttatacatgtttaagtatgcaatttgttctaaatgtctaatcttgaatgattaaataatttgcatactgttttcagtgctatgaattaaaggctaattgaagtataattttttcacagtaaaattgtatcatcttttatgtagtacatttaaaaatattctaggccagttctaattttatagttttattattttaatttaatgcaccaagtaattaaaaattgctgcaaagaaaagaagctgaaaatgattttaggtaatttcccctcaacagagtgaaaagatgataagtagaataatggaagagagcccaacacagttcctggcacataaagatattcattaaatattccttaatgaataagcaatgactaatttctaagtgtctctagactttgagaaaaggcaccattttcagtgctgtataaaatacaaagaagataggttgacatctttatattaaaatacctccatgcagagttcccacaagccaatttttattgaatcattagatctgcagtttgttctgctttccttttctctttgttcttggagtagattctcaggcctaagtcagttacagatattgagagacaattctccatggtatcatgcatttctgtatctcttgtaagcagaggcactgacttctctttgttctggactatctcttcaaggatgtttatatagcaagtagctgtggaagacaaaaatagtctctccctctggagcaaagtataggtttgcttatagcgttggaagatagaggcttagtgtctccttccagtctaataaagatagtagctcccttggagataaagagcagggatgcttattgctaattatagaagatttgggttccctaagctaagggttactctcctgtaatgtaacccactgcatgtacaaatgttacctggcccttactatgtcatcctgtgggaattggggcttaggaaactggaaaaagaaatgctgatatttaggctattcttactgctgttgattaataaactgccttttgtctctgaccaaggcacctcctgtcttctaccagcatccatgaaactatggaaggctaacttctcatcttgcaagtaggataaaatctcaaacccttttttctttttttcaaattcttttttctttttcttttcttttctttttttttttttttttttttttgagacagggctttgctctgttgcccaagctagagtacagtggtgtgatcatggctcactttagccttgacctcctggactcaagcaattctcccacctttcagcctcccaagtagatgggaccacatgtgggcaccaccatacccagctaatttttttttaattaattttttttttcttttgtagagacaggattttgccatgttgcccaggctggtctcgaactcttgggctcaagcaatctgcctgcctcggcctccaaaagtggtgggattacaggcatgagccaccatgcctggcccctaaacaatccttaacaacagattgcagcaatatttgggtaacttggctggtatggtgtggtatagttggtacactcatgtaggcaaggaactcttttacctccagtggctgaccactcttttggatatacgtgggaccctgggaacatattctcaagaggagaaatgaatgggcatcagggttggaagtagaagatgggatgagatctagagcttttggcccagagcactggctagaactgtgaagcctctgataaccctcacttgaggtagtgcttgggtggaggtggacagaggctatagaggaaggaggaggaaaaataggttgatagaggaaagaagattccatgaaacttcacagcagccaaaagtgattcatccttattgaaacttctaagtcaatgttggcacctatcattccaaagcttactagctttttttttttttttttttttttgagccatgagtacacatttttgtgagcattctgcattggtgccttaatgcctgttgagtgtgctcacattgagtgcttgctggtggctgaatgtgagcaggcttgttctaggaaaagacatgatggcagcgtctggtatttttcgtcattctgcttatgtcccctgtccttcatcccccatcctcaccccagtctttatggtttattaaaatacttcccaagcaccacttaggcaactctaaccacatgcaaggctggccacagagctctgaacctcagaaatctcagctcattctgacttcctcagagttggaatgtactaatgctgcttcctagaacgagtcctttgcccagttttctgttgcgggaaagtattcagggttgttagtgaatgtgctgtatcttcttacttgttagccacatgataaaacagttgtattttctttcatgccatagggacttctatccggcgtcatcggattactcttccgcctcctgatgaggatcagttttatactgtgtatcattttaatgtcggcacagaggttgtcttctatggccggacattcaagatttatgactgtgatgcattcacaagaaactttttgaggaaaataggggtcaaagtgaatcccccagtgcaatgtccagaagatccttacatgaagattcggagagaggtaaggaattgacgtttgttgagttcttgtcttcaaaataaaaatccctttggaaagtcagtaaagggtgtttgtactcctgatgcagatgtgaaagagcttttagagccatagttattccagttttgttcttctttgggctagagggaaggctgagtgttagccacagagcaagaatgacttcctcactgcctcaccccaattctctctgtagagactctctctttcaggcagtaggagtcttcagtgaactgcacaggtgagacagattctaggcacccacaattgactttgtggtcactgatggtatatgagttgtatccacatttccttggcttgtgtttttgctttttagttgtctaactctggctagaaagatctttgcttctatactagtgatttagtgaagcaagccttgggtacacattttttcttcctcctaggaaattccaggtcctcttaggatggcattggatgccaagatgctctggaagaataaggaagaccatgattctgatataccccctttaggaaaggatgtttatgtacaaggtctgaccccagctagtgtaagggagtaaagactcaatatttttagtattatttttgtcttcctattttttaaacagtccctgggcccaaattttgttttccagaagaatttgaacactcaaaggggggtggaaggtgacaacacccagctaatctccttgctgggactggatcgcaaatgtcttgactcttaccctgatttccatcattgtcacttgtttcctttttccttttctattgaagtgtgattacacacagtaaaatacacagaaattaagtgtacagttggatgagtcttaacaaatacacgtacccctataacctacccccatattgagatgtagagcatttctcttcccccagaaagtcccctcatgtgtttatcgaatcgatcccgctccccaccacagacaactgctgttctcatttctatacccatagatgagttttgtctgatttttattgttttaaaacttatgattcatttccttgcagagaggtaacaaaatttagaacaaaattctcttttgattctgttttgatctctttttaaaagccacttgtaggatcattcatctattcctgcctcccagccccagcagaattattctttaatgttgttgtaggcatacagccctctggagaaatatatatattgttgatcctggaatatctaaggtgaaatgcctgtatattgatgtacaaagggattttttttggtttggattcatttttattttttccaaatgccctggatgaaagagtctagataaatagaaagaatttagaaccagcagagagaacttgaaggaaatggatccaaatgaattgccaccctttgcatatggctgcagtcattcactaacagttgttgttatatgatagtgattgtgaataatgatggattatatgaaaatgcgcagagcactgtgggatttcataggtttatgaagaaaaaaatttatgtatatttaaaattatactttaagttctgggatacatgtgcagaatttgcaggtttgttacataggtatacacctgccatggtggttttctacacccatcaacccatcatctactttaggtatttctcctaatgctgtccctcccctatccccccaccccctgacaggccctggtgtgtgatgttcccctccctgtgtccatgtgttctcattgttcaactcccatttatgagtgagaacatgcagtgttttgttttctgttcctgtgttagtttgctgagaatgctggtttccaacttcatccatgtccctgcaaaggacatgaactcatcctttttaatgactgcatagtatcccatggtgtatatgtgccacattttctttatccagtctatcattgatgagcatttgcgttggttccaagtctttgctattgtgaatagtgctgcaataaacacgtgtgcatgtgtctttatagtaggatgatttataatcctttgggtatatacccagtaatgggattgctgggtcaaatggtatttctggttctagatccttaaggaattgccacactgtcttccacaatggttgaactaatttacactcccaccaacagtgtaaaagcattcctatttctccacatcctctccagcatctgttgtttcctgactttttaatgattgccattcttttttttttttttaaatggagtctcactctgttgaccaggctgtagtgcagtggcgcgatcttggctcactgcaaactctgcctcccaggttcaagaaattctgtgcctcagcctcctgagtagctgggattacagaggcctgccaccacacccggctaatttttttttaaatatttttagtacagacagggtttcaccatcttggccaggttggtattgaactcctgacctcgtgatccacctgcctcggcctcccagtgatcgccattctaactggcgtgagatggtatcttattgtggttttgatttgcatttctctaatgaccagtgatgatgaactttttttcatatgtttcttggctgcataaatgtcttgttttgagaagtgtctgttcatatcctttgtccactttttgattttttttttttttgtaaatttgtttaagttccttgtagattctggatattagccctttgtcagttggatagattgcaaaaattttcttccattctgtaggttgcctgttcactctaatgatagtttcttttgctgtgcagaagcttgttaatttaattagatcccatttgtcaattttggcttttgttgccattgcttttggtattttagtcatgaagtctttgcccatgcctatgtcctgaatggtattgcctaggttttctttagagtttttatgattttaggtcttatgtttaagtctttaatccatcttgaattaatttttgtataaggtgtaaggaaggggtccagtttcagttttctgcatatggctagccagttttcccaacaccatttattaaataaggaatcctttcctcattgcttgtttttgtcaggtttgtcaaagatcagttggttgtagatgtgtggtgttatttttgaggactctgttctgttccattggtctatatctctgttttggtaccagtaccatgctgttttggttactgtaaacttgtagtatagtttgaagtcaggtagtgtgatgcctccagctttattctttttgcttaggattgtcttggctatacgagctcttttttggttctatataaaatgtaaagtagtttttttctaattctgtgaagaaagtcagtggtagcttgatggagatggcattgaatctataaattaccttgggcagtatggccatttttatgatattgattcttctatctatgggcatggaatgtttttccatttgtttgtgtcctcccttatttccttgagcagtggtttgtagttcttgaagagatccttcacatcccttataagttgtattcctaggtattttattctctttgtagcaattgtgaatgggagttcactcatgatttggctgtctgtctattattggtgtacaggaatgcttgtgatttttgcacatcgattttgtaccctgagactttgctgaagttgcttatcagcttaaggagattttgggctgagatgatggggttttctaaatatacaatcatgtcatctgcaaacagagacaatttgacttcctctcttcctatttggataccctttatttctttctcttgccctggccagaacttccaatactatgttgaataggagtggtgagagagggcatccttgtcttgtgccagttttcaaagggaatgcttccagcttttgcccattcagtatgatattggctgtgggtttgtcataaatagctcttattattttgagatacgttccatcaatacctagtttatggagagtttttagcatgaaggggtgttgaattttattgaaggccttttctgcatctattgagataatcatgtggtttttgtcattggttctgtttatatgatgggttacatttattgatttgcatatgttgaaccagccttgcatcccagggaggaagctgacttgatcttggtggataagctttttcatgtgctgctggatttggtttgccagtattttattgaggattttcgcatcaatcttcatcagggatattggcctgaaatttcctttttgtgttgttgttgttgttgtgtctctgccaggttttggtatcaggatgatgctggcctcataaaatgagttagggaggagtgcctctttttctattgtttggaatagtttcagaaggaatggtaccagctcctctttgtacctctggtagaatttggctgtgaatccatctggtcctgggctgtttttggttggtaggctattaattactgcctcaatttcagaacttgttattggttggtctattcagggatttgacttcttcctgggttagtcttgggagggtgtatgtgtccaggaatttatctatttcttctagattttctgcatagaggtgtttataatattctctgatggtagtttgtatttctgtgggatcagtggtgatatcctgtttatcgttttttattgtgtccatttgattcttctcactttttttctttattagtctggctagcagtctatctattttgttgatcttttcaaaaaaccacctcctggattctttgattttttgaagggttttttgtgtctctatctccttcagttccactctgatcttagttattttttgccttctgctagcttttgaatttatttgctcttgcttctctagttcttttaattgtgatgttagtgtgttgattttagatctttctcactttctcctgtgggcatttagtgcttataagcactaaatatataaatttgcctctaaacactgctttagttgtgtcccagagattctggtatgttgtgtctttgttgtcatttgtttcaaagaacttatttatttctgccttaattttgttatttacccagtagtcattcaggagcaggttgttcagtttgcatgcaattgtgcggttttgagtgagtttcttaatcctgagttctaagttgattgctctgtggtctgagagactgtttgttatgatttccgttcttttgcatttgctgaggagtgttttacttcccattatgtggtcaactttagaataaatgtgatgtggtgctgagaagaatgtatactctgttgatttggggtggagagttctgtagatgtctattaggtccacttggtccagagctgagttcaagtcctgaatatccttgttaattttctgtctcgttgatctgtctaatattgacagtggggtgttaaagtctttcattattattgtgtgggagtctaaatctctctgtaggtctctaaggacttgctttatgaatctgggtgctcctgtattgggtgcatatatatttagtatagttggctcttcttgttgcattgatctctttaccattatgaaatgcccttctttgtcttttttgatctttgttggtttaaagtctgttttatcagagactaggatagaaacccctgcttttttttgctttccatttttttggtaaatattcctccctccctttattttgagcttatgtgtgtctttgcatgtgagatgggtctcctgaatacagcacactgatgtgtcttgaccctttatccaatttgccagtctgtgtcttttaattgggacatttagcctgtttacatttaaggttaatattgttatgtgtgaatttgatcctgtcattatgatgctagctgattattttgcccattaattgatgcagtttcttcatagcatcaatggtctttataatttggtatgtttttgcagcagctggtactgatttttcctttccacatttagtgcttccttcaggagctcttgtaaggcaggcctggtgatgacaaaatctttcagcatttgcttatctgtaaaggattttatttcccccttgcttgtgaagcttagtttggctggatatgaaattctgggttgaaaattcttttctttaaggatgttgaatattggcccccactctcttgtggcttgtagggtttctgcagagaggtctcctgttagtctgatgggcttccctttgtgggtaacccgacctttctctctggctgcccttgacactttttccttcatttcaaccttggtgaatctgacaattatgtgtcttggggttgctcttcttgagaagtatctttgtggtttcctctgtatttcctaaatttgaatgttggcctgtcttgctaggttggggaagttctcctggataatatgctgaagtgtgttttccaacttggttccattctccctatcactttcaggtacaccaatcaaacgtacgtttggtcttttcacatagtcccgtatttcttggaggctttgtttgttccttttcattctttcttctctaatcttgtcttcacgctttatttcattaagttgatcttccatctctgatatcctttcttctgcttaatcgattcagctattgatacttgtgtatgcttcacaaagctctcgtgctgtgtttttcagctccatcaggtcatttatgttcttctctaaactggttattctagttagcaattcctctaaccttttttcaaggttcttagcttccttgcattgggttaaaacatgctcctttagctcagaggagttagttattacccaccttctgaagcctacttctgtcaattcatcaaactcattctccgtccagttttgttctcttgctggcgaggagttgtgatccttcggaggagaagaggtgttctggttttttggaattttcagcctttttgtgctggtttttcttcatctttgtggatttatctacctttggtctttgatgttgttgaccttcggatggagttttcatttggacatcctttttgttgatgttgatgctattcctttctgtttgttagttttccttctaatagtcaggcttctctgctgcaggtctgctggagtttcctggaagtccaatccagaccttgtttgccttggtatcaccagtggaggctgcagaacagcaaagattgctacctgttccttcctctggaagcttcgtcccagaggggcaccctccagatgccagtcggaggtctcctttaagaggtgtcaacccctgctgggaggtgtctcctagcaggaggcacaggggtcagggacacacttgaggaggcaatctgtcctttagcagagctcgagcactgtgctgggaggtctgctgctctctttagagctggcaggaggaacgtttaagtctgctgaagctgtgcccacagccaccccttcccccatgttctgtgtcccaggaagatgggagttttatctataagcctgtgactggggctgctgcctttctttcatagatgccttacccagagaggaggaatctagagaggtagtctggctacaaaatcattgctgagctgtggtggactccgcccagttacaacttcctggcagctttgtttacactgtgaggggaaaaccgcctacacaagcctcagtaatgggggacgcccctccccccaccaagctccagcgtcccagatcgacttcagactgctgtgctggcagcgagaatttcaagccatcggtcttagcttgctggggggatccactgagctagaccacttggctccctggcttccacctcctttccaggggagtgagcagttctgtctcactggtgttccaggcgccactggggtatgaaaaaaaaaaaaaactgcagctagcttggtgtctgcccaaacagctgcccagttttgtgcttgaaacctagggccctggtggtgtaggcacttgagggaatctcctggtctgagggttgcaaagaccatgggaaaagcatagtatctgggccagagtacactgttcctcacagcacggtccctcacggcttcccttggctaggggagggagttccctgaccccttgtgcttcccgggtgaggcgatgccccaccctgcttcasctcgccctccgtgggctgcacctactgtctaagcagtcccaatgagatgagccggatacctcagttggaaatgcagaaatcaccctccttttgcattgatctcgctgggagctgcagaccagagctgttcctattcggccatcttgccagccacccccagaaaaagatcttttgtgccaggaattgagaataaataccaagaacagctaagaaatgttttaaataatttcctttcagagtaggaacatcattttagcatttattccctcagggagaaaattcttcaataaatatagtaatctttgggaaattaggagtttaataagaggcttctatattgactttcatacatttacttctgcagtgtttgctgtcttgaactgtaaagttaaaattaaacaatttaacttagactgaaaagaatcccatatattatcaataatgcttttcttagaggcctcataatgccaaagaaacatttttcaatcaattgaaatagtggtcccataatttcatttaaatatcagagataagactgaagagtctttggaaagccatcatgtctccccactgtcttgggttaagactgcacctagactgccctcgacagatagaaatttcaaaaatttacaaaaagattgtataacctgatttgggataacatctcccttgtcagtgtgcacttccttatataacagtcctatttggttacatcagatgaaatgggggcagtttaactccacgacagggctgcgaaagtgcaaatagagggaagagttgcatcaagaagactatggaactaactagtggttcctgggacagaggacagccgaggcagaggctctgcagaccttaagaccttctccatttgctgtgctcctgtttctccggggcattcttatccttgatacctaaagctttttgagctgaaataaaacagtgaatatatttcttcccttttaccttcacaaaaatctttgaatgagtaagaattatgaacacatatgaatttcccagtgaaaagacaaattatgtatttggttgagatataattaatacggagtcaaacatataaatcttaagtatataggtcaacaagttttgtaaaatgtgtgcaattgagtaaccaacacaaaaatcgagatgtagaatatttttaccacctcagaaagttcctttctccccatttctggtcaaattccctacccagaggcaattactgttctgatttctgtcaccgtagattagttttgtctgttcttaaataagaattttaaatctttttgaaaagtcagttttaaaaaatattaaagaagtatagktttttctttttttaatcttttttttttttttttttttttttttttttttttttttttttttttttacagagtattgctctgtcacccaggctggagtgcagtgacacaatctcggctcactgcaacctctgcctcccaggttcaagggatcctcctgcctcagcctcctgagtagctgggattactggcacctgccaccggacctggctaaacttttttgcatttttagtagagacagccaggctggtctcaaactcctggcctcaagtgatcgacccactgtggcctcccaaggtgctgagattacaggtgtgagccaccccgcctggccagaagtatagtttagtgtattaatgtttaatatgaaaaacttcctcaaacttgtttgtctctattctttttttttttttttttttttttttttgagatggagtctcactctgtcgcccgggctggagtgcagtggcgcgatctctgctcactgcaagctccacctactgggttcacaccattctcctgcctcagcctcccgagtagctgggactacaggtgcctgccaccacgcccggctaatttttttgtatttttagtagagacggggtttcaccgtgttagtcaggatggtctcgatctcctgacctcgtgatccacctgcctcagcctcccaaagtgctgggattacaggcgtgagccaccgcgcccggccagttcttaaggttaaaactggttatagatgtgtatgtatctatgtcatagttgaaattaaaaacaaaatcacagaataatctgtagaaaaatatatcttttttgttttcttttctttttttttttttttttcgaaatggagtctcactctgttgaccaggctgtagcgcagtggtgtgaacatggctcactgcagccttgacctcctggggtcaagcaattctcccatctcagcctcccaagtagctgggactacaggcgtgtgacaccacatctgcctaatttttttttttttttaagagttgtgtttttgccatgttgcccaggctggtcttgaactcctgaactcaagcagtcttcccgccttggcctcccaaaatgctgggattacaggcatcagccaccatgcctgaccaaaaatatatctttatatatttgtcacttgattgtgtatatcttagaagtgattatgcaaaccctgcaactattattgacattttctccatttgcaggttgtagaacacgtagagcccttacgtccctacgaatccctcgacaccctgaaacagttcctccagtatcatggcaagattttgtgtttcttctgcctgtgggatgactcagtctcaatgtttggagaccgtagagaactcatcctgcattacttcttgtgtgatgatactattgaaatcaaagaattgcttccacacagctcaggccgagatgctctaaaaatgttcctccggaggagtaagctacccaaggtgagcagtggatataaccactttgaatttgcttgtgggtcaagagactagtcactgtttggaatgttgtgtgttatgactatatgatgatagtaaccatgcactagtgcaggtatttagaaacctttcrttttgtgccctctattaatacacatctgtgaaagtaatacagagaatatgatcaattagagttggaacattgaagttaaggcaagtaaaggaaaaaagtcaaatgtaagaaaaagcacctattcatcattgagttcacatccagttttatgaaactaaatgactccttagtaaaagaattgcttgtggctttggacagggcactgcagactactgaagagagcccatggtttggtctgggttgtgaatacaaacacacacttatacacgtgcacctacatgtgcatgtacacatgcactcacaaacatacacatgcaagtttacaaaccaaagtgccttttctgaatgtagcaactagtcaccaactagccactagctagtggcagtgatgacttttgcattttatttaacattaaaaagagttgtcagattgatttctacaaatatttatggccatttgagagctcatgtaatttgggtgcagcagaaacagcccagacctggattagagttgtgagtctgccccttaatagctgtgttaccttgggcaaatcacttaacctctttgagcttatttccccatctttaaaatgtcataacatagtaaaaaaaaaaaaccaaaaaaacaccatctaaggacctgtaaacacctataaggacacttaagaacataaaggctttttcaaaagctctatgttatattttctttcttatttggataaagtgtcttcttagtgcacatgaaaaggttaccataatgctaatttccgaggcaaataactgctggccattcagtcctcaccgggaggctttcccagattctctgagcccactgctggaagccctactgcgtttgcttggaggcaggagaggcacaatttgtcccagagggagccctgggatacccatagcaggcaaccaggaggtgtcagaaaaacctgtttttagaatgactttgaaaaataggctgaatataaaataataatgacatacctgacatttacagtgtgccaacattagttaattcattttattcattcattcaacaaatattcattgagtgccacctctatgccagccctggggttatagtaagaaagggaatggattaaatcctaccacatcttgttttgattttgtcttccagaattgcccacctagagtctatcaaccaggccagataacagatcgagcagttctcaattcatatggtgactttataaagaaccaagcggatggctacctgttcgatagatataagggaaggaacctcatattttattacctgtttctagtgtgacttctttggaacctgaacagtggggcgagttacgtactcttctcttgtgagattgtgaatgaaatcgatgaatacataaatgtatgcattgtactgctatttatcagtaataaacatgctgaaatgtctatataaatatatgcaatgcattgcagtttgtaagtataatactacagtgctaaaataatactttagaatattaacatcaactggttgcttttttatttgatttttaaaatttagttattaaagattgaagttttatttttaatttcctttttttctctgggaaggggttcctggttctttggagggtccatggtgccaatgctatgttcctttgtcttttttagctaggaaaagtagaccaagagttttacaaagatagtgacctgtccctaggagtcaccatcaatgtgtggggaagaaaagtgctcctttatgactgtgatgaatttacgaagtcttattataagtctaaatatggaattggtaagtgatacatatgtcaattaaaaatatttttaaaattaaattgtttgttccctaattaagattttactttggagtttcaaatgctaggctcataatagctaccacttattgtgcatttgctatcttccagccgtttgttgtcttatatattcctaacaattctctatggataggctcattatccccattttagaggtgaaaaaaaccgaggcttaaagggggctcatttgtccaaggttatacagtgagyaaagagtgagccaagatttgaacttgtctgcctgatgctgggggggtaaatgttttggtttagcaatcgaaatggaaatctgaatgcttttcttttcacttacttcttcttaccacaatggatatacctaattgagttattgagggaattctcttctgctagtttgctctacctttcctggtgaggctcagccaggttttaagcttctctcttctcagatattaactccattccagtaaggttagttcagttcagaatgaaaatgagtgattgattaagcacctactatatgtaggtcactgtagtagacttaggagatagagttgtgtaagaggtttctaggctggaaggggaactgagacctgcagcgagtgacaccgtgttatgagtgtcttggaagctggcggaggatgtgacgtgaaacctaaagcataaaccctcatttgttaaactcccctctacctgaggctccaggtacctgctgctgctaggaattgatgggacttgctgacctcccagtttggtactggagttgggatagtgggtacttagtcctgtacttctttctgaaccttggagtattcatatgaacacacttccccgaggggcaagatggaagccaagtgcaaccgcagcttcttgaaagacaaggtgctttgtcactagaatgagatgaagccatgttatgtgtcttgttgtccgcattgtgtagtattcctggccttctgggaatctttatattgtgagagaaggcacatcaagtacacaagggggttagagtgaaaaaggcttacagttttactcttaggttcattaggggaatttgttgcactgcatctgcatgccagattagtcaaaatgtatgggccctactggggccaaattggtggcctctttttattttctaaaattagtccccttcagtggacacagttgggcatatttgccttggggactgtggacaagaagcagccaggaatgtgcaggtggcagctgctatagagaagctgctggtggcccctagactgtgggaaaagaatttggcctttaataaatgtagatgcctgtttggaatccgtctttagtgtagaatgaaaatttaaatgtatatatcaagatgagtcaccaaaaaccgtaacttacacctgatgattaccttaatataaaggatgtggtgttccaaagcattatatgattccttaaacataaagtctaacttttggttgatgtttgtctgtcagcttggtgagaatatgaaagttgcatttgggaaaatgaatgtcctactggtgggacttagtatgttgttagggtcttaacggcttctctagaaaattttttgaggcagtgtgaattccctggtgtgctccaaatcgagccatcctgggtaaatgtatcagcttcaaatgtcctatggtccatttcagtcgagtccttgtgctaatttctttctgttcacttcttttgttcactccgtggactaattgtattatgtaaaaaaaaagtagtctgtgcctctaaagctaatataacatgagcattatgcatttaaacagaaaattatgcaaatgcaaaattatgatgcatttcatagtcacactgactttttatatttctcataacatatgttaaaatatcccatttaacagacactattattacacaacatttcttgtgttacaacagtgtacttaatgtaagtaaagactagaaattatatctatgatgaggtggaggggagaatgaatcagtgttctctgataatctttgcatttgcttttcctgattttttggtaaggttaaattaatatccttaatgttgcttagatacagttatttctgccattttaattttatttatagttcatctggtctcagcaattttttaaattgaccaaattacatgcgttatgttttggtatccttaaaacccaaaccaggacaaagtcccatcaatcattgtggttctgtcaataattgtggtcacatttcctcctttgtcaataattgtgttcagtagaaaacctgggtatctccactgtgcagcacgcaggaaggatctgacaagcagcagcaacacagctaggggcgtctctagcaggaagtcacgggagatttctaacgcagtacgccgccttggtgctttagtaccttctcctgtgtaatgacaccccaacatattttgggggagaaaaaatggcagacaaagagaaggagttggccacagtcccaagaaaggtacatggataacctttctatttatgtagaagtggagggcttgctaaaattccaagagacatttgagctcctgtgtaaaactcaatctcttaagatgattccttcatacatttaaggattctaaggagaaggtgattccatagatttcttctctttaatagtgcagtgggaccccctccatcagacagtttggccatcctgctggccctggcttgcctgccaggctgtagcatgtcactccctcattattttatgtgaatgaacacggtccggcagatggaggtctgttgatctttcctatagcatgaaggttgaaaaaggctctaggggttccagcaggtgtttctttcactaaaaggacagggatcaaatgtaaactgttcttacgtaggaatttctgctttaggttattatttgtctatcagtggactttcttattttttcttagtggctgggacaatgaaactagtaacaagattgttcattcttgttgctgttgaacacttattgggctatgcttagattcaacaaaaatcttaaagcacctttaattttgtggagtcatttctggccatctctgaatttttaggaacagcaggacatttaagatgagtgtttaatgattatttgagtgaattggacacttaaaattgcaccaataggatagaattggcttctggtctcatcacatggccctgatggacctaacaattttgtttcttttgcttcccctatgaaatgaagatggttgagatgggaggattcttaaagattttatagctctaacataatgtgattcacgaatttaggtttcattgaaatcatttgacatgggtattgaatacaagcacaagtggatttaccttgaagctaatgaagcgtaatctttagaggtcttcctttccaggggtcccaatccaaggccctggcctaactttgtcttagtaatttgacattctttgcctagaagagctttgcccaaattatttaagcttccagcctcccaaaacctgtattcatctctaggctactagaacataagcagtgaacgttgaggtaactgaaggcttttcccagtagtctttcccactgagatggtgaatagaaaatcaccacgaagaagcattaagactcctttgtaatatgtatcatctgtctgccaatttgttggaatctagtcaaccatggatgggcattcaatatatatatgttttgacaagtcacttggaattagaggaatcagataattaaaagacatatctgtctcaggatctagcagaatgccaacttgagacattggggaagatgctttgtacaaaaatgtatactttttcatttattcaatgaatatttttgaacacctaaaacacgcaggatgctgggatgatggaaaaccaaagtgaggaaacttgtcattcagctgtgagtccagagctttgtgaacgtatgcaaattacccagataaatgggatttaaagttggatcttgagccagagtttccaaaaagatgtatgtggtggtataaaagtcaggcatgatggagtggaaaagttctcagcttttatacactagatggcactgtgggtgcagaggaaagctctaaattggttcttttgttacttaaatctgttgcaaaaattatatggttgagaaaacaacagtgtggtataagccctgtaattctagggggaagtgtagaatgcagtcctaattactttgagattcaatatgtgtcctcttttggttagactgcttagattggtatgtagagttgtatgtatatgtctcctgttgaaagaaactcctcaggcccagatttttaaataatcacatacagctctcctgccatggctatgatgttcttcctgaaatgaaagaccaaacagtggtgtgttagatgtaatggttagcaatgatagagtctactgcaattctgcccaattccaagatttgaactctcctctttatttccaagacttttctttaaaatcaccataaaaatagcaatagttgaagctcacaagtcacttctgtactggcacactggctcccccctttcactgagtcacctttataaacatgtctgctgtaagcagtctctgttaggatgtaacaatactcttttggggattgtttttggggaaatttcacacaaaggctgctaggaagtctaaggacatatgaaagctgaaaatgttttcaacaagagttagaagtggcctcaagcccttagccttttgatcatcagttaaaaaacaaaacaaaacaaaacaaaacaaaaaccaaacaaccaccttaatattaagagttaggttatcttggatgaaaaattgatctccattttctcttccggaggtgtgcactaaaatttgtactcttcctctatgggaactttgacagtggaaaaggaaatatttgcttatgtagaactcctttcatacaggattgaaaacacctatgtcatactgaagcttggggaagaagtagaaaatagattctgtgggagtttgttttgttttgttttaggaaagatgtggcatctttttttgccatttatgttggggacaaacacagtgacttggatagaccaggtcaatatgttccttgctctggagagcacggttgcttctgagattgtacagcctcgcaaatgagtacctgaaagctcctaggctattacaaatatgttaccagctctctctccacctctctttcctcacagatgataagtatataaataaaatcaacagtatttaccgcgtagcactcccttggagagagtaggcagttggctattttaaaagttttttctttttctgttttgtttgttcgcttcattgcatttgagtgcaattgtagtcttttcttgggcttaacaaaagctacctggggccgtggctggtgagaggaaagttctgttttggtgtttgtttttgaactacatagggaagtactatgacctggagttactttggaggcaatggagggtactcaaatasagggtgcagtaggaggagatggtggatggggaaggataaaggtgaatagtcaggagtaagtcctgtttggaaaagaattttattagtgagtgttgactgagataggagagggctaaattacaggttaaaatgtggaacgagtggcctaaagtttcaagtttgaattttcatattattggaaaaatcagaggagaacaaaaaatattcagaaatgggaatgtgatgacaaaatataaacgtttacttatttgacatagattcttttttttttttttaacttttgaaccaatggtgattattaagtgagttccatggtttttgtaaacatgattgaaaagtactctcacaggattttgctgttttgtttgaaagagtttaaaatagtctacaaagatctccatgttcatcttgaaaacataacaaacctttcaaaacagccataatcagggcaaaaaaaatattgatgttttgtttgcctttgttttgttctagagaactttacctcagtttcatgcaagcctccttctcctcctccaaaaatagaaaggaaatttccaccttacaacggttttggttctgaagaggattctctccgtaactgcatagacctcaagcccacacctcatcggaggaacttcaagaagtttatggaaaaagacaggtgcttgagggaaccatgattttagtctgatctttcccaaatgtgtttggggtttataacatagttctcatgacgaaacagatgtcacgcagctcatctaattgcaagtccagggagacattattataggcttttaatgaggttgattaacatgcacgtattaacaggttcttacctgagtgcttattttaataagtatcatctggaggcccctaaagtaatattatctctagtctatgttgcctttccatatctatctatatatctgtctcccgaaaataggaaagatgtagagtaggagttaacaagctctttcttaaagggtcagataggaaatatttttggccttgtgggccatacggtgtctgtcacaaccactcagatctgcctttgtagcgtgaaagcaccacagacagaatgtaaatgattgtgtgactgtgttccaataagactttttttatggacactgacattcaagtttcatgtaatttttacatatcacaaaatattactcttattttgatyttgccaaccgtttcaaaatgtaaaaaccattcttatctcaaaagtcatataaaaacaggtggcctggtagatttggctcactgactgtggtttgccaacccctgctatagagatttcaaggatttatacgtgtttttaaaagtgttatttggtgattaatgttgttttcacttgagaggttggttgagttcagtaaccataggtttctcacttggctgaatataattttaaatgatggactttcagaagtattcctaatagacatggagaaaaacctgcctgtaaatcatgcatatagaatgtagacactgccctcggctactttttgcttctgcagggagagcaggccctggagaaagaagtcaggggaaaagtggtggggaaacattgtaggtgcttgaataggatgtgggctaagggttacagtcctgtgtgagggaaataatggataaggagattctggggagaagcagtgataaagggaatgtggtaagtctaggagaaggagaagaaaaagacatcctgaatttcataaaattgattggggtcaggtgctgttgtagcacatttgaaggagagagaacagtagttatgttgtatctataaaagtggtaaaaattgattaagaattatatagaatgtcttaaagtctgcctttgctatgacatgatgtcctttgtctttctagaaataatcttttacttttaaggattttagggttctatttttaagttttagatttgatgcttctcaggagtggtccctgtactttttagaaatgctaattattgtgtctcccccacccccagactgactgagatagaagctctggggaaggggcccaacattctgaattttctcaagtcttccagtggattctgagacacaccagtgtttgagaaccactgatttttatcacataagagggttgccagcttatactctgtcctcccttatcgagaacagtgtttaggtgaggttccagggtaggacttttgatggctaactgctgtttttaaggacagccacccgaaggaggcgggcaggaagaatgtccctattgtaaaaggagagggaatttttcttataagtaaacaagatgaaatattatccagggtgttgtttctggaacccaggggaaaaccgttctttgtgagtagttgacttagtccctctttctgtctacactgggtaaacttgcccacagaacactgactgtagatggtattccatgttcttttcatgttgtcctggctggagaatggtagtataggcacaaatgtctctcattttgttctttctgtccactgctcaatctgtgccaggaatacactttcctcaagctcttctcacacagggaccatgtttccatagtaactagcacattcggctggagacttatagatgagtttgaataacccaaggttttaaaactgtaagaacctaaggaagatgatttcacaaagcatacaaagaatagttttttaaaatacaaataaactgtgaattgagacatggaattgtacatgacacattgattatatatatattgctattaaaaatgtacttggtgctattattatgaggttaatgctgatctatgagtcattggagggaatagtttcagattaaagcatatgagcttttgatggatataaagatcttctttattatctgggtagatatcactgcggtagcctgctgggcagattgtctagtctgaggagggagaaccaggataatatctttcttgctgcaccaggctgaattagttactctgttctttgtgtgcccacagtactctgttgattatatttctaataataatattactactattactgattactcataataagccattagtggttactatgtgctatgttacaatacttaatctaatttaatcatcaaatccttggaaagtagataatgttattgtacccattttttacatgagaaaactgaggctcagagaggccatacaacttcctcaaggtgacacagctaatttttagctgaactaggaactgaacccagggaaatctgacttctggaatttacctgtctttcgacagaacctatacatataacagtgcatcttaatgacttgtttatgtaatttgtgggctccttttagaccaagagctccttgagggcaggggccagctttattgcttccataagagttagtgctggctatatatttggggatcaatagtttgtctaagaagagaaggaatggatgaagaagtgagcaaatagaataaatgttcactcatccagttcttaatcatggatagaagagacagatgacttctcaccaggagggttattataccagacttgtgccagtcataaccatatagcatccaaaaattcatggtttaatcttcatctctgtcttgttacagatattgtccatctgctgtccccaccagtcattttttttcttcttttaaaaatgtttccccattaataaaaataagccttcatgtgtgttccaaccataagactctatagctctagatatatttgaggtttttagtaggtgtatagccctggatgagccattcattatcttagtgaataactagttcttgaatccctgctgtgtgccaagcagtgttctgggtgtttgtgatacatcagtgaacaaaatagacaccaaggcctgccatcgtggaacttatattctagttctgggaggtggaccatcaattaatacataagtaaattatgaagtatttacaagatgttaagtactgtgaaaaaaataaagaaggtattaagttgctgtggaaagaataaaggcagattgggagtatggggctgaggaacattcctggttgcaattttaaatagtgtggtcttgatggactttactgaggagaggaaatgtgctccaggcaaaaggaacagtcggtgtaaaggccctgagcaagaagtgtgcttgggatgtgcaaggagcatccgggaggccgacatggatggagtagatgagtaaagagcagagcacacagagaggagatgagagtgtatgggggactgggtacacagggctctacagactgtttaaggatgcttttgactttgagtgataagggggccattagaaaatttgagcagagaagtgacttgagctgattttcttcttaaaagaatcattccagtgtagtgttgagggcagactatagatggcagtggtggaaattaagactgggtaagaagctactgcagtagtccaagagaaaagttttggtggctcagatctgggtgagcgcagtggaagtgatgaaattaattagtggatcctggaattattttgagggtagggccagtgggattccctgacaaactggatatgaagtatgaaagaagtgaggagttaagatgactctcaagatttgggcttgagcaactggaagggtggagttgccatctactgagatgagaaagactggagatagggtaggtttagggacaagagtagaagttcagttttagaaccagttaagtttgggatgtctattagatatcaagtggcaataccaagtaggcagttggatacatgtgtgagtatagggttcagaagataggtgaatgtggatgccatcagcatgtagatggtatttaaagccatgataccaaattgtattaaagccttgagattggatgaaatcaccaagggagtgaatatacctagagcagagcatgaccaaggaataaactctggaacatccccaattaggagcttggggaaaaaaggaggaaccaacaaaggagactaaaaaggagcaaacaaggaggtaggagcacaaccaagagaatgctggatcccggaagccagtgaagcaagagtaacactgaaggagtgatcatttgtgccaattgctgctgattggttaagttagataggcacaaaaaattaagcattggaattggcaccgtggagatcattgttgacctctacaagagcagtttaggtagagcaaacctaatggaaatggattcaagagaaaatgggagaagaatttgaggtaatgattttagataactctgggctgtatgtagaaaaagttaagacatggcttcttgacctaggaacttataatttgtttggggacaacgggaataaacacatttttaaaacaaccatccaagagtaaaagtctatatagagctaaattgggtgtggccttacaattgatgcaggaggtataagtaggtggtcagctggagcattgtgataaaaaagaatattctgggaagtttgaaaagtagttattagggaaatatctgaaaacatttgcagtgcttctcaaagtatgcccaggggaccaccttatcagaatcttctggggtgcttattaataatgcaggtttctggagatgtgagctaactactgaatccccccatatctctggggattggactctggattctatatatttaacaagctccccaggtgacttttatatataataaactttgtgaactgctattctaaaagttttattgagtagattatattctcaattgatgagatctccagaacactagatttaggtgaaaaaaaaaaggcatattgaacgtgtgaaaaacccacacttaacatgtacacttataaattataagaagttaaatttacagtaatattccttttcctgaagttagaccttcctcagttgtttcagtgatatttctagtatctgaaatgttatggctttcttgtgtgagaggggctaccaaatctatttgttacatataaatccaattatataccagagaagatggttgacaaggcatagcttccccccacactatatgaggtctgtctgaagcctggaaactgggtacagagaaaacagccatgcagacctggctgctttgctcaggctgttctggggtgagccttccaaactgctgcacaccgtctcacatggggcctcaagcctaggaatcttggtgctatcctttttcagcccggattcttgtacagcctgagaaaggagcagagaaaagcactttttgcctctgcaaatcagaaatacttggtttattttttaaatcactgtgaacacaaggaaagaatgattttcagtataggagaccctgcaagggaagacttctctgcttagagttgtgacagaggacatggtttattctcctgtgtacctccctggggtaatgattttagttatcaaagacctctccaagggtttactgtttcttacaaagtccacctttcactagcggatatccacagacatgcttctgctacagaccataaatcaatttcttcagtgaccaggcaatcagctttggtaacttttaattctataatttgatcctatctttagtctactagactattctatttatgcatagaattctgagtgcaaattccaatcaatacagatctcataacaattttccataaacatttattgaatacttacaatgtaaaaagtattatattagataatggttaataagacaatctttgtccttggaaaacagacttgtaatggcttacaatacgagtgataagcactatttaaaaaaaaaaaaaggtgggtctatcatatttgttatagcatttgaaaaggaaaagttaatttttcccttgaaggaagttggggggttgctggggagctggaggagtgagtctgagaggggaggatgtgggctggaagacagaaaagtaaagggcatgagacagtgagtggtgaatgggggaggtagccccagatactggcagagcccaggattgcccaggcagtagggctaggtgcttgctcttctttccagcatgattattgtgattggtgactagccttgtcattagagaacagcctgttagtgcagctggtttgaacagtgtgtttatgacgtttgttttgggttcattttcccaatgtgttacccaggacatgtaaagaatcagagatatcttaatatactgagaaaattcctctgcatttagatttagaaccttaattagacgatggttgaactctttcactttggacagtttatgcctactatattaaagccatattatatcttttgcagacttttaaaaacataatatgtggaagattacctgtataatgctctaactctcatttctcttccatttagctatggctmcaaaagcaatatactccgtttttttgcaaaactagtcacagacaaatgtgttgayttggacaggatgtttgttatttcatattatctcggtgatgacaccatttcagtgtttgaacctatagagaggaattcaggtaagagatatactcttcacagtattttcttgagaacattttaagtgtctcttcatgttgaaaattagggaacatgatctgattttgtagcttagattatctacaatagaggctttataaaaaaaaaccctgaacaatagggttctttttacagatctcttaaatgggaacctaaacatttaaaatgatagaagtggaacagttttggttggcttagggctgggagacctggggttacctccttcttgccactatccccacttccgctgtggcctctgaggtacctctgtggaacccaagggcttcaaaatcatggtctgagtaccactagttttacttgtatccagcaagccaagaggaagtctgtattcttggtagtcctacttacaacatttttgtttggctgtaagacaagaatcccagatacacaaattcaatcgtcagggtccatctttatctggtccttctgtctgttgaggttgttgccaaggttccagcactcaggcccacagaatgcctctctgtaatatgctggtaccactgtcattgctgaggagaggcattgacttgcccaatcatggcactgtaggatcctgttctttgtctcaacatgtttagaacttttatcagtgctgaagacacgcatttgggaagaataatcagtgatgtgctggttaactggctctttgaaaatattttaaaagccctgatttgtactgtttgccagtttccatggtgtgaataccccaaccatggccaatttcaagcagccaagagtttaaaaactggcttgcaaaatctctgaaaattcaactgtcagctcctatgagctggtatgagctacttagcacaccaatgagtaaggaataacttgtataactaaggctccagagtgatttgaataatggatcaaatcttaaaatatgaaattgcctagggatgaatataagtcatgctcttacaggtcaaaaatcaactctatacacttagaatggggaagatgtggccaaacaagttgcagcatgtatgaaatagaaaggagtgatggtagtcaacaacaagcttactagtaatcctagtggccatgattgagaacttactattatccttacaaggactttatgaggttaggttttgtgttagtccagctcctctaagaagcaaatgccaagacaggattaaatatgcaagagatttaatagggggaatgctggtgagggaaaatgtggaaggagccagaagaggctgggagagctg[450 bp omitted]ttgaatgtggtaggaggagtgggatgaagtgaccaaaaagcttatctggtctcaggctatatttataggtctgtagatttcagttcagtatcagaagatcctggagttccctgttcaactctactggctactttccaagaggtcaaaacaaataatgtctagaagagaacagatgaaatgatgacagttctggaaagtaagaaatatgaggcattactaaaagaagcaaaggaattttacctgtaggaaaaaaagacttaaggggactcccatagttatctttaaacacttaagtaatctcctttacagaagtagggcatttgctacctaatctgcacgtcagattaagtataagacatcatctgggacaaataggtggaaataagcacaagtgaggaattttctaactggtactgttcaaacgtgctctaaagatgagtgccttcctgatgttccacactcccagtatgctgctgggcatatataggaggtccttgccaagtgtttattggactgggaagggagtagacagagagaagaaaaggctagaattacacaccattttttctctgttttttcttttttttgtttttttgagatggaatcttgctatgctgctcaggctggtcttgtactgctggcctcaagtgatcctcgtgcctcagcctcttgcgttgctgggactgcaggcacatgccaccatgcctggctttgctttttgtcttgaacatcctcacctaggaagtcttatttcttcactcactgcctcattcttcccttaagtccaaaaataacaggcaatatgagttcacaggtaacttatatggtggtctgtgcttgaagataaagtaactctgaaggcaagtcacgtggttcttttaagaataaaggctgctcatgaacttttctattttttataggaattgctggtgggatgttcttgaaaagaagtcgcgttaagaagcctggacaagaagtctttaaaagtgaactatctgaatatatcaaggccgagsagctgtacattggagtcacggtgaatgtgaatggttacctatttcgtttgctcaatgctgatgagtataccttaaactacatggagcagaatacagataaggtgaatttactttgtataattcttgacttgcctctcagccctccgcagtctgtgtttttctttctctagggcctyttcttcttcatcttgccaccagttgtacattgtgcattcacacatgtgggcatgaataatggattcgtgtgacttggccacatgtcccatcacagaggccaggttcttgtctactctgtttacatgctgggttctcttctgcccagcatcacggattccaggcacaggcaggaggcagggccagggttgaatcaagtttcctgggttttctgctgacgctaacaatgttttcagaaagaaattcaacaactataggaaaggaagaaaaatctggtgccacacactgtgccgtcccagttaattggcacaggccaacagagaaggccaagacctgaacaaacagaaacctcaagggaactgaatagttgctgggtttrcaacttcccataacagtagccacctgaggcctaaataaggatttaaggataaactggcaacagtgagctcaaagagtttttttttttgaaataagatggcagatgggtactgttactgcaagtgccattatggcaatgctgttcggtaaaaataacatattgataaaatcttgattttaaatgtggactagttcggtgtacaaacatgtttatttgggagtcattgcctaatatggaaaaatctatctggaaaattttattttaaaagtttacctataagtgataatatttatgtgccatttatatacatacagtgccaattttgtctcatttatatataaaatggctggggttaagttgctaagattgatgtctctgtgtacatcacatcattcatatcagtttggatcctctgagaagcagacgccaagacagaatgagaagtgtgagagatgttgtggtggaaatttctgagaaggataaagggggagggggcaggagtgggcaggggggaccttcagaccgggaggcaggttgaacccctatggaaggagagcgaaaggaaggaggaggggtgggtagggagagcctcagctgacaacacagctctgagaaagtctcaaccaggctgatggggagccccagagcacagactgcccatcagagaggtcccctgtcaggcaggaatcacctggttctagtccccctgctgtgctgtgtcattgggtgggaacagcttggggagagtgtggccccagcagcgacattgcctgtgaactctgtgtgaatccggaaggtatggcagctggagtctgtcagccaacaatgctcttctccacagggtctctcttgataggaggcctgagaagcgccctccatggctgccatgccatctctccatttgtagtcttagggattcaggttatcataaaaccttgaaccagtagctattcgaaaacactgaatctagatgagaaactcagtaattgggagtttagatttctggagaccagcaggcctggcttgggaacctgactccacattaatagctgagggaccttagatattgtatttttcctgaacttcagtttcttcatctttggaatgggaggaacaacagtgcctgtttgatagaattgctatgaagattagatgtgataatgtgtatgaagcgctgagctaaccatgaggcccatggtaagctcaatcagtgttgctattgtaaattagagttctatttctaatcagagggtgagcctataccttaatataaaatatatatagcataaatataagatataaaggtttttttttcctttgaggacaataaaagcagggtaggacattatctggaatcagcatcccaagtcaaaactgcattattttaaaactgcccttaacaaagacattctaagcagagaaggattgctatactatttaatatcagcctgaggaatcttttcaaaagagctaatagatcctgtcatggaaatagatgaaaggaaatgcaaaaaaagtgggaggagtaggggtctgcgataggtgccaaaccacctggatcattttctggtgggagagagggatctttagactaaattgccatcaatatttttattttaaaatttaatctcatttttggtctcttacctataattatttacgaccttatgtttcactggatgcaagaagtattcttaccaagtcaaaaagctagtcacaggataagagacaggaacagtggacggcccagagaatgactgtgcgagggttagggtgcttgcgtggatctttgatacccagccttgctctcatcagtgcgttgcctaatggacagcagttccagggggaccccattctaaagatctagagaaaatggagggctacttatccagttttgaatccccattttctccattaggatctcccaacatattgggccactatccaagggttagagggaggaggctgagatggaagcaggggttgttttctgatctctgtggcctggtgttccttaagctcatttccctcagagctggggcctatgctgatgtcagctgttgtccagaagctttaattgaggagatacaaagctagtcatgccttctcggtgttggtttctttgcaaagacaaatctgctaacttcatattcacagtgtgaagtccctttgctggccatcagcaagattgggctcctgaactgttaggaatatttaaatatgtttttcctttcatttcccccttacagtatcctttcagtaacctcaaacttgccctacaaaagctgaagcaagaagaaggaaaatccagagagctcaagcaggtatttaaagctgctgactctaagcacacaaatatggtggattataatacattcaggtaagccatattctgctaacaatcacctgttttcccctcaaggttgtccaaagaacagagagaactatttctttcctaatcagttaactattttttattaggaattggcatttctttgagtttgtattattttgtggtaaagttttggccacgaatactctagtaaatgttaygaatttacatataaaaggagtttgtacatgagaacagagggacaagagcatagaaagtcagctggtcacattgtcttatgaatcaggaggttgaaggatcagcagaatgccaggaatgatgcatctgagtgagaaagacagaaaaaagcaccgctaagagcacgtcctccctaccaaaatctgggggacaaaggagggacatctccaggaatgtgatgaagttggaaaatagtaaaaacttcaccgattatcagagcaaaggtgatatgtatgcatctgtgtatacatgtgcttacacacatatgtgtattctgaaagacatgaaaatataggaatcgagggaaaaatatatgacagtagttggaaatattataacaaatcatgattaagattttctctaaggtgaagctgaattctgggactatccagtggctgaccgaggcaaatttccaaacagcagaaacacagggaaattcaaattcagggtctagtacaatcgtgagacttcttaggctgaaaacaaagtgaatggagcatttaggagaataaattaaatcatggatggaggacaaaggggactttctctttaggctgagaattctggctcctgacaacgatagtggctgaaagctatatagtaaactccgcttgatgcagtcaagatgtgggctgagaaatgaggaagtgagcccaggagagggtagcagggaggtctttccaactttgtgtctgcagtcgcctattgcatcactacctggtggcctggagcccaccattaggcccagagtgtcccaagagctcatttgttgttttaacaaagctcttttgtgtctccaaaatgttctttggagagaagcagtcagaggacatatttttattgtttagaattcccaaccttctgggatcaataagaatttatagttctttgttattgttcatagtcacatacacatgttcatagtgttttggaaaataaatggagacagtaaagagcagagacaattacacaggccatgggctaatggaaggcagtggaggtgaaagcaagaaatttccatcagaaatgagggagtggtttcgttttattatttgtgtccttttacaaaagcatccatttttccagcactcgcaaagtctattggaaacactttagtgagtttatagggctttttgggaagcacttaggccaggcaggcgatccaaggaggaaaagttgctttgcagatggaggcctgaccctaattgtgggtgggataaagggccactacgctgtgattggaggggtggcctcaaggagctgcatgctctaaaagaaggacctccccgtcccagaaattccttaaaatgaaactcagatcaggtttcgcctggcttgaaaaatccttcagtggcttgccattgtcctcacaataagatccaaacatttgactgcagccagcaaggccttgagtgatgtgagtctgtttgtatttccagtgtcatcacctctttttctgcagccctgtcttttggccttactgactgtctttcggtttctcaaacacatcaagctctttcctgtctctgagcctatgcacaccaagttccctctgcctgaaatgcagtcaccaccatcctctgcatggcacactctaggactcatctcaaatgccaactcccagaggggctttcattcagaggggctttctagatcctatctagagtagatcacctgctgttattcttagccacttgtttatatttttcacagcacttagcacaacttgcagttattttatttagagatctgtttacttgggggtggggtatctatgtgtatgtgctgtgtgtgtcttctcctattcgaatgtgagctttctgagggtggggaactcaatggtgttgttccctgcagcatcccctactgctgggctcaatacatatagttactaaatgaaataatgaaccactagagttgttcctgggggttctagtttggaggtgatggcatggccttcaaatgagagcgtagaccaagagtctagatgtctcaatccatatgacatgcttggtgccggatgctgagccctctgtgcttggggctgctcatttgtgctcagcccacaaatggtccctgcaccttgtcttcagccccatcttatgcttttcaaactctttgagcaaagaaaaaggaactacatagcccgtgtctatcacatcataccctaattcaattctttgctcagtgcttttactagctaatattttcctttcattatgtatgcgtatgtgtgtgtgtgtttgtgtgtgtgtgtgtattctgactctcctcatcagaatataacctctttgagggcagggaccttctctttcttgttttctgctttagccttatgacttatttcagtgtctggcaaacaatagggtgttaataaatactagttgaatgggtacattttttttttgtttagtgtttaatatgcctcagatgaaataattctctgagataattctctgcttttgtgtcttttgtgttctaccttctctcttttctcttctccttccttccttccttccttcttctttttctttttcttttttttattatactttaaattctggggtacatgtgcagaacgtgcaggtttgttacctaggtatacacgtgccatggtggtttgctgcacccatcaacccatcatctacattacgtatttctcctgatgctatccctcccctaggtcccgaccccccgacaggccccggtgtatgatgttcccctccctgtgtacatgtgttctgaatgtgtacattttatctagccctcactgctttggctttgacctgtaggctgattgtgtccatgctagttcttcaagctcagacctttctcctgagctataaacctggaaacacgaatacctctgggacgtttccccctcgcatgtctcttaggcatcccagaaataactttccctaacttgacctcattttcttctttcataaagtagcagctaggagactgtatcctgataaaggccatcatgggcatccccaagagtccagaccaggtgttggctttgtgtctcccctctcccctctctcgacctctcccactcaccctttggaattatacgtcttgaactacctctgggaactttcccttctttacatctgcagcttcacggttgtagttcagcttttcatcactgtttacttggaccctctggagagcagtgtaactgatctctttttcttaactctcatcctgcaaagttttgccagagtgaccttcctaaactctgatcggatcattcttctgctcttaaccctgcatcagtgtgtcacatgagtttgcctacctttagctccgtatttccatctcactagaagaatacttttgtagaagccaccatgtattgagcacttactgggggctaagcatcgtgctaaatgctttatacctactcttcactggtagcctcctgtcaagttgttacttgtttgcttccctgcctccacatcagctcctgccaagtgcaatagatgtttgctgaataatttaatgaacgatcctatttctcaaggaacgttcagtctaaagcttgcagcaatcaagtaaataattgatttccttgcaccagggaagggccatctggctcttacttagggaagtaaggagaagctaggcctgatcctcactagccaagtaacttgggcaactcacttcacctacctgtatctcactcatttgttcatatattggtctctgaggtcccttctaggctctgacaactggaaactctgaaaatgtaagtttataatattcttgtaaaatgttctcttttcaaatttgtacattgagatagtagagaagagcagaggcaagcaaaggcaggactgcagcataggcctatgggcttggcctctgtggccctgactctcttctgcttagatacctggcactctcagcatacacctggggcttcggggcccagacctgctgctctgggcagtggtccaagcccccagcattgccctttttctcagagatgtgcatctcctctcagaaaaactttgagggtaggagctgataaactacctctgtataaggtgccatggtcaataatggattaatgtgtgggcctctcggagatatttgcctcagaatagacctgatggaatgcagggacaggcagccatcaggaaacagaagtagggaatggtttttgttttttttttttttaatttttttatttgggtagggaacatttctcttttgccttgtgggaattcaccacttctgcttctgtttcattgatcctctttagaatctttttggcatggtctatcagattcgcctgtgagagctgctgatcgttatccaagagagtgcagataacctttcttagagccttaggatagatacctggtggcagtggtgggcagatttcagcagggagcagggcagggactaagcttggcagggctagtatttcatgcagttgggaacataggcagggtggggcttcccagtgagggccctggactctgaaccacaggcagcagcagcagcagcagcagcactgagagcccaatgccaaggaagatgtggtcagtccatctctctggccacctccctgagccttgatctacccatcagagatgacacctggccccatgtagcctgtgtgtattttggttagctgagtgcttgtctcttctctccacctggggaagctctcagagggcagggcccatgcctggttcactcttgtgtctttcccagatgcctccagaacccagtgtatcagacctcaatgaacatagtgaattattacagattttttcttcaggtccccgttatcagttgcagagtcagtagctctcctgtgaacatccatgtaataaattccttctaagatttagaacctcaaggagattttctcccttgtaaaactaaaattcttcctaaaagaggtaatataatagaaatagttcttatcactggttttggagttggcaaacccagatctagctcttggctctcttgtttaccagcttagtggccttggggaagctgctgaataattttttcatctrtaaaatggggatagtaatacataggacacagctgttgtgatgaatacatttgatactgatattaaaattcttattgtagctgactagtgcatggtggatactcagaaagtgaaaatgctttatcccaatagttgtgaactggtgtcaccaacaacagtaataggaaggtacatcttgtttccagtatttcaataagctttatatttactcatggtgggggtcattcaaaacattctttaataaatgaggttgaaagagaaactctaaaaacttgtaggccttgaagatggaaaataataaacatcattgttggtggaccaaggctgggaaacattaatataatctaccctattgctgtcctttacttcacggaagcaaattgtaaatttagtgcttagaacatggtaatgatctcatcctgatttatctaggacaattatctctccttttatatggttttgccctatttttatttggactactctgtgtacattgctattggtgttttttattgtaagcaatctagcatcttttaaggaagccactagtctatgaatctatatgaacaaaagcaaaaacaaagacaaataaaatcccaaagcactcaaacataggttcttatcatgaactaaatagattcttggacagtattcatagcctgtcttcaaaatggaaatttccatatatgtttttgaaaacagcattttgaactttcctaaaagcattaaatataaataatgtgatgttgtagaaagaatgctagcctgggaatcaaaaagatggagatctttgatttgattctgtcactgtctggtggtggtgtttgtattggtgagggcttagttttaaaaaggaatatcctctctggctagttaagcaaaaaaaaaaggaatttattaaaaggagcctgggtggttcacagtgtctttggaagggctggagaaacaagctcaaggctgaactataggaacagtgcccaaaacagggctgtagaacttgtctgatgagaaaatgacctctgttaccaccacccatgactcattgctgcacttgcattgctgccaagaacttgattttaccacagccataactaccactatttctggcaatcgtcctttaccacccctgaaggctgggctcctttgacaccaaacgtggcccaccctgagctgcttttcttctgttaatcccttctgaggcacagtcttaagtaagcttccctgattggtagagagcctgggtcacctgcatatttctaactgcaaggaagtctgggaaattgagctctgacctctatgttggggtggtaggaaacttacgtgggaatttccccaaatatagaaaggctatttaaaagatagcctttgtagaaagtttcagttagacaggatgaataagttctggagatctggagatctattgtacatcatggtgactatagtgaataatgatgtattatatacttggattgctaagagagtagctcttaaatgttctcaccacaaaaaaataagcatgtgaggtgatagatatgtgagttagcttgagttaattacttctaaatgtatacctgtatcaaaacattacattatgtgctgtaaatatatacaattttatttgtcaattatactttaataaagctggggggaaattgaataaataaaagatacccttttcatttgccatgaatattgcagggatagtaaatccaaaccaacatgagccaaacagggaacacgaatatatgttgacaacagggacaaagcacctacctagttttagtactttgaaaatattgttttgactcgccaagcagctaaacaagaggcaaagccctcccctacgcttggctacttttgcaatctctgatgaacttttctgagtttccattgccttaaatgaaggtattggattaaaaacaggtttataggttgaaagctggcagttatattttgtatggcttttgtttaatgtttttaaaattgggagtttaaacctaagaatatatatatctggtgcctcttggaaaatagaaattggacccacatttctctatggcaacaatcttttgggggtgaatggcacttgccctccttagatagagcctgttctctgcatttcttctcagtttctacaagtccttattgtctcacgctaaggcactttctcctatttatcttacatacctaccccagtaggtactagactaggtaattcttggattagatcatataaggcacctcccagacataaaattccattattttgttactctaggtattgtggaaataggcatttaggaatcactgtataaatagttcaaaatagaactgaagactaattttttaaaattagaatccaaatatgattgtatacttggaaaatccaaaggaatcaattttaaaatggttggaactattaagagtattcaggaaagtagctaaatataagaaagctatatatagaacaatagctttactttatatcagcaataactagttaagaagtgttctgaaaaggggaatactatttgctgtagcaacaaaaatgaaatatctgggaataaattggacaagaagcgtgagactaaaatgaatgcaatttttaaacttgatatctctgaatgggaagacaatattgtgaaaattctaattttccaaatttatagatttgaagcaattccaatcagaattgcacagcaggtttttgctcttgctgttgttagatttggttttgtttaacagggttaagggagataaattgactgattgattatgaaggttcatcaagaagaataaggggttgagaatatccaagaaaatgttgaaaagaatattaaaatgtagatactagaaaggtatatgatttacatacatttgaaaacattttctagcagagaaacaaaaatatcagtgaaatacagtgtagagtctatagaagagctatttttatgaactttcgtataagtatggagaacatttcaaatcagtagagaaagaatggattattaataaagatttggtgacagtcaactagaaaatgcctttatacgcttattttgtggtggagcacagtttccaaaagccataaaggaaagattatattgactacagaagaattttatctctctctatggcaaaagctatcacaaacttaaaagacaagggacagactaagagaaaatatttataaccagtgtaagagccaggggattaacattaagtacttaagaactcctataaaatcaacasacaaaaatggatcaaaggcaggaatagttcacagaagaaatacaaatagtctttaaacctatgaaaagatgcccaataatgacacaaactgaaacaatgatgaaatattatttccacttactatattggcaacatttaaaaagaataatataactgactccaggtgaacatgtgtggtaacaggtactctcattttccactgataggagtttaaattggttcagcattttggagggcaatcggcagaatgtgtctaatgtttagactcttacctggtagttgcacttgtagaaattttttatttgaaaaaaatttggacaggtggattgataaatatatgtgtatgtgcatgcacaatatttattgcagcaaattttgtaatagtaaacatttagaaaaataaaatgcccaacaatagggaaatagttggatatattctattgcattaatttcagacaatattttttagccattagaaagaggtagaccacatakgcataacagaaaaaatgtttgatgtatcagttaggattgtctaagtaatgctgcagtaacaacaacccctgaacctcagggaattaaaccaaccaaggtttattgtttgctgactttatgtrtccattgtggttgtcaggggaattttgttcatagtagccactcagagactgaggctgacagaatagccactaccttgaatgttcgcagtcacattgccataaaggaaagagaattttggagggtcaagtacaacaaattcttacttggcaagaaatacatatcatttacactctcaatttattggctagcactagtcacaggaccccactcatgtgctcagaagaaggagggaaaccagatcttggtgaacagctatgagtggctaccacatatgtgttgtgctgttttgtagataaagcaaaatccagaagtrtgttaatatcctacttatgccaaaaatgtaaaagttgtgtgtgcatgtatatttatataaatatttcaaggaatgtatatcctttgaagaaatgctagcaggctacacacgaagctattagtggagtatgcttcattccttgatttttacttttttttacaatgagcaattattttttaaaacttcaatttaaataaaataaaacccaaacaaataaaaccaaaaagcctgggaaaagagcttatggaacagtttttcagaaagaacattttttatttcttgcttcagtttccagaaacagctaatggcagatgctggcagaatgttctgagcaaaagtcaagaggcttggaatcatagagtagcgcacaggttgctgtagttggtactctacctactctgattattgactacagtcacataattgtaatgtgcttacttaaaattcttattttaggggccacaatattttatgtttctgcaattacaaagtttcagaggtttaaagttaagttttgagatgaaatagtttttataattttcaaattcctatcaaattagcatgttttacccattcattttctccaacattttatgaaaattttaaaacatccagaaaatttggcaagattaaacagtggacaccccatatatccaccactgtgccattaacctcttaactttacttgctttgtcacacatctctccatttatacattcttatatccatctattaacccatcttaattttcgtgcatttcaaagaaaatcatagacatcagttacctccctctaaatattttagcatgcttactatttatttatagtttttcttttgatgtgaaatttatgttcaataaaatgcacaaactttatacatttgctgggttttgacaaatgtacgcttgtgcaacccagatccctactaacacatagaacattaccatcactccagaaagttccctcatgctccatcctagtcaattcctgtgcacatctgccattcaagaggtaactactgttctgatatatatttttttcactttaggtgctttttttttttttttaactataggtggtttttctctgttctagaatttcatatgaacggaattatacagtgtgtactcttttgtgacttctttcgttcagtatgattttgagattcattcgtattatagagtgtatcactaattcctttatattactgagtagcattcaattgtatgaatataccaccatttgttgattcattcccctgccaaagggtacctgggttgttttcgatttggggctaatatgaataaacctggtctgaatattcctggcacaaatatttttgtaaacatgtgtttttatttctcttggttatacctaggaatggaattgctgggtcatacataaagtaagtgtgtgtttagtgttttgagaaactgccagaccttttaccaaagtggttgtatcagtttacatttccaagtccacattgtcagtcttttatggttgttgctttctgtgatctgtttaagatgccttcggctggctcaaagtcgcctaggatagtctcctatgtttccctctaatagctttatggttttagctttcgcttttaagtctatgacttatctcaaattaaattttgtatatggtgtgaagtagggatcaaggttcatcttaaattcttaaaatgcttatttggaattcttatattatgggccagcatattttatattaaagtaaagaaaaaaataattctagagctttagaatataattttgaaatggaagagttttcataattttcaaattcttatttaattactgatgtcttacccatactttttttttcttattctatggtatagttttgactgttaaaatatcaaaatctcctttgcaaaggaagctaaaatactggccttttatgttttctcaaatcttatagttttcaatagtttccttatgtaatacattcgtatttcttaaaaattgaagtattctcactaaaataatatcttagttaactgaggaatgctggataccaatgatcttattaactgaaagaaactgtatactacacatatagtggattatattttccaaagattgcttcaacagtatctcctatccaacatgctcccctataatgtgaacttgacccttcttcttctgagggatagggctatgtcatttccccttgaatcttttttaatttacaatttcttatttttgtgggtacatagtaggtgtatatatttatgggatacctgaaatgttttgatacaggcatgcaatgcataataatcacatcatggaaaatggggcatcctcttaagcatttaacctttgtgttacaaacagtctaatgacactctaagttattttaaagtatgcagttaaattgttattgactatggtcaccctgctctgctatcaaatactatcattcattctatttttttttgtacccattaaccatccccacctgctgccctcccctctcccccactaccctttctagcctctctgataagcatccttctactctctatctccatgggtttgcttgttttgacttgtagatcccacaaataagtgagaacatgtgatgtttgtcttttgtgcctggcttatttcacttaacataatgagcaaatttcattctttttttttgactgaatagtactccattgtgtatgagtaccacgttttccttatttacttacctattggtggacacttaggttgcttccaaatcttggctattgtgaacagagctgcaacaaacatgaaagtgcagatatctcttcgatatactgatttcttttcttttggatatatacccagcagtgagattgctggatcacatggtagctctgtttttagttttttgagaaacctccaaactgttctccacagtggttatactaatttacattcccaccagcagtgtacaagggttctcttttctccacatcctctccagcatttgttattgcctgtctctcgggatatgagccattttaactgggataagatgatatctcattgtacttttgatttgcatttatctgatgatcaatgatgttgagcatcttttcatatgcctgtttgccatttgtatgtcttcttttgagaaatgtgtattcaaattttttgcccatttataaatcatattattagattttttccctataaagttgtttgagctttttatatattctggttattaatcccttgtcagatgggtagtttgtagatattttctcccattctgtggcttgtctcttcactttgttgattgtttcctttgttgtgcagaagctttttaacttgatgtgatcccatttgcccatttttgctgtagttgcctgtgcttgtggggtattacccaagaaatctttgccccgactgatgtcctggagagtttcccaatgttttcttgtagtrgtttcatggtttgaggtcttagatttaagtctttaatacattttgattttatttttgatttgatatggtgagagataggggtctcatttcattcttttgtatatggatatccagttttcctagcaccatttattgatgagactatcttttccccagtgtatgatcttggcacctcccttgaatctcgagtgggcttgtgactcatatgtaaccaatagaatatgacagaagtaatgctgcgtggcttccgaggccaagctagaaaagatgcaggttgtgcattgtctgctgtgacacttccctttggagtctgagctactgtgtgtgtaagaggtcctgccaccttgaggctactatgctatgaagaagcccaggctacacggagaaaccaaccacatgtgggtggtaatttgattgagagccccagctgatatctcagctaatggcccttgtcaggcataattcaagcctccagttatagaatcttccaagttaaagctccagacattcttctgtgctctgtctgaattgctcactctcagaaaccatgaaaatagcaaaatgggtgttattagctgttaatttttagggtagtttgttaaaaagcaatattaactggaacagcatacatcaatgccttccagggaaatgaaatactgaaactatactgcattcacacgaagtatttaatttttggttatttggagaacaatttgatatcctttagtgcctcaaggtcatggctttccagttttttaaatgcaggggtagagaaatctcatgccacatcttggaagaatctcttgttcaaagaccttcccttgtcatacatataattaaaatgcagaaatatgtatgtatgtggatatatatagatacatacacacgttgtgtgtgtgtgtgtgcacgtcaagattctttgtacttgtgtcttccatctgcaagaacagtagggaatctcttcctttcacctgaattcagccaggtgaggtggaggcttttgtgagtttagatgtgttttccatccaaagaagatgtggtctccttttctaagaccacatttgatttttaaaattttaatttaaattatattcatatacaataagattcacttttttggtgtacagttctggttgtgatgccttcctagagttgtgtaactgccaccacaataaagatacaaaacaattctatcacgctgccttcccccttccaacacccaccacccccccccaatggaagtatgctttctcttgagtaaacacataggagttgaatgtcttgatcatatggtaggtgtatgtttaaactttgtaagaaactatcatttttttgttttgttttagaggttttctacatctttcattagatttttccctagatatttgatatttttggtgctattgagtggcataatttttagtggttgctctagagtttgcaatatacatttacaactaatccgaattgtatcagtcagttctcacagtgctatgaataactacccgagactgggtcatttatgaagaaaagaggtttaattgacttacagttttgcaggctatacaggaaacatgactgggaggccttaggaaatttacagtcatggcggaaggtgaacgggaagcaagaaccttcttcacagggtggcaggaaagagagagagagcaagcggggaagtgccacatgcttttagaccatcacatctcttgagaactcactatcatgagaacagcatgagggaaatctgcccccatgatgtaattacctcccaccagttccctctcccaacactggggattataattcaacataagatttgggtggggacacagaaccaaaccacatcataagttcagtttcagataacactatactagcttcaccagtaggcaagtactccttcccccttctcttgtatcattgctgtcattcatttcacttacatataagcatacataagtataaaaccatgcataatcaaatacattgttgctattatttgaacaaacttttatgatagatcacttaagaataagataaataaaagcttttacttaccttcacttactccttctctaatgcactatctttccttatgtagatctaagatttttacctagagaattcctttctcttcgaagagcttcttttaacatttcttgcaaggcaggtctactggcaacaaactccctccatgtttgctgagaaagtctttatttctccttcactttcaaaggaaaaatttcacaggatacagaattttagattggtggtctttttctctcaacactttaaatatttcagtgtactctcttcttgcttgcatggtgtctgagaagtcagatgtaattcttacctttgctcctctatgggtaagatttttttccctgtagcttctttcaagatattttctttaactttcatttcctacagtttgaatgtgaaatgcctaggtgcagtatttttgttttggtttggttttggtttgttttgttttcggcatttatcgtgtctgttgttctctgagtttcctggatctgtgatttggtgtctgacattaatttagggaatttctcaatcattacttattcaaatatttctgctgttcttttctctctttcttctccttctagtattcccattacctatttgttacactttttgtagttgtcccacagttcttggatgttctgttccattttttttgtcagtcttttctctctttgcattttggttttggaagtttcttttgacataacctcaaggtctgagattctcatccatgtccagtttactaccccattgaaagtattcttcatttctgttatagttgtaaaccaaaaataaaattcaaagccccccacctcatctggatggatccctcctctcagcaagggtatccctgagggactaacttgagggactagttcaggccatgatgaggggcaggggtcagacatacttcattataccctcttcccttttggaattactgatagaacatactcttcaagtctgatgagaaacgtgtacaatctattctctctgaagcctgctacctggagccttcatctgcatgataaaactttggtctccacaataccctatcattgtaacccagacatttctttctattgattcaggatcttgagataataacgtacctctttgaactaattgcccatcagaaaattttaaaatctacctataacctagaagccctcgccctttgagttgtcctgccttttcagaccaaacaagtatatcttacatgtatttgattgatgtcttacgtctcctttaagtatataaaactaggctgtgcctcaaccatcttgggcatatgttctcaggatctcctgggggctgtgtcacgggccactggtcactcatatttggctcagataaatctcttcaaatattatagaatttgacgctttttatcgacatagtgttgttgattgctagcatttctttttgagtttttcttagaatgtccatctctctgcttacattattcatctattcttgcatattgtctaatttttccactgtaactcatagcatattaattatggttgtttgttttaaattcctggtctgataattccaacttctctgccatatctgagtctgattctgatgctttgtattttcaaactttttttttttttttttgccttttagcataccttgtaatattttgttgaaagccagacatgatgtactgggtgaaaggaactgtgggccaggcacagtggctcacacctgtaatcccagcactttgggaagccatggtgggcggatcccttgaggttaggagtttgagaccagcctggccaacatggtgaaacgctgtctctactaaaaataaaaaaaaaatcagcctggcatggtggctcatgcctgtaatcccagctactccggaggctgaggcgggagaatcactggaacccaggaggcagaggttgtagtgagcctaggtcgcgccactgcactccagcctgggtgatagagtgagactctgtctcaaaaaaataaattaaaaaaataaataaaaggaactgtggcaagtaggcctttagtgatgtgatggtaaggtgtgggggcagggaaatattctctagtcctctgattaggtctcagtcttttagtgagcctgtgcccttggactgtgaagtaccctcagttcctcccctcccctccccctactctagatgggaccggatgtctggaggggactggagtcacgtatttcccttcccccatgtggatggctagagcaggctgcagttgagtgttacccttaccccaggttgttaggctctgataaaaccccagtaggtcaggctcgtggttactttgctactctctctgccagaagtctgaggacatattttttaatagtcactgtgagaacctgatggagatcgtggaggtaaaattcacttaagtgcaggctcgccgcccaacccccctcatccactttgactgggccgtctacagttttaaaaggcattaaaattttttttgttcttttttagaagtggggtcttgttacattgcccagactggattcaaactcctgggcttaagcagtcctcccacctcagcctctcaagtagctggcattactgtgtcctgagacctcaagagtttttatccctcaggcatatccacattgagcctccagcattccaattacagtccagagttttctacctcagtactggttcccacagaggtttctgctccagtaaattgtgattctctgtatgttcctgcttgtctgtctaattttggggacagtgatttgccctgtgacttcacttctctgacagatctaagaagagttcttgatttttcagtttgttctttttttttttttttttttgagagggagtcttgctctgtcgcccaggctggagtggcgtgatctcggctgactgcaagctccacctcccggcttcacgccgttctcgtacctcagcctccccagtagctgggactactggtgcccgccaccacgcccagctaattttttgtattttttttgtatgtttagtagagacagggtttcaccatgttagccaggatggtctcgatctcctgatctcatgatctgcccgcctcggcctcccaaagtgctgggattacaggcttgagccactgagcccggccaatctttttttattttttcttttttacttcccaaactgttttttgtttgtttgagatggagtctcactctgtcgcccaggctggagtgcaatggtgcgatctcagctcattgcaacctctgcctcctgggttcaagtgattctcctgtctcagcctcccaagtagatggaactacaggtgcacaccaccacgcctggctaatttttgtatttttagtaaagatggggtttcactatattggtcaggctggtcttgaactcctgacctcaggttatccacccacctcagcctcccaaagtgctgagattacaggcgtgagccactgccctggcctccaaactgttttttaaagtagttgtatatttttcttttttaccaggagtcttggagagttctagtacctttacatgcttatcaccctcgatatggtctgtcttttaaattttagctatcctaatagctgtgtagtagtatctcattgtgattttgatttgcatttccctaatgattaataatgttgaacatcttttcttcacttatttgccatccatatatctggtgaactacctattcaagccttttgtccatttttagtttctcttattactgaattttgagagttttaaaagtatgtgctggataccagacctttatcagatatatgattgccaaatgttttctatttctctgtggattttattcttttaaaagtgtctttcaaagagcaaaagttttaaattctgattaagtcctatttatcagtttttgcttctatggattatgcattggtattgtatctaagaagtcttggcctaatccaaggccacacaggtttcttttctactgtattttcctctagaagcattatcatttcagattttatatttagggctatgatccactttgagttaatttttgtatgggtgtgaagtatttgttaaaaagttttgctcgtttgcacatggatatgcaattttttttagcatcatttgttgaaaagactatcctttctccactgaattgccttgttgaaaatcagttgtccatgtaggaatgggcctatttctggactctattctgtccaattgacgtatttgtccattttgataccaataccgcattttcttgattactgtagctttgtaagtcttgaaatctgatagtgttagtgctccaactttgttcttctttttcaaagttattttggctctatactggatctttgtattttcttttgaactttggtatcagcttgtcaatttctataacaaaccctgttgggattttgattgagattgcattgactctacagataaatttggagacaatattgagccttttgactaatgaacgtggtatgtctctccatttattttggatttcctttatctcagaaatgctttataacagtggtcctcaacctttttggcaccaggggccggtttcatgaaagacagtttctccataggcccaggtgtcatggctgggagatggtttcaggatgattcaaacacattacattcattgcacagtttatttctattattattacattataatatataataattaatgtagaatcagtaggagccctgagcttgttttcctgcaactagagggtcccatctgggagtgatgggagtcagtaacaaatcatcaggcattggattctcataagtagcgtgcaacctagatccctcgcatgcacagttcacgaaaaggtttgcactcctatgataatctaatgytgctgctcatctgataggaggcagagctccggcagtaatgcgagcaatggggagtggctgtaagtacagatgaagattcgcttgctctcttgcccacccactgctcatctcctgctgtgcagcccagttcctaacaggccacggactggtaccagcccgtggcctgggggttggggacccctactttatagtttttagggtatagttcttgcacatctcgtgtcaagcttgtcactaaatattttatttttgatgttttcataaatataatgttttaaaatttagtttcttattgtatattgctaatatatagaaataagattgatatttgtatattgatcttatattctgcaacattgctaaactcatttattagttctggtaattwtcctttttattctatcagtttttctacgctgatggtcctgtcgtctgtgaataaagacattttcacttctttattttcagtctggattcctttgatttctttttgcttgctttattgcactggctaaaagtgccaatatggtgtgttttgtcacatgaaagctttaaatttttaattatacttgaatttgtccatcttttcctttatgggtttgtgaattttgcattctgtttaagaaattatgtatgccccacatatatgaagatattcttctccattttcttctaaaagttacaacatttgccttccacatttgggtcttaaattaatctaagattaatttttgtgtctaggttaacacacacacacacacacacacacacacacacacacacacacacacacacacacacacagattgccaatcaacccagtatcatgcattgtctgtcctttccccagtggtttgtactgatacatctgacatatgtcatggacccatatccatatgaattggtttctaagccctccaattttattaagtttgtttgcttgtctattcttaaatcagtattatctgttttcatttattactatagcatcatgatatgtcacgatgaaatataagcagggtaagttctaatttttcttcagatttgtcctatttgcagacttttaattttccatatgaactttatgaccactttttctagctctatgaaaaggtgattgtattttgattggaattgtgttgaatttatacattaatttgaggacagaaatttttcacaaaaattttagattcagaaggtacatgtgcaggtttgttacatgtgtattttgcataatgctggggtctgggcttctactgaccttgtcacccaaatagtgaacatagtactcaataggtagcttttcaaccctcgccttcctccctttctccccctttttggagtcctcagtgtctataatttccatctttatgtatgtgtgtacgttttgtttagctcccacttacaagtgacaatatgtggtatttgattttctgtttctgcatcaattcacttaagataatggcctctagctgcatccatgttgctgcataggacatgatttcactcttttatttatggctgcagagtattccatggtgtatatgtaccacactttcttgcactgatatgtttataaaagtggtattcacaataaccacctcatagaatcaacctaggtgcccatcaacagtggactggataaagaaaatgtagatttcttttcctttgggtagatacccaataatgggattgctgggttaaatggcagttctatttttagttatttgagaaatctccaaactgctttccacaggagctgaactaatttacattcccaccaacagtgtataagcattcccttttctctgcatccttgccagcatctgttattttttgactttttaatagccattctgactggcgtgagatgatatcttatttgattttaatttgccttcctgtgacaattagtgatgctgagcattttttcatgtttgttggctgcttttatgtctgtctgcttttgagaagtgtctgttcatgttctttgcccactttcgaatgttgttgttgttgttgttgttgttgatttaagtttagattctgtatattagtcctttagtcaggttcatagtttgcaaatattatctcccattctgtgggttgtctgtttactccattgacagtttcttttgctgtgcagaagctctttagtttgattaagtcccgtttgtcaatttttggttttgttacatttgcttttgaggtcttcaatataaattctttgcctaggcaaatgtccagaagaatttttcctaggttttcatagttttaggtcttacatttaagcctttcttttttttttttttagagacggagtctcactctgtcacccaggctggagtacagtggcatgatctcagctcaccgtaacctccgcctctcgggctcaagcagttctcctacctcagcctcctgagtagctgggattaaaggcacatgccaccatgcccagctaacttttctatttttgtggagacggagtttcaccatgttggccaggctggttttgaactcctggcctcaggtgatctgcccacctctgcctcccagagtgttgggattataggagtgagccactgagcccagccacatttaagtctttaatccatttttagttcatttttgtatataatgagagttagggatccaattcatgtctagccagttttcccagcaccatttattgaagagggtgtcctttctctattgtttatttttgtcagctttgtcaaagatcagttggttgtgggtatgtggctttatttctgagttctctattcttttccattgatctattagtacgtgcctattttttgtacaagtaccatgctgttttggttactatagccttgtagtattgtttgaagttgggtaatgtgatggctctggctttgttatttttgcttaggtttactttggctwttgaggctcttttttggttccatatgaattttagaaatgtgttttttctaattctgtgaaaaaaatgacattggtaatttgataggaattgcattgaatctgtagattgctttgggcagtatggatattttaatgatgttgattcttacaatccatgagcatgggatgtttttccatttgcttgtgtcatctatgatttctttcagcagtgtttcatagttctacttgtaggggtatctcaccctttgattaggtgtattcctaggtattttattttttgtgtctattgtaaatgggatttcattcttcattggttctcagcttgaatgttattggtgtatagaaatgctactaatatttgtgcagtgattttgtatcctgaaactttactgaagtcatttttcatgtctaggagtctattggaggaacctttggagttttttaggtgtagaatcacattattggcaaacagagatgatttgactgcctttttccctatttggatgccttttatttctttctcttgcttgattgccctggctaggacttccaatactatattgaatagaagtggagagagcggacatacttgtcttgttgcagttattaggggaaatgctgccaacttttgtcttcctgatgtaagcctttagcactataaactttcctctgaacactgcttttactgtatcccacaggttttggtatgttgtgtctctgttttcatttgtttcaaataattttttgctttaatttcattgtttacctaaaagtcattcaggagcaagttgtttagtttccatgtatttgtgtggttttgtgagttcctcttggtactggtttctaattttattccactgtggtccaagaagatgcttagtagaattttgatatttttgaatttattgagacttatgactgagcacgtggtcaatcttagagactattccatgtgcagatgagaaggatgtatattctgtggttattgggtggagtattctgtagatgtctattaggtccatttggtcagaagtccaacttaagtgcagagtttccttgttagttttctgcctcagtgatctgtctagtcctgtcaatgggatgttgaagtcctccactattattgtatggccatctatgtcttttcttaggtctagtagtaattgttttataaatctgggtgctctgatgttgagtgcatatatatttaggatagttaaatcttcttgttgaattgaacgcctcatcattatatagtgcccttctttgtccttttttaatgtcgttggtttaaagttgttgttggttttaatgttgttggttttatctgatacaaaaatagctacctctgctctattttgttttccatttgcatgatagatctttctccatccctttactttgggcctatcaatgtcattacatgtgaaatgggcctcttgaaaacaggagaaggttgggtcttgtattttttttttttaatctaatttgccattttatgtcttctatatggagcgttaaggccatttatattcaaggttagtattgatatgtgaggttttgttcctattgtagtgttgttagcaagttgctttgtagtatcaattgtgtagttgcttcataaggctctcggctttatacttatgtgtgcttttgtggtagcaagtattgttctttcatttccatgtttagaactcctttaaatatttcttgtagactggtctggtggtgattaattcccttagcatttgcttgtctggtaaagactcaccttcgtttatgaagcttagtttggtggggtatgaaattcttggcttggatttattttctttaagaaggctaaaaataggtctccaatctaggaggtctactgttagtctgatgggattccctttacaggtaatttggcccttttctctagctgcttttaaaatttttccttatgttttgacctcagatagtctgatgactatttgccatgggagtggttgtcttgtatagcattctgcagaagttctctgaatttcttgtatctgcatgttgacctctctagtgagattggggacatttttctgaattatagcctcaaatgttttccaaattgcttgctttttctccttctctctctcgaatgccagtaagtcataggttgggtcactttacataatcccatatttctcaaaggttttattcatttttaaaattatttttccttattttgtgtgactgggttaacttggaagaccagtctttgacctctgaaattctttcttctacttgatctagtctattgtcaaggcttcaaactatattttgaaattcctgtagtgaacttttcaattccaaaagttctgtttggttctttcttaatatatctatttcatctatttcatctgtcatttcctggatcatttttctgttttatttgtgctggatttcaactttctcttggatattgttgagtttccttgcaatccatattttgaattctttatctgtcatttcagacatttcaatctggttaggatccattgctagggagctagtgtgatcctttgcaggtgagaaaacactctggttttctgtactgccagagttcttgtgctgattcctgattccttctcatctgaggctgttgctgctttttttttttttttttttgggtttgctaccatttcagagggctttctaaaaatttgttattcttttttcctttgagggtatgactgtggtgtatgttgtgtgtgattgattggcttcatttctgggtgctttcagggggcaaagctctgtacagtttccttggttgcagataggttctgtgctgtggctttgtcagatgctgcttattgtagcaatgcatttttgtttggtggtgcagttcaggctgcagtacagtagatggtgcttaagagtagcagccagtaggtaggttggtgtccaggtggacgcacctgccctgatggtggtggcaggaagagatgatggtgtgctaaagtcttgggggaccaggcttggtggctcacacctgtaatcccatattttaggaggccaaggtaggagaattacttgaggccaggagttcaaagccagcctggttaacatagtgagactgaatctctacgaaagaaaaatttaaaaattagctgagtgtggtagtgtgcacctgtagttccagatactggggaggctgaggtgggaggattgcttcaacccaggagttcaagactgcagtgaaccatgaccatatgactgcattccagtctgggcaacagatcgagactctatctcaaataaaaaaatgaagtctcagaggcgggtttggggagtgcaccagcttcttgtcttagaccagcaggaatccatctattttcttatcatgtcactctcaagggctcacgacctgtttgtaaaggttttgtcctttggttctatgccactgtgtggctgtgggccgtgaatccacctttctgatggctaccattagagtgggggtcagagcagagcctattcccacagtccagggagggtaactccgaggtctgtccttcattgctagggcactgccattctgtttagggagggggagttgggccttacactttgtgcaagcacaagcagacacgggcttgctttcagtggggttggagctgtgggaaaagtgtgacaagcactttctttcagtgtgagctcactttcagcaggggtagagctgctagaaaagcatgaaaagtgctttctttcagtgtgctctgactttcattggaggtagagcttccagaaaagtgtgaaaattgctttctttcagtgcacattcactttcagggggaatggagccaccggaaaagtgtgaacagtgctttctttcagtgcatgctcatggggccctggtggggagatctgctgctgcatctccaacagttactgggagaggggtgagagatgacccgtctctccatatctgttcccaggcatcagtaatatccccttcagcagttggtaccacacccatcattcctttgtcccaaagaatgctttggtgggctgtgctcccctctcccttaggggcagcccacaatgaaattagatctccaggggacctactggtcccctgtgcttgccaaaattatagtgggttytggggtatgtttgtgggttgtctggtggtgcagtggctcaaatgcagaggatccctgggcacggcagtgacaccacatgtgcacagctggtgtggtaccctccatctcagtttcagtctgagagttgtgtggcatggctgcacaagctggccacctgattttggggacataatttctgtcactttgaaatagaaacttctcatccataaatataatgtatcttgttttataatactttatagttttattgttattgtagctggtatatttactttaaaattacattttctagttggtggtatgtatgaatgctattgttttcgtttgtttgtttgttttttgtttttgatggaatcttgctctgtcgcccaggctggagtgcaatggagcgatctccgctcactacagcctccgccacccgggttcaaacaattctctgcctcagcctcccgagtagctggaattacaggtgcccaccaccacgcccggctgatttttgtatttttagtagatacggggtttcaccatcttgccaggctggtcttggactcctgaccttgtgatccacccgattatgttttgtatattgatctcattttattttttgaattctcagagtctgtagattcttttggattttaattttggaccatattatataaactataaataatgacagatttgcttcttcctttctaatccttatgatttttttttctatttttattatattggctagggcctacaatgcaacatgtgagtagtaatagcagatctccttgtctttttccttaccttacaaaagatatttttactaagtacttagcttattatgagtttttggtagatgcagatattttctttaggattttcacatctttattcataaaggagataggtctatactttttctttctcataccacctttgtccatgtcaaatgtgtgttttataattgcttcataagatgagtttcagaacattcactgtttcttaaagcagcttgtaaaatgtaggtattgtcagtttttttaaggttttgtgtaagttgtctgtaaaaccatatggcccttccttttttcagtgggtagatttttaatgattcacttcctctaatacattttattccagatttctatttcttcttgagttggttttgaaaattatgtagcttctagaaactttcccatttcacctaattttaaattttttataacctttttagtcctgttactgttgatttgtaccttttcaaaaaatcaattttactagagttgttttttagatttttttaaacaaccaaattttaacttgttaaccctctttttaaactttgttttctatttcattaattcatcaatttgtattcttatttttatcatgttgttctttgtactttttctgtgtttattttctaacttcttgacttgaatatgtgtttcactgattttcagtgtttcttttctaagaaatgcacttaaggctttaatttgccttctgagtattactttagctgtggtgtatttagtgtttattatcctccatatataaatattttctagtattatttcttttttgaccaattagttatttaaaagtttgttttgacatttccatatgtgtatgaagttactctcatttggttcttaatttctctttttattacgtttagttagagaacattgtctgcatcttcttaattctttgatatttaatgagacttgcttcataaacctgggaattaagtcttaatttctgcaatgcatgtatttttctcttacttttgaagtttaaacgggtacataattctagatttaactattttcctttgatcttttgaagatactctattgtcttttgcctccattgttggtacgtctcttgttaatataattgttcctttgtagtcataagcctttattccctctggctgtctttctttgtttttggtgttctgcagttttattacaatgcatcttgggactatttataattcttcagtttgagaattattctgagccattatctcttcaaataacttctcttgttcattttgcctgttttccttctcaaactctcaacctgttcttgttatctcttaatatcctgtcaaactcctcttttttctccatgtcttttgatctttcattcttttcatttatttttcattctgtgctgctacatttctggaattttccttaaatctcccatctagttcattgattcagtgactctgccttcttattctttaagtactatttaattgttgtgtttcatgtttccatccttttccgtagcatcttgttcttttcttatggcttctctgtgttttatctctttaataattttaaacatcataatttcatggttcattactgatttttgttctattgtcccaaattcatggaatgccaatttttctgttatatctgctgacttagggtggattgtttccttttgttttctgagctcatcttaaattggactttcttcctccacttcattgttcctttgttgcttgggttgaccatttagagtagtttttaaaaaatcttttattttgaactaattgtagacttacagaaaatttaccaaactagagttcccatatttccctcacccagctttttctatgttaacatcttaccacagtgtaattattaaacccaaacaattaacactgggacagttctacagactaaaaacttcatttgaattttaccaatttttcactgtcatttttctgtcccaggatcctatccaggatcccacattgcatttagtagttgtttcatgttagtcttctgtggtctgtaacagttcctcaacctttctttgtcttttatgaccttgatactttttaagaatagtggtcaattattttgtagaatgttgttcaatttggagttgtctgatgttttctcatagttggactgagattatacacttttggaaagaataccacagaaatgatgttgtctccttcttagaacatcatatcaagtggttcatgatgtcagtatgtcttactactggtgatgttggccttgatcacttgattcaggtaatgtctgccagctttctccattggaaagttactatctttccttttgcatttaataaataccttgaaagagacactttgagactatgcaaaccctactttttctcaaactcacctgctaattttagcatctggcaatagaactctttgagtaattttgattttacctttccaggctagcttataaactggtctaatttcatgttaattttgatgttaattaattgccttggaacatggattagtcaattttttttgttataaaggaatacctgaggctgggtaatgtataaagaaaaaatgttaattttggattatggatcttcagactgtacacgaagtgtggtgctagcatctgcctctggtgagagctcaggaagcttacaatcagggcagaaagcaaagtggggagctggcatattacatggtaagagggagcaagagagagagtaaggaggtgtcaacttcttttaaacaagcagatctcatgtgatctcagagcgagagctcactcatcactgaggggatggcgctgagccattcatgagggatctgcctccatgatccaaatccctcccaccaggccccacctccaacgctggggattacctttcaatgtgagatttggaggggacaaacatgtgaactgtatcagagctttatatagtaagtgggcaaaataaatttatactccaaattcttattaggtggaatattggctttgatttctatcagataacttattttttttatacctagagactcagcagagaaaagcctcattgtcatctctcttgtccaatgggtagaatttattaattctttcacttcacttgcagccttttacagttctagctttatgcataggtttaatgtgtaggagttcccarttgctactctcctggactggaggtcttgtcgtttgtgccctggtgagtgttaaaaaatctaagctcttacctgctaaagggtttgatcccacttcctccccaccccaactacctctcatcctgctgccacctattagcttgttcatcttcctctctggctgtcagctacctcttcgcgttggtacctggggacatttctctctgttttcacaagctcagccaggagtgtgagttttaattgctgcctagtctaccattttgccatgcacaatctctctcccatgccataagactctctaaaattacactggggaaaatactgactagacacgttattattagggaatgtcactttattattaatacctatgctaaactggatttggctgtgatcgtataggcctagttaaaatcagttccactatttaaaaatcttaatcacgcttaggcttctctctttctatttttgaagcacatccattcttataaccttgaattttatgggacgctagaaaaaattattggcattttagaataaataaatcatataatgttgtgccaaaacagatagagtgtttcttatgtttctaaagagtggaaaaaggaccaactctttttctggggttttatatatacatatatatttatattgtgtttattttatttctttttccatgattatattcttgtggaaatgaggaaatcattaacagtgaaactactgtttcatccaaaatacagtgttctaatggtctgttttctaaatgaagcttctatgaataaaagcaaggccgctatatagccatttagttgctaacaaatgacctggttagtgccacccatgatttcttctttaattagattgcaaattttgtgtttaaaaatgggagcagtaagtaaatgctaatttgtagttcctcagagggagaattgtgatgtaaaaattaggatataaaatgagaggataccgcagggcaggagggtaatggcacttgggccaccatagggcaggccctgccaggctgcttttcattcaagtaaattttgcaactcaaagtactgggtatggaaggcgtgccacatagtacagtgtttaatcatgtaagtttattctttcttcattcaataaacatatattgtgcatgtgctctgtattgggtcccatggtggatgacagaggctcagaggtgaatgagctgccttttgggagtgccagcctcatctgtggccttggactgctggttctgtgctgccaatctgggtcactctcttcccacaccattttggaggggtctctcctttgctgtccagtttcttctgcctgctcctgaagacatgaactaaattatatttcttctcttaagatgttccttaccactgcagctcagagtaatccttgcctctttgaactcattttatttatggctggtgctacccagcatatctttttattcccacatgcatgttagttggagaatagatggatgaatgaatgaatgaatgaatgaatgaacgaacaaaggtggtgccttttgtttggattcaattttcactcacttaataggatcatattgacagggcattcctagacttattttgacctttcttgaaggatgattcattctaccacttactaataattatcataaaagctaacatttatatgcttgctgcttaccatgtgacaaatgttgcactaaatgctttctacatrttaactcatttactcctcacagcaatcctacaaagtgggcactattattattcccattttgcagatgaggaaactaagaagcagagaggttaaggaatgtacccagaattacatattaagttgcagagctgggatttgcatcaggcagtctagcaatttcatcatgagttatgatttagaatcaaactagctaaggttgacaattcattctgcctctctaatgcttcaggttcatcatctgtgaaatgagaatcattcaatggcttactgggggcgttagatgaattaacatatgctaaacactaagccagcaaatatccatgacattagttccatccatttcttcttaccactggccacatggaacttacactctgggtctagaaagcatgtatgtgcccctggatggctcagcagctgtctccaccaactttgagatcttggctgtgattaaaatctttttccttgactctgccttttctggaagactgtcttttggaatgggggcagttggggtaggattaaaaaacactttctgagtaaataccccttcagttcttcttctcactattgtatgtatttttatatttatctattttgccttgtttcagaaatggatttaaggtaagctagaaagatgtagacagttctgtaggataaaatgaatatgcaaatgctaaaaataaaagaaaaaatataagtaagaaagaacaggggagccaggagtggggctggcatacagagtatatttacaggctctgaagttagaggcatttactagcagtcagccacaggcctggctctgagcttcctagaagtcagtgcaaaataggagaccatgatccgttcatggtgttcataaagtaactataagctgggtgtggtggctcatgcctgtagtctcagcactgtggcaggccaaggctggtggaccacttgagcccaggaatttctgaccaacctgggcaacatggtgaaaccccatctctactagaaatataaaaattagctggacatggtggtgcacacctgtggtccctgctactagggaggctgaggtgggaggatcacctgaacctggggaggtcgaggctgcagggagctgtgatcacaccactatactcttaagytggacaacagagtgagaccctgtctcaaaaaacaagcaaacaaacaaaaaacaaaacccaaaacacaaaaaacataaagcaacaataagccaagttgcttaggaaaagggatcctaatgcagagtgcaagaaagactttctccactggccactcacagaaaggactctctggtaggtgagtggtggtctcagtagcgtgccccaggatacccagggataaggtccaggtggctgtttctgacagtattccctagaagaaaataatatcattccatcagaatactgttcagtcaaattaattctgccagaggcatcatgtgccatagcccaggtgtccaactttctgaggtccagcttaacactggggtttgaagctgcctcatagcactggggtgtgaaggagaagaaagtgcaagaaggcaggacttaggagagtacatcaataatcaattgccagaattttgatgtgtaataaatgacctgaaaatatctgtcacgcaaaaaaacaaaaaaacaaaacagcaacaacaacaaaaaaaaccacacacacacacatttatttagcttacaggtccgtgggttggctgagggttcgttgatctgagctgggcccagctgggatggctctgttccatatgtctgtcattctccttcaaggagcagcgggctaacccaagtatgtcgttctcatggcgatggcagaagtgcagtcagagtgggaaacaagaagacctcttgaggcctaggcgcagaactggcacactttgacttccacgtcattctcttggccagaacaagtcctgtggctgaccccattgtcaaagagcaggaaaattgtgcccctttagagagtgcgacagcaaagcgacacaggaaagggcatagatagtgagagggaagtattgaaggcaatgatgcagtatcccacagagggaatggaaatgactttgagaaaagctcactgccccttgaggcacagaggcccctgcactggttgtatctgctgccaccatgcaggtttaattctctgctgcaggaggcttgggcatgaagtggctctggttgtggctagttaccattgcgacaaatgagctcagtacaaattggaccctgcgagtcaccattctgtaacctgggtagaactttgtgccagcgcctgctagagttgcacactccctccctaagctggaatatggctgggcccctgaagtggcagggaagttagggttataactgacaaccagctcccccattttgtttgatcttaattaattcgtgctcattttcccttatattttataagtagaaatgtgaaacacttactaggtgagcatatttactttattttttgatttagagccacctaagttttagagatgaagctatcagcatatggatttcttccattactttgaaaactgctatatttggtactgatgttctgtggttacatgctgggatccattacatagaatttaagcacagaatgtttaaaacaaggagccaagaacaagttctcattacattatctggattgaaaatgatttcttactgacattgtaaagtttcaaaattccagccactgtcaaaacgtagccgggtaacttgcctagatcgtgtctatgacttctaattcagatttgattctcagcccagtactaccctctcccaagctcagaattcttcatagaagacccaaaacaaataaaaaaaataagccacaacaataaaatgtaagaaattctcctacttcatattctgggaaggaagtaaatcattttattcattgatggacttatatttctgcctttttgatttatttcctggcatgagagacctagttgccttaatgactatttgtcaattgagcacaagcccaaaagtctaccctggggcttccatgtgagtcagtggtcccagggaagagccactgctaagggttgtgctggttgtgaactacacaactctggaacactgcatggagagcctctcttggaattcctttgtcagtggttggggtattggcacaaggctcccagcttttactctgcccctcatcctcttcttttcctaccaaacacctatcccaaatttggcttcttggtctctaaatcaaaagctggtctttcttcctccctcccaccctccttccctaaataaatgtgccctcttttcatagtgatttggcacatttatttagaatggatacaactaggtccctcctttccttgaccactctccctctgtctacacacacggacacatacacatgcatgccatctgtgacagagcctgtggaatttgtgaaccatagccacacaccaatgcccaggactgttctagagacctctttgtaaagttgcatgagcagagaaaaactaaaccacgcagtacaggagaatccatacagattctgaaaagttagttttaytgtgtgaaaagttagtttttgtttgtttgttgtaggaaactagttacgttattgtaaatcaaaagtatctgagaaaggtctcaatcaatttagaaagtttattttgccagggttagggacatgcccatgacagagcctgaggaggtcccgagacatgtgcccaacgtagatcagggcacagcttggtttatgtattttagggggacttcagacttcaataaatatatgtaagatgtacattggtttggtccaggaaggtgggacaatttgaaggggtcgggggtggggcaggctttcgggtcataggtagatttaaagatgttctgattagcaatgggttgaaagagttattaccaatagaaaggattgtctgtgtcattataaggggttgtgaagaccaaggttttactatgcagatgaagcctccaggtaacaggcttcagagagaatagattgtacatgtttctaatggacttaaaaagtctgttctatcagtaattccacaagggaggagggtataatgaagcatgtctggctcccacttcccatcatggcttgaactagtttttcaggttaactttggaatgcccttggttgagaggaggggtccattcagatggttggggggccttagaattttcattatggtcacaacaaaatatatcagagtctcagcaggagcaagccattttgagaagcaagcagagaagaataaagaaagatgtgttagaacttacaaaacacattttctgaattaaaaattagaggcactaatagaaaactggacactgcagaaacttggtaataaaccagagaactatctttagaaataccaccaagagagcaaaattagagagggattgaaacaatgacaaagaagagagcagaaacgaaggtagagagagaactaaataaatgtagctaaagtgataatcaaagatcgtttaaaaaaatcattttctaagctaagtaaagtatttgtaaattgagagaattcactctgatccctgtaaaatatacgaaaagagatcattaaatataccttggtaaaaatgtgaaaggtcacatagaagactcttataagaatcaaagcaaacttatccaaaacaacgcttaaaaataccaccatcaccagcagaaccaatgccctaaaacccaaaaagatatgacctcaggcaatacacagaggcagtggttaaatcttcagtgctttgagggtaaacaagttgttttttatgcatggaacaatagaaatgttttttaaacctttaagaaaacaaaaaatatctagtttctttagtaaattgctcaaagtaatatattaccttaataacttaatccagaatatgatgaaaaaatcaaaattaagaactcaggaggacatcatatctttaaaaattggagcagcattggacattaaaacaggttttatmcacacacacacacacacacacacacacacacacttacatatgtgaattcaaagtgaaaacattgtttcaaagaggtgaatgacatgattagaaaaattaaaaaggtagatgaaatgggttatgccacagataaaataaccgaaactcagaaagagagtataaggagactaagggcaaaattcctcatattttatctgaatgtgaaatcatatttcatccatttctttgataattaggtatatataggtttaagatattttagggcaatttcaagttaatcaagaataagattctaaatggaattgcagaacctaagagcaaaccaaatatggtaaatccttaatgctgtcaataggttctcagaaactgactttaggtgaatgacatataatgaaaccaattttcccttaggctaattgagataaacgaaagttaagttcctatagcatatttctgttcacaaaaaaatcaccaaacttctaaataaagacccaaacacttataatatcaagcattgaaataaatgggagttatacatacatttaagaaagatgaacagactgggtgcagtgactcatgcctgtaatcccagcatgttgggaggccgaagcaggtggatcacctaaggtcaggagttcgagaccagcctggccaacatggtgaaaccccatctctacgaaaaatacaaaaaattagctgggtgtggtggcgggcgcctgtaattccagctactcgggagactgaggcaggagaatcgcttaaacccgggaggcggaggttacagtgagctgagatcacaccattgcactccagcctgggcaacaagagtaaaactctgtctcaaaaaaaaaaattaataaaaacaagacaatgatttacccaattttggtgaatcagtgagtggcagtggccatggtagtgatgggttaaatcagggaataaatgtttgcagagcgaacattgtaaggagcatcttttcccaccttgcagttcaaaaccaaaaaatcacaagtagagcaggcttgctgagcgcttttgtcccatgtcctttattgtcatagacttgatgagtttttattttatcctaatttgtattcatttgttcattcattttccaatgtgcttattccagttcaaggtcatgggtggctggagcctgtcccagcagctcagggtacaaggtgggaaccagccctggacaggacaccatcccatcgcagggtgcactcacacatccacactcagtcacactgggaccatatagacatgccagctcacctcatgtgcacagctttgggatgtgagaagaaaccagagaaaacccacgcagacatggagagaaagtacaaacttcatgcagacagtggctccagcctggagccatttttttttccccatcaacattatcataaaatgatgttgaacgaggtgatgttattcaagaacctgctatatttaggatgtattgcaaaagacaagaagcaatcaatataaggtaatggtaacaatacatgaaaaactgaaaacacaaaataagatgacaggaggaaaaaaaatcaagagaaatcctcaccataaatgtgaactcttgattgcccttgaaccatcatgacacattccacctgctccagattggcatatggtcacctctcttttactttctcatttaattcccatttgccatattatcttgaattcctcttggagatttgtcagtatattcttgagacctgttctcttttcctttgcccttcattgtccaggaaccccagggatgcttattttgtctggagagggccagaccactgccaaacactgctgctgtggcttcttgttgtcaccaggctgctgtggaagacaggttctgccaggctggtggacactaccaggatgactttaccgggcagaaggtcatgggctgggttttgctgttgttttaagttgagagagacatgaacattctatatgctgaaaggaaaggaccaataaggtccaaaaggaaagggccaatagaaatcaaagtcacagatgacaaactggacaactgatggatcagtgagtagctgaggatgaagaagcagttaaggagggaatcaaggcctagttgtacctgtttccactctccacaatggatatttcagactttctcactcttaagctcctaacttcaccattttcctccaatttataacagaaaacctcatctccaggttaatagagcatatagagatcctgagatgtaaaccacacccatgcccccacatccacaacttgccattcctttttcatctcggtagaaaaggtgtccctcctgctgtccaaagctggcttccatgatggccctgtctccctaacactcaacaagaggcttagagtccatccgaggcccagcacattcaattctagtttatgcctctgagctgcaacctcagcccattctcttcatctcagatgcactcccgtgcctacctctgcattgcttcctgagtggtggggcttctaactctctgctcatattgctgtcttgctcaacacccttcaagagattccgttcaccaaaagaagaaaacctgggtatcctacatggcgtacacatgcatctctcatgagtgggccccgcctgccagctctctaatttatctcttgctttgttttcactatattctaatcattctatgaatcctgaacattgtggttcaattcttggctccaccacttactattaatagtactgtgcccttgggcaatctgttaaagctctctgggccttagttcctcatcagtaaaatgggaaccaagttcctactgaaaggattgtcatgagggttaaatgagtctatgtgtgtgaagcagatcaatgtttgacataccctgagctcttgataatgtctgtgcctgttattaacactttgtacagcttctcagatgtattataccatcttcttgccctctttttttttttttttttttttgagatagagtcttgcttcgttgtcgcccaggctggagtgcagtgacacaatctcagcttactgcaacctccgcctcccgggttcaagcaattctcctgcctcagcctccgaagtatctgggactacaggtgtgcaccatcatgcccggctaatttttttttatttttagtagagatggggtttcaccatgttggccaggctagtctcaaactcctgacctcaagtgatccacctgcctcagcatcccaaagtgctgggattacaggtgcgatccactgcacctggctcttcttgccctctttgaatctttgaggatatgattctttctcccattcctctcagcctccttcccttactcagctcccacttctctggttggcagattgcctttcatcttcaagatctgctctgctaccacctctgctgtgaagctttcctggatttctcgctatatgtatacacatgtcagactggatgaggggtactttctcggagcttttggacatatctttattgtagcactttttctgcttccttgacttggctttccctctagtctgtgattaattctaggatgtagatattgagggttgggggtcaaatctggtccattcctctattattctccatcatttgacataaagttaatatttaatcagtgtttattgaatgaatgaatgaatggattcatggacaagggatgtgtgcagacagaacacaatagaagaaatatttcttaacaaataaggggaagagatgttgaagtttattagtaatcaaattattattgattaaaatgagacatcatttttacttgttgaattaggaaacactttttatggccaggcgtggtggttcatgcctataatcccagctttggggaggctgaggcaggcagatggcttgagcccaggagtttgaaaccagcctgggcaaaacaaaaagccaaccccgtctctaccaaaaaaaaaaaaaattgctgggcgtggtggcacatacctcacatacctgcagtccccagatactcgggaggctgaggtgggaggatcacttgatcccaggaggcagaggttgcagtgagctgagattgcaccactccactccagcctgggtgacagagcgagactctgttaaagaaagaaaaaaaaaaaaacacttttttttttcttttacttctgtctccatgtttgacaggaaacactttttgaaaggatattccattgctgtgggctcttactcattgctgatggaagggtaaaagcagcttagtactatgtgtcaagacctttttaagtgttagtttcttttaaatttttattttacttttcatttttgagacactttctcactctgtcacccaggctggagtgcagtggtactatcataactcactgaagcctcaaactcctggactcaagcgattctcctgcctctcagcctcccaagtagctgggactgcaggcacacaccacaatgtcgagctaatttttaaaaatgtctgtagagacggggtcttgctatgttgcctaagctggtcaaatgttcctttgttttgcctcactaattgtacttctggaacaccatccgaagggaataattgtaaatacagacaaatgtttatgcatatagatgctcattatggcattatttatataaaaatttggaaaaaaaatgwgtaatatctagtaacagaagtatggtttagcattttggtttcagaatagtctgtaataacatggaaatgtattagttaagtgaaaaagatgaaaatatgttcacacctattaagaaaaagacaaatgcccatgcatagtaaagagactgcagaggagtgtaccaggatgtttacttggttatatttcggtggcaggggtgtgtatggtttttcttttcttttttttccttgcttttgcatattatccaaaatctctataattggaaatgtattacttttataatggagtaaagcccatatatatatatatataccattttgttttcctttgagacatggtcttgttctgtcacccaggctggcatacagcagaacgatcatagctcactacaactttgacctccttggctcaaatgatcctcctacctcagcctcccgagtagctgggattacaggcatgtgctaccatgcctggttaattttttaacgttttggtagagatggagtctcattaggtttcccaggttggccttgaactcttggcttcaagtcaccctcccaccttggcctcccaagttgctagaattacaggcaagaaactctgtgcctggaccaaattttatattttaaagtgtgtgttcaaaaagatttaagaatctgattatattactgataattatttgatatgagtaagtsttgaattactaaattgattacaagcaccaatatggcacagactgtgttttgtattcaaccgttgtgtgatcaataagtacctgtgggtttatttggaggcacccttcatcatgtaaggccccctgattgtcacagagctcaccatggtcttgtaggcctctaaaccatcgggaaccaagtgagagacagttaaaaacaaaaagccaaacaggtgggatttgcttggagacaaataatccctgaacataaagtgggtgttaatgcaaaggcagtggtagaaaacgaagaactctgcttgtaaatgaaatgaatattcactccttctgcttaccttgcaagttaagcaccagtattgagacttcatttgctgttaccagttaccaaaaatgttgacacaatttaaaaaacaaaactaaaaaacccactgttgctttagcttgtttaaatgcatattgtaccaaatcatggaagaattatagatgaacattttaaaggatttctaaaattatacttctatgaagaatagactgttaatggtatacagcaattactcttaactgcatgaaaatatctcattttgtttggctacacttaaacaggcctgaagtctagtgcaccaagacatactgaatttcaaactaaataaattaaaattaccatgtacattccactacatgtcaaaacaggaaaaaccatagtattatagttgatatgaaatgaagattacatacaacagtaatacagagaaaacatgaagctgcttatatttatttggaataagacaacagggtcaatgattttcactgcagatgtacttctttttgagaaaatatatccaaaaatcaatttacaaggcagatgaatttggctgttattatttatagtatgtaaatattatttagtttcaaaaggatttctttaaaccaggcacagtggctcacacctgtaaccccagcactttgggaggccaaagtgagaggatcacttgagcctaggagaccaacctgggcaacatagcaagaccccatctctacaagaaagtttaaaaattagccaagcgtggtagtgcacacctgtggagctagctacttgggaggctaaggtgggaggatcgcttgagctcaggagttcgtggttgcagtgagccatgatcacaccactgcactccagcctgggtgcagagtgagaccctgcctcttaaaaaaaaaaagacttattatttatttcagggttcagtgtccttgcttgtcattaagaacttgacagaaattagaggaatttaaagctatgatgttagatgccactgccaatttaaaatgaccaagataaagatagcatatctttatatgtaatagagagtgaaagagggcatctaattcaatttctaaaaattaagtatttatggagcatttcagatctattcattgtataaaagaaggcacacctggagtttatttctttagcactttagacttactcctgaatatgactgtttaaaacaagcatgccattttcattttatatcctgcagatagattctaaggtttcagagtcatcaaaagcatttcacatttctccaaggtaaacttacttaagagaagtagtgctttcagtttaatacaacttgaaattatctccattgtgagatggtgaaaatagtaaaaattgctattatttattgagcattcatagttcaaggtactatgctgaatgctttttatatcttgctaacttaatcctcatttttcatttattcatcagactacttgttatagagagcttactatgtgccaggggctacttaaggtgtcacagattcaacaatgaacaaaatagacaaaaaccactactctctgtggatcttacactccagtgggggtgggagggagataaagactatcttcaaaataagtaattatataccgttagagtgtgatgaatgacactgaggaaaagaaagcaggaaaagggttaagaagtgccagagttgtagaggaaggggtcacactttttttttttttttttttttgagatggaattttgctcttattgcccaggctggagtgcaatggcgcaatctcagctcactgcaacctctgccttccaggttcaagcgattcttctgcctcagtctcccaagtagctgggactacaggcgtgcgccaccatgcccgactaatttttgtatttttagtagagacggggttttgccatgttggccaggctgatctcgaacccctgacctcaggtgatctgccggcctcagcctcccaaagtgctgggattacaagtgtgagccaccacgcccggccagaggtcacacttttaagaaggttggccagagaaggcctcacagagaagctgacatctaacaagataagatgccctacaggaggtgaaggaacagcctatgtgactgtcttggggaagaacattccattctaggtagagagaacagcaagtacaaaggctctgaagttgaaatgtgcctggcttgttttaggcaggtgtagagggaaagatgggaagggttgtagaggatgaattcctagcgacagcagaggaggggccagatcatgtcaggccttgtaagccatcatgaggcttttgagttctactttgagagagatggcaagccctcacagggttttgaacaggcaaagaacatgatctgacttctgttttaacatatcatcctggcttctataggaaaataaaattctatttcacaagtggtcttgtcccatttcacagataaggaactcagattcagagaagttgagtagtttaccacagttcccatttactggtgaattagtgggactagaattttaatacaagtcaatgtaatttgaaagctcacactttttccagactgcctcccaattgaaaacaagcttgtgacctcagctggagtagttttctgatagtctacagtgaccccttttttctccttttctgtggaattccttggtctctcttgtgaggccaccatgttgcataactccggaagaaaccacttataccacaagtctataactgtgccctctggaggtgggcagtatgaagccaaagtgaagtggccatctatggtggccttgttctccagtgaagttgaagagctttgtacatggcattaaactctagttaggcctgtagcaaaacctgtttggtcagacatttgtgtcggactctctgtgatgtattttgccatctctccttcctctgacacatattctaccagctatctctaccaccctctactgtctggcaatactctagctgcagattcaacaatgaacaaaaccacagtatgacatgctggaatataagtggcaatacggcaagggtttctgttttgtatgggcagcttaggcccacaagtgtaagagaaagcctgagggagggtaggatatgagcaggtgtgcacagcttctgattacaggaagcaaaacacattttatttgatgaatatcaaattgaaagtaatgagaaagggtgctacctaattgtcgccaaaactgctgcttggcttaatttaggctcaactagattttgttgtatgccttagggtctgaaggcttaggctcttgagcccttgtttatgctaaaactaatttttttttagtttatttgaaagacattgcttagactttaatgattcaacaagtaagaaaataccctgagattcagagctttaaaaggaaattttgattcaccattttactggatgactttaatggaattatgtcttataaagctgtttagcgtttcatgtttcagaattctgcgtagaattctcaataccctagagcatcttggcatttttttgagtcttatgactttagttactaaagtcaagagaaaatcatggcagcatcctttataagattaactaaataatactgtgatattatagtattatactgtataaaatattagtgccaggaatgtagtgcaatgttggctaaaggcaaaggtaacttgctatctaaatcttcaagattagtaataataatcacaggacacaagatcaatacaatcacaactgccttttaaaatacatttttatttccctgaaatgattggtcaagaagtactgagatcagattttgctatcagatcttatttcaagttcagtatgacattttaggtgaggaagggctatgcttgatggaagttgtacctatgtttttgtggctgctgctaagcaaaaatagagtgtgcagaaagcagtttggcagtgccacaataggttaaacagacttacctgtgactgaggagtttcactccttggtatatataccccaaagaattgaaaacaggtgtttacacaaaacttgtacacagattttcatagcagcactattcacaacagccaaaggtggaagtaacccacatgtccatgtatgtatgagtggataaacaaagtatggcacattcatataatgaacaatagtatgatagtacaatgaataagaattcagccgtgaaaaacgatgaagtcctgatacatgctactacatggatgaaccttgaaaatgtgctgagagaacccaatcacaaaagaatacatattacataattccatttatataaaatatccagaagctggcaaatctgtagagatagcagattctgggtagggaggagggttaggaaggagggaggaaagaggcgtggttgctcaatgggtatgagctttctttggggtgatggaaatgtttcagaactagatagaggtggtggttatacaacattgtgaatatactaaatgtcacaaatggcaaattttatgctatgtgtattttaccacaatgaaaaatggaatgtgtgacttttgatttttaattctttgtgaatcctactaaagtttaacagggcgggggtgagtcctgaaaaacacacttgtggcaaatgcggggcagagtggtgacagccatctgaggtctgcaaggtgaggcttgtacatcctgattgagatccctcgtgcaggaacctgcctcatgtgggcacagcagccacacaggcagccgctccaggagcccctgatgccctgcagggctgttggcagtttcaaatatagcacagcttctttgaaactttcatgtaaagtcatgtaaaaccggaatactgagctgtttaaaacccaagcatacagaaacccagcagatataaattttaactgcagtgaagccaggataatttcagtttatccaatgaaaaggaaaataaacttttatgttctggtggtgctataataagtttagtgaaaggtgtatggaaagtttctagttattgctccacatgttctttttccttgtccttgggagcatgccactttctcttcttcacrccatattctactctcaaaaggaaatgctttcgaatgtttttttttttcatttagacaatgaaaataatatttgattattacaaaaattcagaaaaaatggaaatacttttttttaaaagacatctcaaccattcaggataatactattgatgttttggcatgcatccttctggtcttatttctatgaccatatgtgcacctgtatcttgatttttcactgggatcatactacatttatcaacatagcatggacatctatcctaccaataaatatcaatcaataccatacttttctttttttagagatggggtctttgtctgtcactcatgctggagtgcagtggtatgatcatagctcactgcagcctcaaactcctaaacttcaagtgatcttcctgcctcagcttcccaagtagctgggattataggtgcatgccaccatgcccagctatttttttttttttttggtagagatgggttctcactatgttgccctgactggagtacagtggcatggtcatagctcactgcagcctcaaactgctgggctgaagcaatcctacctcagcctcccagacatcataacttcttttttttaacttttagatttattcttctataatcttcttttttatttttwtttatttatttatttatttgagacagagtctcactctgtcacccaggctggagtgcagtggcatgatctcagctaccgcaacctctgcctgttgggttcaagtgattcctgtgcctcagcctcctgagtacctgggattacaggtgtgtgccaccatgcccagctaatttttgtatttttagtagagatagggtttcaccatgtgccaggctgatctcaactcctgacctcaggcgatctgcccatcttggcctccctaagtgccgggattacgagcgtgagccaccacgcctggccccaaacataatgcttttaatggtgatgtagtgttccattttacacacatggcatgactgtttcttgatcagcgttgtagaggagccaggggctttccttggagtggctcttttgtggttacttagccctctgtcagagatggttggtgactcaggttttctgaaattattttctcttactttttaaataatgattagtgatagccctcaaagcagagatgatggacaataaaggcaataaaggtccataaaaaatcagcttaaaccccactgcctttaggcacatttcctgactgagccccactccatcagttctctccgccttctgtgtcccaacagaagagggatagagtagtaggcaagagcatgagctttagagccagactacacgggttcacattctggcttttgtgacattaggcaggttatttaacatttctgtgcctcagttcacatctgtacagtggggataatagtagcaccacctcctaggctagatgccagaagtccctgctagcacaggacctggcacacagtactcaacaaatggcagaggttattgctattactcagtttatttaagtggccctaccagtttgtggctttgaaagatcatctatatgcttggacagtgcaaatagataacagattctgaaaagttcaaatgccagagagccttttacagtgttttccatatagcgagcctcctgccaatattactaattgattgtctgacctgacttgctgaaattctgggatcatcttggttggattttgcattcatttcccattaaaaatacaaaagcaaaaccaaatttaaacaaaacaaaacaacccaggaaacttgagaagtagatgtagattaaatgaatttcctttagataggtcaacatcaatgctgtgggctttcctagactctatggaaattcttgactaggagaatctagaattattagatgataatgtccagaaatacctaaaagaactgaaagcatttattctgaaagacctctttctagcagaaggccaaataaaattttctattcccttgtttattcaggattcttgggaactgaattatttccagtaaataaattttctagacagtggaagcttattcctgtaaccaccataacattttgcattttaatcattttgatataattctgtctggtgtatgctgcttagtttatggctttcatacagagttacattgaaaacaattcagccaatttgctaggccttgagtcgtcttcattgatatgttgttgtttagttttttttttttagctctgcctaataatctcagtaccatttgccttctaaagatgcagacagctgtacgcttacataggtcttttaacttttcatttttttttctcttgtttttttttctcactgccagggtgtgtccagttttactttttattacagaaatgtgcatgattgctttccccatcccaaaacacctttctaatttattaacttacaaattttatgtcccaggaaaccagaaacccaagcctgttactattttgtgtaaggaagattaataggcattgaataaagtcatgtacttagtaataggttttttgaccattcaaagcctttaaaaatttacttcctggttgcaggctgttatttggtaggtgtttaactctgggcaaaatgccattttatttataagctacagtgcctatgattttccattctggcattggtgccttcctgctgctcccaaattaagaagagaaattaagttaaaaaaatcacatgacctctgtacagttggtaaaagttttgtaaaatggaatttggatcttttaaatagaaggagatgtaaaatactgtattcttagatatcagtttataaatgtttttccatttttattacagagacatattgatgtctttgactgttggaaaccttgcagagcaagaatttgtaaccattgcacgtcactaccgtgtgcctgagggcacatgttcagatatggatttcttaatcgcactggcccacgaaaagttcaagaaaaatatgtttgagaatttcgacactttcatttattcctgtgtgtatgaagatcgagaaaagtaagcttttgttttattgattctaatcatttacatttctgtgaacctgagtaatgaaggaatttctattttatcaaaaagtgcaaaaagraaatagacatgtgtcatcatactcatactctactatttagcacaaacaccttaaatcattttcggagaagtatttaggtacagatatttcccagtgatggagagcttgtgtgtgtgtgtgtgtgtgtgtgtgtgtgtgtgtgtgtgatatggcatctggccctgtcgcccaggctagagtgcagtggcgcaacctcggctcactgcaacctccacctcccaggttcaagagagtctcctgcctcagcctcctgagtagttgggactacaggctcgcaccaccgcacccagctaattttttttttttttgtatttttagtagagacagggtttcaccatgttggccaggctagtcttgttgacggaataggggaggccctgtatctttgaaagaataggcttctcccttgcatgttcttttcatttgtttctagaagctttcaactgaagcatagtaaatcaaaatgttaggagggttaattctgagatgtcgtctttttacattattttagtactgatggggatttataaatgtaacttttataataaatagaaaatggaattttcaagcaaacattctgtagaatttctttgaaattatttcttcttgaaaataatgaagttcagtataagctatttcttatacattgattgtgtgcgtgttgagcttcattaagtcattgttacatacaactggatgcaaacaacttaatgtgttttttttgcattcatcttacagaccttatacagtggggagaaatataaatttactgatttcatctggaattagaaaaatcttagttcttgctctagcttctaatccgtattgctgcacaccactgccatctctcttccttgtgacttcttgccttatccccaaacttgaagtctgaacccaagtggccaactgcattccctgaatatctgtgtaggtcccatagtttgtcttagaaataatcattttttttattaatccataatgcatcctctttgagtttttataaagatggtatttttccttgactctttaagctttcccaagcttcctagaagatgtgtggcctgagttttgcatggccctggccctgccttccaccctggtgttgcccccttccccagagtgagaagtgtggccctccttcattcaaggaacacttcttaggaacaatggggctgcttgaccagatagcctgaggttcttccagatccatcaagctttgattctagatataaacattctcattgcaaagaaaagagccaactttctttcctgttggttctaattttgcccgatgcctggaaaagtgttggctgaatgagaacattggacaagaatgtctttgcccccataagactggagaaaatgacttttgggctgctctagagaaaactgctagcatctgaaaaaattgaagtgaatattgaggccccagctggggcttccaggtgataaggtttgggtccaaggaaaagaacagaaaaacaccctcaagtcatatcatacttgtgttggaggctctagatgcctgtcaaattaagagatgttttcaaatatcagaaccatttttgactagtggtcaagaatgcagatcaattacttagagcaacacttgtggctgtagccttaataggctgtactgtcaccaaccaagaatctgcatcttgaaggaaaagcctttgtaaggatggagtctggtggcctctgaaatagaaaaagttgatgaaatgaaatgtgactgttcttccttattgtgaattccaataccaattttcatacttccatgtgtacattctcaggaaacatcacaaatgtattttctttcctatagtatgtaattattactaaagrtatacaaggtatataaaagctcatttacgttgttttaatgcagaaaaaatgtattacccaccaaagacattaaaaggctgtgcaaatcctccagattacctttgagtgatgatcttctagaatccttattgtcaaggtaagttagagttccactcttgatagggattgtcctgcatagttttatttgggggaccattcctggttttacatctccctttaattacccttgatttacccttaactgttttgattatattattggtgacctgcctccatttaagtgttacagaaggaaaagtttgtcttgattttgaatgttagagagcctattacaaattattattttatctttttaacatgaatacacacttatagatccacagattcctgggacaaaatgaaatacacaactttgttggttaggaggacattagatgtaaaattcagggcaggtttttcaaagcagcagttcctgatagctatagacatgcagtaagagaacctagggttattagcatggggctctgtcctgatagagcaccagatgtaaaacatagagattatgatgctataaaatgagagcatggtgaactgctttctaaaacacatcagttctcctgttgaacctgacttttgatttcctggcatgtccctctcagccacctagactctggccatctcttatgcttcctatagcatcactcactctagctcctcctctgacttatatatcttgataattctgacattttcagctgtgttctaggcattgtgatcattgttttggatatattatctcatttactttttgagaacagcttggtgaggtcgaaactgttatccttcttatctcatacgtaaggatgctgaggtttagagagatgaggtattttgcccaaagtcacatagtgtagaagaagaagagctctgatttgaatcctgaacttttcaaatgcacatcctctgcttctaatcattttgagttactgtctacaaatagccagtagattaggatgtcttgacagttctacctcctccttactgcttgcttctactctctcctctccatttccactatcatcattcttgttctgacccacattgcttcttaaatactgcggtgccaccacattggtctttcatccaccagtgtctaaatgtttaaatccatctttacatatagcagctaagtaccttctaagagcaaaaatgtatgtcatcttattgcacttttactcacaaaccttctgtggtgtctctttgctctctaaggaaggaccagctctttaactttgaattaagctccttctccatagtggggcttagggttcgcagctggagcattgttctcaaatagggtctgaagtagggagtccttgtttgagacaaaaggagaaaccaaaggaacagataaagccaaattctatgtcagggaactagggtccaaggtatcaggagggaaacccagaagagggcaaatctagttggatgtgtatgtgcattgaatcaacctggaataattttctagattatcagttctatttgttttgttttgattttgtttttgtttaactctatttgcttttatttgctagcagccgtgtgagggatcctgccgtgaaggaactgagatgaagtaggcaggccttggactcagagttcttcacagatatcatcccccactcccaaaactccccttcctgttcccagtagtccagccacatgggccgtttagcatattacacatatacctcctgccttccccctcccccccccttttttttttggccttttcccttgctatttcatcagtaggcaatagctcccaatggttttcacttgctgaaagcttgctcttccttcaagacccatttcaagtggcaccatatccatgaagctctgttgcattcgtttggctgataatcagagtgattatctcctgctcagaattctcacagtgctatttatgtgtctctttatcccttaccttggaatgaagagttgtgacttgaacttcgattcattcagatgcagacactgcttctgtgtgatttaccacctataaataaccaatgggttgtcacatcctgacaattttacccccctcctccactcccatctcttaaattctttgagtccacttattagctgtgtgatcttgtgcaagggttttgacctgcctgaacctcagattccttatctctcgaatgacgtaacagtacctatttcctagtggttcagaggattaattgagataacatacataaagtacccagcacagtacctggtgcaaagaattgattgaggactaggagagaaatttaagtcagggaccatagaccacacactcagacttagaaatgaactggaagaaacctgtgtctttctatgtagaggaagccatgtttttcaacaattggatctgaatgcctttcacacattaagctgtcttctagtcaggaagctgtggatgtttattagattatcttttgatggtcttraggatgagttgtcctggaaagtccagtaatgtgggagcctggcctctggaggacctacatgtttcttatccagtgctgaggccaccaagtcatcatcctctcattctctcagcagactgttttgtctttgcctttacgatttgacattaaatgcaaaaagattgtttcagaacttgcttcgaagtyatctcagtctctgaacacatctgtctccaagcccagcttagctttgaggaggtcatcccgctcagctgctaagcagaccatgttcagtctaactttgcctctaattgtgcagtgacccttctccacactcaggggaaacttcagactaatcagattagaaaatgtctcattcccattcccctctccctccaatatgccctgccatgatttgggtcacatgcttagtgttttgcatcatctctgcagattcctttcaaagactgccctaattcctaatgggcccatcagcctgcagcttacatttatattctgcattcttattgttccccacagactccacagggctttacagagccctgaccagagtctctttctgcacagccctccttatggcacgctaagccagagccccctctgacgtctacagtctcccgtgggaggcaggcatggagcttgttgattttgttcaatgcatgctcttgcccaggaatagttttacctgccttggaatggagctgggcagctgctgagcagccgtgtaaccctgctgtgtaaattcagatcaggagatgaaaaacaatatggctaaagggttggatgctttctttcacccagtaattgttacccatgtatttctcctaaccctatattttggtaccaggattttccttctactccattcccatttttcttataattcagcttgatcttttccttattatgttaacataactcaaactggaatcaggacttcaaaacctttttgtacctggttacctcagcccctgtcagtttgtgctgtgggagctggtataaggtcaccttacttaccaagcaaattcatttcattaatgcacagagcatcagacttaaatgttctatatagtggtagcgattatccattaataataggagtgatactttgtattgatgtagtgctaagggccttagaatattttgtaaatttttgagcatattraaaggtacattttaattggcagtaggcattattcctcatttcataagtataaactctgagagtctctcactgaaagactgtgctccaggccaagatgagcctctaatggaagtagaactacaactgcctaagatactctaaacctttgcctctatctgagctcctgagggtagggactagatctcgttcatttttgcagcctcaaagacttgtcctgtgctaacgcactggacatggggtagaaaaacatgggctcggtgtccaccagagctgctcctgcctctgcaggtcaactctactgtttcctgaccatgcgattcttgggcatttactcaacccctctgagccttcatttggatattcatattcctctgtaataataagcaaaaaattctgattgttagaccataagaggtagagggaattctgaagccattccattctgtattcttcatgggactgggaaggaaagaggcagccttctcccctaattgtggccttctgaatctagacttggaataactagagattcaagtgcaactctttccccagcagctctgtcctgagctagacttttatagttggctttgggttccatggaatgccttagaactggcctcccaagagagctggtgcctcatccagaaatatcagttaaaatggaaaaagttaacagggctttaaaatcatctcattatagtctacccagccttgccccctgccctgctcccagaggcacggttagtgctcctgtgatttcacccaacaatacctggcagtgaggctgaagggcaagggctgagccatgtggtagttattgtggcagagtgtttggtgtactgatgaagttttcacagagaagccccttctctctgtctctctgtctctccctttttcctcctttgtgtgctctctcctctcactctctctgtctctttgtcagacccatccacccacccagatgctttctaccttttcaaatataaggggatttctagttgaaaagatttttcttttaaatcccaaaccatatggacaaacagagtatcgactctatgtacaggccttacctggcagctgtgacccacctcaccagagatctgtgctggagtcagaattggaatttagaggcatgactatttagagataaccagaattacttgttggcaacttgacgcagaggcccagagctccatctcttctcaagtgtctggccttgacgacttttaccaggtgtttcaagatgcacccctgggttcgttgggtaatggactgaaaccaaatacaactgagtcaaaaatggatcttcaccgtcttctctcccttccagaccattcccctaaatgatgaggtgacctttgcaatagaggagaagaaggctcctcttcagcaaaatacagctgccactgagccttttacctctatcaagggtggaaatagagcagttcaggattattccccgtagcaagaagatggatggcttcttggcttctgtggttttcaagccatttatcattttggggagggggagtatgaacatcagtcaaacatcacatcagactcagttctaagaactcccacctagcatgacatcaggaagcatgttcgaggggtcgtattatctagaaaggaaccagaggaattgccttccctccccctttttccacaacatgtctctgagtttgtgtagtggagaaaatggtggattcgcaagtatcagagggaaagaagaatttatggaggttttaggaaaacactttcgcactgtgagctaggacttgaaagtaagaaggctgactttttaacaagcgtagaaacacttaaaagccagaattagtgctgccctttagggcagtcaccctggaaggctgcacactgattccaacaatgtggccatagaaagttcttctttggaattgcttttcaaagccttttgaaaagaatttcctccagagtggcaaatctttgtcctttgaccatggatcagagttttaacaagagccaatgtygtttggagaggagtgaagcaggggactcaggtggagaattgggaccactttttttttttttatggaaagcacagcatggccatgaaataaggagatttatcttctatatgattcataggcttttccagattattttgaaaggatggctaggatttggtaaatgatgcttctagccatgagacagagggaggcctctgtgatgggggacttggggagataaccttcaggggtaactctagtcactgactgattgatttgttctcactcctgtaatattcagacctttgtctctgaactgcttcccctgcctcctcctcctcctctgacctatactattgttaggactggagatcttccttatgtcctgattctctccttacaacctcatctaacaagcatggtgtatagagtgcatgttataataacaaatgatggcatgaaaaatcaccctatgtcagtggcccaggaagctacgggcagaattttggagcagggaggaaaactgagagactcattcctcctgaatatactcctgactagtagcacttctttctttccacatctgacttttacatgtttactacctggaaaatcatgtctcagagtctctcatctgctttttacactccttaaaattttcttcatatcaaactgacatatgttgatagtcaaaaattatcaaatcattctaaaaagcttatttcaacaacagcagtctctggccacattcttctccaccccccagacccattcacaagaagaagccactttcagcacttctagctgcttctgctatttaaaatagcatgtacatattgagtgcactgcacatgatatcataattgatcatttgcagatactgtctgctaacttcctgttatagtgactgaaaatttagcttaatattgatttacattgctatttattcttttggaatgctcttaggatcttctctttattcctagtattctggaagttcatgatgagagagagagagagagtgtgtatgtgtgtgtgtgtgtgtgtgtgtatgtgtagctatatatagattcattgtgcttaacaccctataggcttttctagtttggagtcactgtcctttggttctgagaaactttctattaattatttaataatttcttctctattatgagaactcctattgctaagattttaaggccaggtgtggtggctcacacctgtaatcccagcactttgggaggccgaggcaggagacttgagctcaggagttctcggccagcctggcaacatagtgagaccctgtctctacaaaaaataaaaataaaaaattagccaggcatggtggtacgcacctgtagtcgcagttacccagtaggctgaagctggaggatcacttgagcctgggagatcgaggctacagtaagctataattgcaccactgcactccagcctgggcaacagagcaagaccctgtatgaaaaataaataaataaataataaatagaaagattttagagctctcgaatttggatattttctctcccagattttgttttttattaggatgcatttactaagggatttccttaagtttatattccagcccttctactgcatcttttactatcatattaaaaattttaattccaagagcacgtttttcatccagatattcctttcttgtagtcttctgttcttttttcaggaatgtaatacatcctcatatctcacatctttccctgtgttccctgaattgcctttggttccttttgttttttgtttttttttstgttgctgttttggcttctgtctttaatgttggatgctttggtcaggggaaggggtttgttgattagtggatttcactacccagtcaactcctgagccttcattttattagagaatccccagaagctggaatctggagatttctctggaaccattcagagtgtggagagaagaatcctatcttctcctgcaaagataggagggaggttgtgatggggaaagggagagtttacgcatggccactggtattctaggaatagaaaaggggaaggaaggcacctgaccgcccctcacctctgcactccattttgcctcctctccccaaactggagcttctttcattgaatttctctggagaacaagcctctggtctctacagggaggagcacagtacggaggaagatacttggctgttcagttgctcttgctttcttttttttttttttcttttgagacggagtctcgctctgtcgcccaggccggagtgtagtggcgcaatctcggctcactgcaagctccgcctcccgggttcacgccattctcctgcctcagcctcctgagtagctgggactacaggtgcccaccaacacgcccagctaattttttgtatttttagtagagacggggtttcactgtgttagccaggatggtctcgatctcctgacctcgtgatccgcccacctcggcctcccaaaatgctgggattacaggcgtgagccaccacgcccggacaccgctttctaaaggctttcaaacaatccgtgttttcagtgccacaccatattcctgcctttattggcacctggagtctgcagtcacttagtctcccaggaattttgtgggccaaatcgactggactctgagtgccctctccccactgacagggacatttagggttcagcttctcttcctcagctctgccaagttagttaccaatcctctgtttacttttcatcttgaaaagagtttgacgtctcttctctaccgtggtcttttttccaattctctttgtcattgtgggttataacctatttttattgttttttggtcattttggtaggattttggggaaaagggagagaaatacttgtgattgattcatcgtgatttactgcaaccctatctacttcccaagagcaaagaattcttccaagaaacatgagctagttttattccttttaattgaaatatcctttgttcttttctcccttgtgcctcttggggggattcccacacacactgagatcctctaagacagaactgaaaagraaaacttggagtattttaccacattaccacaactcttcctttaggcctggctctgggattttggaaagatgaactcgttcaagcattttttctcaaaaaacttttagacattatttctgagctatgtatacttttattcagtggaccttcctgaatatcatttgattcctaaatattcttcttaaatgtccccctaaatggataaatggttcaatgttttgagtctgacatatgaactgggcaggaaggaagactgggtgttatgaggtaacaagtaaatatcagagttagtggtaacaacatttaatgataggacttcgtgtggtgacttccagaaattttccagtaagttccagagccatcatctagggcaaatgcaaattcaggcatagggactcagataagaggaacttcaggaggactttctaaggaagcaacatttgaaatgggactttccagacaaagggaccagaagtgcaaatgccttgcatttctgccagcaatcttggcatgatcaaggaaccagaagaaggttagtatacctgaaacattgtaaacagagagagttttcaagtgaggagatgtaatcagagaggccatcagcagccagattaagttgggtcttataaaccctgataaggagtttagcttgtgttctaagtggattgggaagccactggaggattgcaggcaagaaagtgattgatctgatctgtgttttagaaagagcactgtggtggaggatggtctgctgctaggtaagagtagaagtagcaagaccaagacaggaagttattgctataatccagatgagagacaatagtggcttggaattagggagtggtaaaagagatggagagaaatagatagacttgttatatgctacagtggtagaacccacaggactgcttagtggattgtatatgaggagtgaagtctgatgtgatcctagatttatttggtagtctttgactggttcccagattaccaggatactatacttctgaaacccctaggattgagtaagtgcctcttataattgatgtaatgggaatttactgacaaattctgtactttaagaacagatagagaaacttattttattgatgatctcctcaagtctcccaattttttggctttaaataccttccatatggctaatgactcccacatttatatcttcaaatggactacttccttgagcttcagactcatagccccacttgctcactttccatccaaatgtggcatatctaaaactgagctcatgatctttccaaccagcagcccctacagtctttctcatctcagttagggcagctccattgctccagttattcaagcaaaggcattggagtcatcctgaatactctctttttccctctctctcttacataatatatatagtcttttaggaatcctacattcaaaatatattcagaattggccactcctcactgccttccagtgccaccaccctcatctaaactgccgttatctctcatctggatccctgcaagggacttctaactgtccttgccacttctgccttgccctctgtgttctactctgaatgtatcagtcagagtgatcttttaaaaatatcataagtcccttcttagtctgttcagattgctataacaataccgtaaactaggtggcttataaacaacagaaattcattgctcagagttctcatggctgggatgtccaagaccaagatgacaacagatttgggtctgctgagggcccacttcctggctcacagatgatgccttctctctgaatccttacaggattacatggcagaaggggcaagagtgctctctggggtctctttaattaatataagggcactaatgtcatcatgagggcagagccctcactatctaatcacctttcctaaagccccaactcctaatatcatcacattgatgaggcctcaatatatgaattttgaggggacacaaacattcagaacattgaaggtctcataacctttctgtataatatgccctagtgactcttagttttcctcagcataaaagccaaaggtcctacatgatctcattctttgaccttagctcctactcaggatattaggaaatactttctttcaaggctctgtgctaaaaaaaagtttattatgagacatctttaattgagttttcattcttcccccaaaacatacacaaataaaagaaataatggtcctacattttggctataaatatttccataaacagagtatgtcctttaaaggagttgaaatgactagtgagccataatttaaagggtggtaaacagtgggtagggggcagcatattggaattgtatcttagaatccttggccaaagaaaatgtacacaaaagaattacagaattcccctttcccctcttctggtcactttgtttattccattttgtctagattgatgaggctatgtgacttcagcttgtaacatttaatttattgctgctaatttttattagtttataaatataagctattaattttttagtactttgagaagaaaagagaaaaatctttggactgattaggagtatattttaagggcaggatcctggaatagggtgcctggaacaatgtctagtgaccactttgtattttccttcaaaaactggtgttacatgataattagccttaaaaactggcagaatgtgatcaaatttaggataggtggcattgaggcattacactaagtaattttgtgtttaggtcattgtagcaattgtgttgaaattactgtatcttcatggccaaatctctattatggttaaggaagaattttatctaatatccataattaggaaatagtggtcaaagagattcattattttgacctatatttttctggtacagaataatcatttgttaatttttgttcaaaatgaaaatgagctgaagtttttctgattataaacttaaaacaattcagatgatacacaaaagtctaaagaaaaatcaaaaatcagaatctctcttcccagagatatctattcttaatatgtaagtctattgctaccatattttttctgttttttaatatataaacctaaagtgggattgtaactctacatactgttttacagcctcctttctacttaaccgtgtatcaagaacatatttatacgatagcaaatttggatctaaataaccccttttaatggctacataataaatgataaagatgccttttattttttcaaaacatatactggtagaaaaatgaatctagcttgccttaaagatttaaaaggtatgcaattgaagaaatataaggacattctattttgctgacatgtaatatcaaccattaaactaaaaggacctttaaatctttttaacaaaatttcactatagtcttcattactgaatgagcaaatttgcgtctgtggcaactacaacaagtatttattgaacacctactaagtgccagcactgatcttgttggggatattttgatgaattagataggcaagatccccgctcaaagaatttacattctggagggtcagaagcaataagaaattgtaagaaataagaaaactatcagatattgaagcatatatggtattatgttttcatgataaaattgaaactgacattttggtcttgaattctgcagattgagtcaaattatatattataattatattttcaggtttgaagacagtgaaaaacaaatagattataagtcatttttctctgccctgaactggagaaagaatccagtgcctgaattgcaaccagcatcataccttaaagaggtaaaatgaatacctattttaaaaaccatctatggttacttcccttgcatgtttaatatcctttatctttaaattatttttcattataaaatattaacatcagtgcttttggaaagagtgcttatgtgtttctgggcatttgtgttaaaggttaatttactttccatgctgagcaaacatctgctctgtaaaagcatgacttttcttatgcagctgaattttttttaacctcgatcgcatccaattatatggaaaataggataataggttacagttataaatagatataaacactgttatcaagggattctggtaacatcatcataagccacaagagcaaatctcaaatggtgcctatggcaagaatccctagggtatccgggtatccgcggctgtgcacacaggtttgccatgggtgaaacaatagagaatggggatgcacatttcacagtgaaaccaaatttaaaatcaaaattctgtagaaaaatgcttggttagggaaaacaaagttcacatgatcagatggtgctctcaacattgtggaattgtctgaattctctaagatctctttggactaattgtctttaagaagtgggtgggtgggtggtggtttgtttgtattttaacatgctccagaaattgattttcttgggaaagtcccttgataaagcaaatgtcatgtggttgatactcccagaaaggaggcatttatttctcctggtctctgctgaccagctcattctggctggagctggtctagtgcctctgggagttccctcaggcatgcagctactccaagggcagccatagaacttccagatggttgggggaaagtagtagcctttggagtcagacagagctgggtttgaattttggccctgccacctacttagctgaatgactttgggtcagttaagttacttatcttgttgatttatgaatgtaatccccagataaatcaggattaagtattgactctcatcaggttctctgctgtaggctggggtccagagacaaacattgtcactgctacctttgaggggcccactactgatgggggaattggtacgttcgtgatttggagtgtggcatgatacagcctgcatgggattctatgggatgaggtggtagctgcttctaaacagactgggggggaacaggaagtattttcaggggaggtgacatttgaaatttcaatgatgagtagtaagagttagcaaggtaggaaagtgacatggtctggaaaaggcatttccaacagaattctctggacatgggacagcatggcacttgtacagaaccaggaggaattggtgtggccagagcgaaggcacatggggaagaggtgaaaaggatgaagctggagatacctgtaagggtgacatttgaatattgtcctgcgaggtctggagaccactgactaacttcaaggaagacagcaacatgatcaagagtgccctttacagggaacttgctttggctggatggtgggtagactggagatggagtctcactctgtcgcccaggctggagtgcagtgatatgatctcagctcaccacaacctccacctcccaggttcaagcgattctcctgcctcagcctcccgaatagctgggattacaggtgtgtgccaccacatccrgctaatttttgtattgttagtagagacaaggtttcaccatgttggccaggctggtctcgaactcccggcctcaagtgatctgcctgccttgacctcccaaagtgctgggattacagacacgagccaccacgcctggccatggaggctcttgtcctgttgtccccatacataacagcaaacaaagcatttactgtgtgccaactactgttctaagatctcaaaatcacctagcttatttaatcctcttagcaatcataggtgcatttattattcccagtttagagatgaggaagttagggaaacagcaatgtaaggcagagtcagaattttaactcaggtctcttgctgcaaagaatacaaaagaaaactgtcctttaaatataattatttttgaagacaatggattggattaacccaaatctgaaacactatcacaaaaacaaatcaatactgtcatttgccctgataaccctttcattctcatccatgtgaatatttaatttttacatacaaatagaaacatggtagatgggatttacattcttctacctttttgttgaatgttctagtagtctatattgactgtgtccctgtgtccctttagcactgctctccagagccctctaccgtgctctgaccctgcccaggccagtccttggcagctgacctttgtaggcacatcagtgggtcccctaggcctccagttgggttgaccagtgggatgcaccagcaggagagtagagggtgaaaggagagagaaatcttcttcctccctgccagtcacagcagattgacggcctcctccttccaaagtccacagcacttgtctagaggctctttgcatatggctggtcactccaggcgctggtaaccaccctcatgtgccccttcagcctcaggtggtagtaatggctccctgctgttataaacccaggggactagcccctattggtttttctaaacacttcccacaactttgtaactagtcactttattaaactcttctcgatttccacagtttgtatatgtctgccatttcccatgagcccctgaataatatacaggacatacctatttttgctataagcctttgtcattgttttccttactttctacttctctctttcctcttccattccactcaatccaccacccaaatgtttacctctgtgttgggggttttatcatttcctcatgtattgtatgaaaataagatcataccacatgcatttatctggagtgtgctcttctttcttaatcgtggaaaatttccctagtttaatatgtatagacctaagccattcttaatagctgtggtatgaatatataataatttattaatctcttttttttttttgagacgaagtctcactctgttgcccaagctggtgtgcagtggtgtgatctcggctcactgcaaactccatctcccaggttcaagtgattctcctgcctcagcttcctgagtagctgggactataggcacacgccaccatgcctgactaatttttttgtatttttaatagagacaggttttcaccatgttggccacgctggtcttgaactcctgactttgtgatccgcctgcctcggcctcccaaagtgctgggagtacgggcatgagccaccgtgcctggccctattaatctgctctttattgacaggcattcagrttgtttttacatattttgcctctgaaaacatattttactactttaatttttattttcctgatgactattgagtttgaatgagatcctgtcatctttttgtactacaacctacagtaagaaagattttttttcataacaacacagtatgcagatatataatggaacaaaaatttcacggattaatattgttctgactacatgtggtgcagtatgatacattttcttttttcatttctctcttcctttcttttcttttcctttttctcattccccaccacctctttttctcctctcttttgaatgttgttcgtgacccattaaattgatttcatgacccacaaaaagatcaccatccacactagaagagaagtcactgcatgggaaggccaaagatccactctgcctttaatcacccctccccagtttcatcacttcaactctgtcaactgggacaggtatcgagctgtggacctcagatgcttttgagaggcaatgtggaacagaaggtctccaatcacagggaccctagttcaaatccttagctctacgatcaactaactgggtgactttttacaaagcactcaacctttcaggttttcccatctcaaaaatggtgataagaatagttcttccattagggttgtgaggattaaggaagtcaatatacacaagtcacttaccacaatacctctcccatagtaagggcttaagtgttagatgctattattttctgtaaaattgagatgtcttactttcctcaagtcagggggctgggcagtccctgccaaggttaagatgggagattctattctttaatggcaagagaatggttctaggccaggaatgtcacatcagaaacagctgtgcttcagcactaggttcttctaattgcgattcatttacggtgagaaatttactcatagggcctcatcatttctgctgataaagcctagaaatatttcagtctgcaggaggcattcagaaaggactattctttttcagccaattaaaaagaaaagaaaatagatataaaatggtacctgatcaatttcaccaataatgagaatttaactagattccaaagagttcgaagcactctggtactgataagcttgttattatttcataaagaagacataaaataccttgggaatgttaccagtgagtctgtaatctcatgtgaaaatatttagcatgaaggggttgagcacaatgttgaatagtttatacagtagaatacaggagcaaaaagtataatatctactgacccatgtaagtgtgctcaaatgttattaataatgttgaataatgccctgaaacactgctgggtcagagtttgtcacaggtggggttctccaggaagcagatggagtctaatgtgcaggatgtttttttgggagtgtccttgggatcaactcccatggaaggtgggggaaaaaaagaagaatgggcagagggagaagtcgaactgygatggaagcccaaagatatccttggccaacccatagggagctctggagttagcatgtcttttcagcgttgtcctgagttgggccagaatggcctggcctttgtcctggtgggttggttcaagaagagatatgactttgtgcagcgtggctctttgtagccaagacatgtttgtagctcaggaaatccaggaaggggactcccagcagctgggccaccaaatccctcctcaaggggattctgggtagtatatcacagcttggcaaccaactactcttgaagcccctgttgactgttcttggtatcaactgagagcctagcagtgtgacagcctcctccccagcttgttccttggttatttcctgatcttcwattcatggtagggaactgagaggagagtggttatgccataagaggccatggtggagtcagaccagatgtgtaggtcccgggggtgcaactgggcagagaaaacctcccagttatgactttggggattgccaacgtttggggagtcttccatagccagccagtcacatgtagggcttcagggtaagatccatcaggttgtgaaggcaccccagccctgagtgtgaagtgatgagaccagaggtcttttgagaagaaggaatggcaggctgagctcccgtgtggaagcaaagcttagatggaggccccagggttgggaagctgcacccttcctccagtatatgagccggacaggctggcttgggttaaagtttcagaggtgttatgaagagctctgtagaagttaccaggacaggccaccacctggaacgtggatatttttactcctgggctgcatattgtcatcagcaggatctcatttctgcactgggaatcttccttagaaataaaaaaaacttattggctgatgaaagctgagtaggcttcagtactagattcaactctaattctgtctgcatcagcgtgaatggataggatggatgttatgggtggaaatttgggacaccttcccagtctagtgtgactaaccatcatggggtgagaagggagaggtcagaaaccaggaacaagaccacaggcttcagccaaccacaggctgagtaggggtgtggtctggtccacaagacttgagattggaagggagttctagcagggcatccctccaaaacagtgagcatagtgatggggaatcttgaagttagcaccattcggcaatcagagggagccactcagcaggctcagaccaagctttcaccctgccaaggggacagagctggctaagcccctatacccgtgaggttatagctggaaatacacagcatactcaaagggatcctggagatggatttgataaagggactgttgacggggtgggtagggttaagggaaccaagcggggcggggaggggggtggagcactcagggactggcaataacgggagaagcagggagggactgggggactggtgttattggagcccagcagaggagctggaactatagcagcaggtagagtagtgtagccactatagccactcccaaaccatggcctggcagggagggaacaggatgaagggaagtgaaatccatactctgacctcttgcttctcctgttttctgatctcctgatgctgcttcacattggctgaacccacccagaagccagagagcaaggaagcttgaggagtgatgcaatccacagagtcagtctcccagggcagaaagcagagtgaaaagggcaaagaatggatcttgaggggcaaatggagactgacccagcacaatctatttgttaccagaataaagccttgagctcagaacaagccccacagccaggataaaagctaggtctacactaactgcttctggggcttggtctgctggatttgaggaccagtttcctggactcagaggtggctcccctacatgtgctagttaggtggcctcagctagtaagaataggggtcaacaacaaacaaggagaatttaaagagtactatagtatagctagtctagctttgattagtcctactgtcctttggtgacaggtttttcctacatggttggatgtaagccatcatccatcatgactgtcggctatggcctgtagccaatggcctgtagcctggattctcattggactcccttggttatccctctgcctggcccmtcagcagcccatggtgagccatggggctgtaatttaactctcactccattatgtgactatctatggtctcagcatgttgccctggcactgtcatggcctggagaccccatttccattctattgtgtttgctcacagatggtagctgtaaaactggcagaataggtcccactgtttagagcctgtctggttaatctcagaagtcacgttttaaaaaataacactaaatcggttctcatataaactttataacttacactgtgtgactggcgtcttatcttttgacatttctgagaaaaattggatgtggcttcattttatgaacatcgtaactgcagaagcattagcagtcagctctaaagcactctctttcacaataggatgatatacggccttggcatcaggaagtagggggcagttgggtacaccttgggaaacatctttggacacccgccttgttgagactctccttttggtatttagagcatggaataacctgtgacattttgttgtcccaacaatcttgcaagaataagtattatccccaatttatagacaggaagctgaggctcggagatattcctaatggtaaggattgtatagtcaggggctggygccaattttttaaataagtaaagttatttctaatatttgtggttgaatataacagtcgaaataaaaggttgttaaccattcctcttagacttaaaaaataactggcaaacacatactggtgacctaacacagagcaataacctagtaggaaatgatactcctggaatccactttcatctatagcatcgggttatgtccacttgaattgtacacataagcctatcactgaagctcaaaaatccacatctccctgaaaactttacttgccctgcattgcacttccaaggaaaggttttgtttagaaactacgcctgtcttttagctacaactcacacatagatgacaactctgttgaagctttgtctagggaaaggggagacaatcatgaaatattggcattgctgtaaagtcagaaatgtatagaaatataagctaatcttctggttttatatatgagcttttccttatgttatcagaacgctcttgattatctcaagaaatattcgcaaaatcctcttccccaaatttatttcaatttgatttgcttaaaatttaattgcttttatgattttgtcaaactaattagattatttccaaagccatgttaactttatttgaagggagaaaatctgagaaaaacacaattttaatactatacacaccactggccttttccataaatgtatagatatttctcatagaaacatccttttcctagtgaatagaggggagtaacatggtgaaatcaccaacatgactctatctgccttgcatttgggaggaataaaaataaccttatttcagtgaagcatggaatttaattggctcccgatcttttcccctcatgcatctggtggccagtattacagcagaaaattttaaactagaaggagacataatccaattaaatttccttttaaaaatgtcaaagcaaataaatctagggcccattagctcacacacagctttgctgttctcactgggcagctgctgtttactgggttttcatccagtgccatctttgcttcccatttcaagggtgtgcgattttacagatcggcagctacattttttcaccactgatgaacgagtaatttattgccaactggtttgacatcttaagtgcctcgagtgacagccagcttggaagatgtcatagggccttcttggagacaatgattcccagacattttagaatcatgatttttgtatcattgaatttcactctgcatttcatagttcttccttcttccagaaaacactatgtggcatgtattgtttatgctccagattacatcaagttttcttctgagatttgggtgctgtcttttgagttatctggaagtgacttggagactctggatccatccagtttgccaggaagttgctttgtttcaagctgtgctgtggctttcttaaacatattcttaattttgataaatgcaaaattgcatagaatctacatctgacttcctctagaagcagacttggagacaaagatttaagtgtaaatcatttttgggggaggagtgaaaacactagtaaggaagtgggagagtgagaaaggaaagggaaggagctactaaaggcatattagcaaaccagttacaaatgtagatgatgtagacgattaagagttttgttttgttttgttttgttttgggacagggtctcactctgtcacccagggtggagtgtagtggtgcgatcatggctcactgcagccttgaaaccctgggctcaagcaatcctcctacctcagcctcccaagcagctgggactacaggcccacaccaccacaccccgctacttttttttttttcttttgtagagacagggtctcactatgttgaccaggctggttcagaagtcctggctttaagtgatttcctacctcagccaccccaaatggtggaattgcaggtgtgagtccccacacctgacctaatgattagagcttaatgcaactgggaaacactgacacttcagagtcatcccacccaaagtgcaagggagctgcggtattcatccatcaactcccatcagtcactgtttgagggctgctcttgaagtggaggaaaggaaacaattccctggcacttgtggcttgccacagggacagccaaagcaagcctcagaggccaaagagaagcccaagggcaaaggaacccaggtgctggcagttggaagtcagattggtgtgctccagagtggaaagaatgaggggataggaaggggtgctggcagagcctgctgcacgtagacagttaagatcccaaattccaaacctgcactgccaggagaatctgttttacagagacacaagtaagcttgttctcacctggaatgggtgggatcaacttctgtggatgactcctcctgttgtaaaagtaccacgcagttattcccacttaaaattgatatgcattgctgggaaagccatatgatatgagtttgctttgcattgcatagtgtaggattaataaaaagtcaatgaagacagtattttaactcactgcccagattttcataaagattctataatatttggaacatttgcagatttattaggaagtacaattaggcagtggtaatatgtggatttcttatgttgccaaaaatgtcttcattttaccaaggggctggccatgagattccttaagtaaatccgattatagacaaaattatgaagaaagtgcctttccctctacttaattgatgcccctcaccccatcccctgagccttggaaacctcccctgtttyctaaccttcctttggtcccaaatttgattccattagtcaattgtaagccaataggtgtgataatctccctgaaattgggggttggcaatagatggacccacagcactgttaatgtgcttgtggcatttatgaagtatttggacagaaagtcattcccatctggaacctaaggaagagtgacaaaaggaaaaataatcaagggaagtggtattgattcgaaagaaagagcacaatggggccggcatagttaggagagctttgtgagagccatggggtttaaagtggtcaggatttaaagaaatggactgctgttatcttttcatcttaaattatccttaattccaaatctcatgaatatttacttgagtttccttgtgcccaagttgctaacaaatttgatctcatctccagattcttgagttgtcaagattgcattttaagttctattattttctctgtattgtcagcatttaaatcacaattccttgctcaaaaaatacaaaaacaaaaccacttttgctgactcataagccatgaggcagaatcttctagtcctgacctgtttcataagaggatccagtccccgaataatttcatcatatttatatgagttacataatgcattatttctgtgttgaaaacttttatttggaagacctattagaggatggtgatttttgaaggcatatatttgtactgtttctctataatgagattaaatttacaaacatcacttaagagcaaatattgctgtaagttttgtaatgaaatttttgaggacatgttaaatagtggagttgaatgactattgatcttagccttcattgattaaaatatattgttttgtgtgtgtgtgtgtgtgtgtgtgtgtgtgtaatggtttactactttttggtgtaagtagtaagtagtaaagtagcaactttgttttaccaagttccatgtggtatgagttgcacaaaacaccccttaggagtgggtttagccatcagccgtctgaatggtgatttccctcttcatactgccagttggtggtttgggctcaacttctgagaggcagcatccttgagagagaagagtagtgtcgcttcaagaactgccttgttttctacttaacttttcttgttggaagtgtgaggaccaaatgtagctatgtaggacgaaagccagctgcttctgaatagatccttgtcagctctggagggtagccccgcagacgagcatagttccgcagctccactgcccaggttattataatccaggcttctccactgactggaggtttgacttgagacaatctatttaatccttctgtgtctcagtttctttttctgtaaatagattatcatcataatacttatctcgtaaggggtttctgtgatgattaaataacttaatacatgtaaaacacttaaaagagtatcagccatgtagtaaatatccaataaatttattgttattcctattactactaggtaattacaagattcctatctataaccctgcacaaatctgcaactagtttatcatcatcataaatcatctctgaaattaaggttttacacctgaattagagatgctggtacttagttctcttctgattctatgacaatgttatatttcatatatgactcatatttcagtgacttctatatctttgcacagttctggattctagctctgtgctatatagaaccgtatttacagatgtttaccagaatcttcaccttgatgtcccatggacacctgaaagaaaaaatgcccacagttgaacttagaatttccctctgagccttgttttcctactaaaaaatgtttttcaacttttcctgctttccttatgatataacaccggattgaatattgtcccctccaaaactcatgtctaccctaaacctcagaatgtgaccttatttggaaataatctttgcagatataattaattaaaatgaagttatgctggattagagtggaccctaaatgcattgattggtgactttataagaaagctgcgtgaagacatattggtatacacagagaacaccatgtgaagttggaggcagacgttggagtgatgtgcttacaagccaaggaatgactgccagccaccaccagaagccaggagagaggcatggaataaattcttccttagagcctccagaaagatccaacgctgccaacaccttggttttggacttctggccttctgaactgtgaaagaataagtttctgttgctttaagccacttactttgtggtactttgttacggcagccccaggaaactaataacagacactgtcaactattactgaatttagaattcttagaaccatccttacctgtattagtttcctagtgatgccctcacaaagtaccacagactgagttgcttaaaacaatagaaatttattcttccacagttctggaggctagcagttcaaaatctaggtgtcagcagggccatactttctctgaaacctgtgtgggaatccttccctgcctcttcctagactttgatggttttctggcaatctttggcgttccttggtttgcagctgcaaacctctaatctctgcctctatggtcacctggtgttccccctgtgtgtctctgtctttacctggctgtctttttatagggaggccagtcatattggattaggggcccaccctactccggtatgatctcattttgctcatcttaatttacctaattacatctgcaaaaaccctatttccaaacaaggtcacattctgaggtactagggattaggacttcacataactcttttgcatgaggacacaactcaacccatagcactacacctttcttttgtcaccatttcaagttgatccccttctagctatttcatgttctcctgcagcagcatctctcagagtagctcctgtcctccatgcccgcttcagccaccctggttatggcacagtcatttttctgcggtattatagtactcacctccagattgattttcttacttcatgtcattctctgtacatccagcaagttagctaatcagtttctaatcagatttctgtcatttccctggccaagacctaccagtgacttcccctaaccacagcctcaagtataaactagcacagaaggccagaagtttggccccagcttctccttctaaccatctctcttgccactttgcaccatgtgccrcaaaccacactgggctactcaccctttcttgaaaatagattttagatctccaggcctttgcttacgctggtccctatgcctggaatacccttcacaaccctaaaccctctgctgaactgtttttcatcccataaggtgcaactgaatcaccacttattcagcttgcttccaaaattccatcacatcaaattattgagcctttacctatgtttctgtgacaccttgtgattctggatactaatgtaacactagtaaagatatagaacctcttatatacaacaattaaccttgacagtcatattttaaccttgaaagtagaaatataagcaaccatatgtatgaactttgcctcctgttgatattaattaaccattgaggcatatgcaaaaagtttgtgtgtgtgtatatacacgtatttatgtattatataaaatgtgcatctgtgtgtgtatatgtgtacacacacacacacaaataaagtggcttatctgcaagatcatactgtgagtgatccagtgttcttttcattgtttactgaagaaacagtaaccaatcagccagtatagataccagtttgtattttaaaaattgggttctttaggcagcagttcacgtctgtaattccagcactttgggaggctgaggtggacatataacttgaagccgggagtttgagaccagaccagtccggcctatatggcgaaacccgtctcctagaaatacaaaaattagccgggcatggtggcatgtgcctgtaatcccagctactcgggaggctgaggcatgagaatcacttgaacccgggagttggaggttgcagtgagcagagattgtgccagtgtactccagcctgggcaacaaagtgataccctgtctttaaaaaaaataataaaataaaaataaaaattgggttcttaagaaagtataggaggatctatcagcgtattcatgctgcataacaactccttaaatttcaatggttcacaacaagacacatttctttttcttgtctatgggcatgtaggtcagtgaagcatggctggattcagctaagcttggctcttagtccgcaagtccagcctggtctgatccaccttggtcattctaagaacagcagcatcctgggccatgttcttttcatggtgatggcagaggcacagaaggccaagccaaatgatgccagcaygctagagcctctgtccatgatatgtctgctaatagtacataggtcaaagccagtcatgtggccaaccccatatcaaaggaacaggaaaatatacccttcttactccacrggaggttctacagagtcatatgacaaagagtgtgggcacataattcttatacagggagggaatgaagaatcaagaacaagtatccagtagaccacaaagtccttatgaacctaaagtagatggtagaaattttcactttgcaaataaactggtgttgaattttcaaaactgtactttgaaatgtggttctaatcatatccatttttggtttttttctagagatgtgaagatgtttggcttggtatgccatcacctattcctgygaaatacattgactactggacctttttgaaggacgcgtttggcttagaggaggaataaccatgccagttttggtcaattctctatgakttacttctctcattttgccacatttactttagtagatataatttcattaaaaacaaaaaagaaacaaggtttatattaaatggaaatccataaaccacaattaatcctattttgtcatgttagttttacagaacatcatgttacattgccgacgtactgttactatttaaaatgccatcttaaaacatgttgaatatttttattatatgtatggtttattaataccaaaaaatcttctgataatttttgatccaacataatttgattcattactatatgaacagaaaatgacttttgaaggttatacatgacaatacaaaatcaaattatatcacagcaataagttgtgattctattaaacatttttgaaacctttttgacacgtttattacttacataattaagttttgtagcaacccacctcatcaaaataattcttaaacctctctagagtaaatatatttatcttttgaacttagtaaagctatgggaagaaaaagaacctccmacacacacacacacacacacacacacgcacgtgcacacacactggaaacatatgcagtatttatatttgtaatgcccttttttctatctaaagtcagcttgttagcttaggaatatatgcatgtgtgtataattatagtttgaccaaaactttattatgtctaaaatatttacaaatgtgaaagctgaagattttgagatttttgttttttttttggtttgttttacacacacatcccacgcgccccaccctagaggtttaaatattcagaaactacaacatttttcccctgcatttttctagttctatttttatttttcttcagcagaactcttgtcatgtagtgtacatttgattaaaacccatagccatgtacctctgggaattcagtgtaagaagtctatcccagtctatgccattgttcagtgttggatgctatgtatcataaatccatttgcctggtgttctgggagacaatggaggtctcaaaaaggagctgcaccatttacctttcagggactaccctgagaaaaagaagagctgatgacatctcaagggacccttcggactcattattctttcactccacatttgcagmwgtgtcttgctggcttcttggcactcaaatgtaccaatttattctccacaacaatggccctttcatttttaaaaaattggagttaatcaataaacgatttctatatgtaagcctaggataattccacatgtgctattgttagaatagacgctcctcccaaccctttcaggacttaacactaaactagtatactcaatttatatactaaaactatctaccataaatcctaaatttgactacttgatttttgtcccaggttttttttaaggcaactgacagtgccaagccattttgtcactttaagatttttcattccccagagagcaggcttttagaaggatgacactttcctggaacttttcaagctgacacattcgtcacttacctattcaactcttcagtcagttgtctttccttcaagagtttaaatacgtagataatttagcccttgtagaggctcataatgtagttcatttgagaagtggggggagaaaaagaaaggaagcaaaccaatgacaatgctcctgagttgtggggtgacaactgcttattctattgcatagatgtgtgttactgccctggttgtttctggttcaagcccacaattagcaatgaaatggccattataggattcatgccgataaacatgatacgttgcagccatacagacactttaaataattattctttttataactaagccatatactggacaagatttataatttagagataatatccccattagtaaagtttatgacccaataaacagctcccactagttaataaatgccaaagccataaaaacaaagactattaatgtaatagaatttctgtacctccctcttttgctggtggtctcaagacactgaagggaaatgctatcttaggaaaaacatttattctcgttatgtaaatatcagtgaattgtcttacaatccatctggaagtctcccagccccccttggtcccaggtggtcctgaaatgctgatgcattctgcttaggtttcaagcagtagataactctggctttcagcacaaataaatcccgagactaaaattttggggggaggaggactggaatttctgcctcttctcttccctctgcaaaagagaaatcccaactattgtcattgttccagggtaataatttgaaagaagtttcacaacctttccatatacttatattttcagctgctaacatgatctcattttgatgaaaaagcaagtgccacctttggatgtctgggtgagttgaaggttaatataggcaaaccttttgtcctaagaactaattgttatttagtattcttggaactgtgggaatgattgataaagccatttgaaaacccaaatcaaatcatgtcttttcatacaaaactgattaaaagctgttgaagttcacattaagtggtttgctgaggcactgttgtgaggtatgatgtcgccagcagaggattaatttgcagtacttatttgccttttattaccttttttacctaaccacttgaaaagtaatgtgggtaagtctgttggtttactttagcttaagtttactaaaatggttaaaattttagacaacagaggggagatttgtaactttcaagcattataatagtttaaacattttgcctactttatttcctgtattgcctttggttcaattactgacaaatatactattcttgttattttttttttttaaacgctagagtatttgaagtttgattatttggagtcatagagcttccaggctttatggacccctcagtcatgagtttagaatatttaaattgcccttccttctttcaaatagggcattattgatgagtaaaatgaaatctcaaatcaatacaaaacacaaaactcttgcctttccaactggaatttatcttgagttggggttgcttcctagccttttctatttatttcttctttctcctttcccttccaccacacattatgattttgctataagtttagtagttggagtcataacgaaatagggccttccacaaaatatttatgatattgaataatgcagaatccattataataaagtgccatgctctcaattacatgtacattcattttagttatgagtatagatccctgaattttcaataccctaaaaaacggtctgtaaatgacctttcagacaaacagcttcccagtgatggtagaaacatatacacgagtgatgtgtctctgctctaatgtttgtttgggcaaagtctgaattgcttcaagttgaaggcaggttaagaccttttcaaaaatgagtgttttcaagttgactgagcatcttcagagacaccgtgcttttcaattcccaagagaatgtaatgtgtaaaaatggaaagcccactgaggcaagatcaatgaggctgtttagaaaataataaacctggagcgataatggagcaaacattcattattacaaagggtagggctgactgtgcaattagtttaagagaattttgtaactcacctcctccgcttattctaccaggttatacatattggtttaaatatacattttcattcaaggtcaattaagttccctaaaactaagagttctgagacatctttgtcaacagagtggctagaatatgcatcttctttgtaatttgttcctggtccccagtaaaattccttgcaaggggactttcaagcccattatgtgtctggtgtgtggtacacacaggagcccggggtcagcactgctgctcagaagcaacttggtaaaagctaaaaaaatgtggccgatgaaaaactccacagtggctctgcaagcagagaattaatgactcgctggaatcagtaggagcctttacttctaaatactcattagttaaagcagtgaggcctgatgttatgcaagttagagagggaaaggggggactgcccctccccattgtctattttgaacagaatatgcacatttaactcaaagtgctgaatgattcaaatacatcaaacccactattcatcagtctcctagcttcctgagcaccactttgcatctgtgtaaagccaacaatagaggaaagcttgttatgaccccactataatattaaaatccagaggagctgatagcttggtgaaaacataaaaatgcattctcctttagaaatacttccaccaaagtcatctttgtgtttcttttttcctactttgcctatacaacaagaacctctgactgaaataggaacttgataacattacttttgcctgcttttttctcctgtgctaccactggtcattattgctgtgaggccacccgttgaataaagaacaggagctgaacggccatttcaggcgcctgcgaatacccccagttttaactatgactggagctaggagagtgagaagggaagtggcaaaagatgaccattttagaggggagtcgggacaaaaatagggaccaccttgtgtgtgactcatgttgaagagtttgcacttcatcccaagggaatgagaagtttctgaaatattttaatctggggaatggaaagatcatgtctgtatttaaaaatctctggctgctttgtgtgtgtgaactctaagagtgtgtttggcggcaagaagactgattaggagactgttgccagagaagtgatgggtagtttggattaatgtaatgttggtgagaagtggagggattcacgatgcatttgggatgttggagatgagggagaagaaatcaaaattatgactgggtcattttcacagctggatagatggtgttgcctttcattgtgctgggatacatgagagaaaaatcaagtgaagggagaatatcaaaaattctgccttgggcatgctgaattagggtgcttgcggaactgataagtggccatgttaaggcagctggattaacaggtctgaatctcagcagaatggcctgggctggagatgcatatttgggaatcatcagagtatggatggtaattgtgagttcggataagattacccaggggaggcatgttgtctgagaaccatagtgcctggcatattactaacagtaataactttctaaaaaccagctttattgacttaacagtgaactgcacatatttaagtatacaatttgatgagttggtatatgtatatacccatgatacatcaccccaatcaagataataaattgttaaattaaactaaatttggcctgaggctgccttcctcctttgagtcctaacttaatgagctgtaaataactgaaagcctgacttaggagtgtcagagacatttgaactagagcgactccatcttgaataggggctgggcaaaataaggccgaaacctattgggctgcattcccaggaggttaggcattcttagtcacaggatgagataggaggtcagcagaagaaacaggtcacagagaccttactgataaaacaggatgtggtaaagaagctggccaaaatccaccaaaaccaagatggtgatgaaagtgacctctggtttccagcttcatccatgtcccatcctgcttagcaaactgtcgcaaggacaagaaaccaaacactgcatgttctcacttataggtgggaattgaacaatgagaacacttggacacaggaaggggaacatcacacaccggggcccgtcgtggggtggggggaggggagagggatagcattaggagatacacctaatgtaaatgacgagttaatgggtgcagcacaccaacatggcacatatgtacatatgtaacaaacctgcacattgtgcacatgtaccctagagcttaaagtataataaaaaaagaaagtgacctctggtcatcaccactgctcattatatgccaattataatgcattagcatgctagaagacactcccaccagtgccaggacagcttacaaaggccatggtgatatggtttggttctgtgtccccacctaaatctcaccttgagttgtaatccctataatccccacgtgtcaaggacaggaccaggtggagataattggatcatgagagacagtttcccccatgctgttctcatgatagtgaatcagttctcaagagatctggcatttctcctgcttgcactcactccgtcctgccgccatgtgaagaaggtgcctgcttctcctttgccttacaccatgattgtaagtttcctaaggcctccccagcaatggggaactgtgagtcaattaaacctcttccctttatatattacccagtctcaggtatttcttcacagcagcgtaaaaatggactaataaacatgtcaacatccgaaagttaccctatatggtctaaaaaggggagggacccccaggtctgggaaatctccattcctttcccagaaaactcatgaataatccatcccttgtttagcatattatcaagaaataactctaagtatactcagtcgagcagcccatgccactgctctgccaatagagtagctattcttttattctttactttcttaataaacttgctttcactttatggactcatcctaaattcttccttgcatgaagtccaagaaccctctcttggcatctggattgggacccctttccagtaacaaaaacacaataccccaaagtttagtaccttgatgtgctgagtactttaaaggaggtttgaagtcctcaaaggcaacgtctctctgaccctctcctgccctcctctctctatccccggttttctcctagaaaagtgtcatagaaaccagaattcctcttccccaatgcaggtcatagaacctagaaaggtcgttctctgaccttcccccttttcccttggagaccctcatgtgacaagtgtcctgtcttatacccagaggaaagaaatgctacacaaagaggccaaaaagcatatgaatgaacaggccttactgagcttcccccttcagtccattaccattagattgtacctttttgtccaatcacatttccacacagctgtccattcttcatcaaacctaagcataaaaatagacagtttgtcctgggtctttgggtctgaaggctcccatgtcacatagaaccttgattaaataaa

SEQ ID NO: 96383 - DNA, 32320 bp, Homo sapiens
tctggagctaacctttccaggtgtccagtatcttttgttcggtcaattgttgctttaaaaatttcaaagctatgttattactaggtatataaacggacatatctctacatctttatctgctgttccttaccagtatataatgttccttttttacccttgcgatgttttttgacttaaattgtcaaaaagcaatattcagtttgctattctagtttttttgttcctctgatatatctatctgtcccattcttatatttttcaaaatttgtctctcttggttggttggtttgattttgtaatagctttattgatacataattcacactcatgtagtttgcccatttaaagtgtacagtttaatgatttttagtatattcagatttatgcagtcatcacaattaattttagaacatttacattactccagaaagaaaccctgtatcctttagctatgatcctccaatccccccattccccacaactcagagcaaccactaaccaccctattctttatggagttgtctgttttgaacatttcatataaatggaattatacaatatggtttcgtgaccacatattgtatgactggcttctttcactgaacatagcatttttaaggttcatgtatgttgtagcatgtatcagtacttcatgtacttttattgctgggtaaattccattgcatggatatgccacattttgtttattcattcattggttgatagacatttgggttgcttccacttttttgctataacaaataatgctgctgtgaacatttatctatgagtttttgtgtggacagttcctttggatattattcaggaatagaatttctgggtcatgtggtaactatgcttaatcttttgaggagctgtcagactgttttccaaaatggctacaccattttacagtctcagcagcattgtatgagggtcccagcttctccatatcctcaccaacacttgttatcttttttattgtaactatcctaggttttgtgataaggatgcaaacagaaagctggaggtcttcagggacctagtgaatgaagttgtgtcctattttggcttgattttggttttccgtgtgcatagtatgacatgttgcccatgtttttatcttttgggatctgtcactatcacattactttgccaaatgttaggaacctgatggcccggcacagtggctcacacctgtaatcctagcactttgggaggccgaggtgggcagatcacgagatcaggagatcgagaccatcctggctaacacggtgaaaccctgtgtctactaaaagatacaaaaaattagctgggcgtggtggcgggcgcctgtagtcccagctacttgggaggctgaggcaggagaatggcgtgaacccgggaggcggagcttgcagtgagccgagatcacgccactgcactccagcctgggcaacagagcaagactccatctcaaaaaaaaaccaaaaaaacaaatgttaggaacctgaatatctaaatcaagctttaaagaagcatttgctagctatgctcaatgtttcatcttcactgtaataataaaatagattgagaaaaatgctttcttttaaataaacgtaagtaaaacaatttgaaaacgtttgttcttatcaaacagccttttgttcccttgatattttatacaaaatagtagatagcagaggataagttcctgataaggaatcagtattttctagcaggaaaagctagagaacaacaacctcaaaaaaaaaaaaaaaaaagaagaagaaagaaaaaaagcaattagcatttcacaaccagcagcagcagcatcacctgggagcttattagaaatggaaattgtcagtcccctccctggatctactgcatcaaaaaatgtgggaagggaggccagcagtctgtgctgtgtaaccttctgtcaggtgatttccatgcatgctaaactttggggaccatgctagatagatgataccattttcagaattattttcctacctgtctaatactctgactttagtcttttaagaacagatgctcaacagatatttattgagcattttttaatgtatcagggcagtatcatataccaaaaatacaataatgatccacaatataaaccttccctgagctcactggacatcatactttcagtaatagtttgttaaatgactgttgacatgatgaatgcccagtgctcatgaaaggttttatgagaaccagaggcaaagtgcctggttatctgttgggtacttaataaaccatcacttttgtttgaaactggccagattttctgtacattttgtgttactgctctgaaaccctctaagtcagaattcttttgattggcttcattcttcagctgaaaggccagtccagagctgtggatatatagtccattgctttcataaagtgttttttttctcctcctctatttgtgttgacttttagctacttgtgctattcattttccagaatgattcactcattccatcctgtctctcccagtttaactttctttggtgggttttctttggcattattggcctgggcacagtggctcatgcctatcattccagcacttggaaggccaaggtgggaggatcccttgagcccagcagttttacaccagcatggtcaacacagggagatctcgtctctcaaaaaaaaagaaagaaaattagccaggtatggtggcgtacgcctgaaatcctaggtacttgtgaggctgaggcaggaggattgccggaacctaggagtttgaggctgcagtaagctatgatcacacccctgccttccagcctgggtgacagactgagaccctgtctcaaaagaaaaataaaaagaataattgatttatttaagaaatatttgtagtatacctataatatgatagggattggagataacttaatagatttgatcattgctgtcatggggctttccagtctagtagagggaaaacagaaaataacattaaatatatatatataaattgcaaaacatatgcaatgaaggagagaaggagtgtgatagtgcataatggaagtgggaggccacatcaacttagcatcctcagggatatctcagaaaacctttgagacaaaacttaatccataagaaaagccagctaattgccccaaaagagtggaaacaccagcattccaggtagaaggaatagtatctgttaatattgaaggaactgaatggaggttgtcatagccaaagcagtgggctgtgggagagttgtgtgcgatgaagtcagggccagatagggaaggccgtggagttcttttaagccttcatacaaagtttgcaatttattctaagtaatagcacataggatattcttttatatatgactgtgagatgcagaagtggagaccatgcattctaactggggcttgggaggccagggactcatgcagcctagcctggcacatagccaggcactcccatttaaatgctgattgctggtgagatgcaggctcttgtcctagctctgtaggtcactttttgcttttgcaaggtaagatgctcacttgtatgagaaacagcgtattatgcacctgtagaactggtggacctgtgactcattctttttgttatgactggtgtttgcttccaggtaatagcagtgagtgcccgcctccaggaaatgctgaagatgacactgtttgcttggatcttggcaagtgtaaggatgggaaatgcatccctttctgcgagagggaacagcagctggagtcctgtgcatgtaatggtgagcagttttattcccagtccagcagcaggagaaaacatggcctttgtctgccaggctcccttcctccatttggaggttgtgcgaatgacagcagtggtgagatccaagccgaggatgaggggatggggaagggcagggtggtgtctggagacaggcatctctgcatgcagatccaccatacctgggagacctatcctgttggtgtttcttcttgctgcagtttcaggccatatggcaggctttgaggtgggagaggagggaattttgttgggggtgagtgggtgggtaggtagaggtgtgtcctagccttcctctgctccatatcatacaaaccacaaaagcagcagtagctatctacattacattggcatggaactaggatactcctgcaacaactccaccagagagagctgattccaggacctaaccccactagatgaggatttttgcagttatcaagaaggctgggtctgctcccctctgatctcttagagcagcctggggcaggagcctctctcctgctggcctgtcagttttccttaggtttctgtgctattttggaacccctgggtttgagggcatcctcatggactggtcagggactggctggactctgcttcccaccccacttaaaccatgggagtcgatgagggagttctcttgctttcaaaatagacagagagccaggtgtggtgactcacacctgtaatcccatcactttgggaggccgaggtgggcagatcacttgaggtcaggagtttgagagcagcttggtcaacatggcaaaacgctgtctctactaaaaataaaaaaaattagccgggtgtggtagcgtacacctgtaatcccagctgctagggaggctgaggcaggagaattgcttgaacccagggggcggaggttgctgtgagctgagattgcgccgctacactctagcctgggcaacagagcgagactccatttcaaataaataaataaataagtaaaaaataaaataaataaaagacaaagaacccggtagttaaataaaatcactgggttggaagctcaccatccatacagtggagtgaggaactcttccaagttcaataatgtgtaggtaaagaagataggttgagggcagtgtctcacatctataatcccagcactttgggaggccaaggtgggtggatcacttgagctcaggagttgtttgagaccagcctgggcaacattgtgaaacctcacctcttaaaaaaaaaaaaaaaaaggtaacacgtagcagatgccaaataaatctgttgtgttgaatgccaagaggcttggggtgctctggaaggacagagcccgacacagtaaaagtccaagaaatattttataaattagtgaatgatgaaaaggttttctttttttttttttgagatggagtctcactctcgcccaggctggagtgcagtggcgcgatctcaggtcaccgcagcctccgcctcccgggttcaagtgattctcgtgcctcagcctcctgagtagctgggactacaggcaagcaccaccacatctggctaattttttttatttttagtagagatggggtcttgccatgttggccaggctgttctcgaactcctggcctcaagtgatctgtccgccttggcctcccaaagtgctgggattacaagcgagagccactgctcccggccttttctgaaaaggttttctttttgcttgtttttgtgttctagttgatttctttttctcctaagtatggtttaattttctggcatttctgccattcttatgtatgcccacatggctcacagatgcccggtgttttatcctgtgacctgtcagagctgttcttgggaggagttgtggagctttggctgcagggctcatgctcctggggtcactgagctccccacccaagggtggacagttgtgtcccagctgctctcgctttcagggagccagtgtgggccctgaggggcacactttagactgaaaaaccaaggattgaagtcagcagggtgacaagaaagttgggacaaagggaagcatttagaagagcattgtgaggggcttgaaggggagagaatagttagactttgaagagaggtcttgaatctagaatggatttttctctgcatttttttttaaaccttgtggcctctgtcactgaaggctgaggagtgtgacctcagaaactactccttggtgggggctatggatagtattagctatttaaataaaaaataaatgtgatttcttacctctttgggagcatggtcagggaggaaagaggaggcaggaggagaggyaggtctcagaacaatccagctgtcaatgcgtgttctctgttccagaaactgacaactcctgcaaggtgtgctgcagggacctttcyggccgctgtgtgccctatgtcgatgctgaacaaaagaacttatttttgaggaaaggaaagccctgtacagtaggattttgtgacatgaatgtgagtatttatgtacagctttttctgtaacagccagataggaagtttttattttgtaagtacwtgattttgcagatgaaaacaaatcaaaacacaagtggggctacatccttctggcccattgttatctacgggtattacttaggaggagaagacggagtgctttcaggtccctgcctgtagtttccttctgtggtgggaggctttgagcccagagactgagaaggactggggtggggactttatggtaaagttggttggtttcaggcagtgggtcctaattatgttttcctagattacttacagaactgactaagattgcaaaattattcagggtgtgattttgaaacaggtgctgaatgagtaggaaagacctagaaggctrcttgacttacttaagccagacccttttgttctctagagaagcataatttttctcatgcagaatgatgggagagggttttaagatttacgaggcttcacagggagtctggctgtgttgttcactgtccactgtgtatgtgtagagtccttactggaatgcctcatctttagcaaactggtttccttgatttttgtctcctggtaattctaaatcacttgtaaaaatggagtaattatgaaagtgttaatgacagatgttctactttcttgggtactcattaygcggaagttattgccttgtgtcaaagatgggaaaacgtttgattttaatgaagccctttacatgtcagttatttttataaagctacattgcttctgaatacattgtgtttgggaatgatgctgtatgtatgttttttcttcatagggcaaatgtgagaaacgagtacaggatgtaattgaacgattttgggatttcattgaccagctgagcatcaatacttttggtaggtgatttccccagattacttactgagagctgagtcaatttctgtgatgacattagaaaagtgtgctttcagagtgatgtgctttaattctgcagtagaaggtggaactattcacagctttagttakgaaacaactttgttggctagaataaaatgaactcatagatagtctgtccccgtggagcttggatgcacagattttctgacaagggaaataaagtcaaaatactggcttccttctttacccaaaaatatccatgtgattagcataagcatagtttaatgctatagactgaatcctgattgatgtaagagtgtttatttgactgaatgctatatactgaatcctgcttgatgtaaaagtgagcctcatattttgcagaagcagggtatatcatgttgtcacgagtccataatttaatcacaaaaataatatccaggtaacaaaaactttgtcttcttaagcatttactagtagtagcattccatattaatctgttgacacagctactccaggtaacatgttgaatattctgcaatctcttcctgtcagccagtatatgagggctatttctttaaaagcacttggtatggagagatggtgtggtgtaatacaggcagcacagacattctgctctcggtagtatgtctagccagcagctctggcatttgacacaatggtaatatcctaagagcatttcactttagatttgtgaagtacttggtcaagacattmactgtttggaattgttcacaggaaagtttttagcagacaacatcgttgggtctgtcctggttttctccttgatattttggattcctttcagcattcttgtycattgtgtggtaagtcatcaacttttaagtaattaaatgttttatttaaattttgatcaaytccaaccatgtaatctctggaaaaggtaaaacttgttcttagcaaagtttggcctgatatttccaatagctttttttgttgttattcctaggggaacatgtcttgtagaaagcttaactaatggtcttttaaaaaaaatactatttttgtgtgttggtgttttaatatataartttcttaggaattttatacttttaagcataggagactgtttaactggatttgtccaggtcctttgatgagtaaagcccttattkaagagcattttcaggctgacttcgttgcaatagagcaaatatcaaayatcggcatttcagatgttccccatatatcatgtagattattggcagcagatggctatgtcttcagccttctgcacaaataggatgtagggactggggcccagctgtcatatagagtatttacatcttccccaaaaaataagagtaagcagtcttttctgttctcattcagaatcagtaacagctacaagttgaattgggctttgactaaggaactcctggtcctttataaatttgaggccctttttcataaatgttcttacgaatccattcacttgcatctgtggggaatggggatttgtctgctgtagagatgagaaagtcacacccaggcttccagacttgttttcccaaactctttcatagtggccttcctatgagcatttaaaaattccagcacaactctgatgacaaaggagtttttcctactgcctccttcctttcctttcctgctggcttctcctgcctaggggccatctcacagagcagctcttcctcagggtggtgagcatgatgggtataggaagatctctagggagcacttgtgctgaagaaagctgaaggtgacgtgcttgaagctttgacagatgtctctggatgacagtgccatccatcacgattgcttctattggaggatggaacctattttgtttacagggaagttgcacatgtggacaaggcacgacccttgatttcagagcaaagcctccgataggagggagggccatggcttgtttttggtcatagaatgcattgatggcacccagacaggaagcctagtcctggattcttggtccttgccctctgtcacctattatgcttcagccacaggcagggatggggcagcagatggccatgtggttagccttctgcagaagtaggatgtagggattgaggcccagttcctccagcagagcatggtccacagaaactgtggagacagctaagagagtgaggccatgggccggggcagtgcgaagaatgctgcaggcccagccacctgggtcttcctaccagttgcccttccagtcagtgcggtcctggtgtacccagcatctgggacatttgtcatttcatgcacaggaagatgcctttattattcccctgcccacagagggataaatttctcagaaaacatagcacttaaaccttgcctctttctgtacttaacgccaaaatgtatttcctttgagtgcaaaggaaacacttctagactggtggcataactaaagcttgggtgagaaatggattgtcatctgttgagcctgctatcactttctacaactcaggttctaagttcttcagttagtgttaggaatagcctgtgatgaartagtactcactaactgaattgtatttgtagggaatgaccttcttgctgtttctttctaggataagaaattggataaacagtatgaatctctgtctctgtttcaccccagtgtaagtataccatatgaaagaaacataatcttcgcctggtctgaggccctgttaggcaaagaccttcacctgacccagcaagagctttcactggctgatggaaggtcatgttgcagcaggaagggtctaggttggaatgtttacccttctgacaacagtgatggtgaacttcgattagttgcatggatggacatttaaagagctgtgctgtccccttcccaagccataaggagtgatttagccattcaacacttagttaatattttgagttcaatttctctcttgggatcttaccttgagaggtttgaatcctcttttgggtcttcaaatggtaagtaagttttcaggatgcttgaaagctagtaattactgtttttgccattaaaagtaatggcattaattacttttgcaccaacctagtattttttagtcacttaggttgagtgagcctcacctagcacttttttcttagcatcacagtgccaacagaataagaggctgtttgatgggtaagggtggagctgtgaggacctccgattcatcttttattcctatcaatcaattgaacccatgtctttgcagaacgtcgaaatgctgagcagcatggattctgcatcggttcgcattatcaaaccctttcctgcgccccagactccaggccgcctgcagcctgcccctgtgatcccttyggcgccagcagctccaaaactggaccaccagagaatggacaccatccaggaagaccccagcacagactcacatatggacgaggatgggtttgagaaggaccccttcccaaatagcagcacagctgccaagtcatttgaggatctcacggaccatccggtcaccagaagtgaaaaggctgcctcctttaaactgcagcgtcagaatcgtgttgacagcaaagaaacagagtgctaatttagttctcagctcttctgacttaagtgtgcaaaatatttttatagatttgacctacaaatcaatcacagcttrtattttgtgaagactgggaagtgacttagcagatgctggtcatgtgtttgaacttcctgcaggtaaacagttcttgtgtggtttggcccttctccttttgaaaaggtaaggtgaaggtgaatctagcttattttgaggctttcaggttttagtttttaaaatatcttttgacctgtggtgcaaaagcagaaaatacagctggattgggttatgartatttacgtttttgtaaattaatcttttatattgataacagcactgactagggaaatgatcagtttttttttatacactgtaatgaaccgctgaatatgaggcatttggcatttatttgtgatgacaactggaatagttttttttttttttttttttttttgccttcaactaaaaacaaaggagataaatctagtatacattgtctctaaattgtgggtctatttctagttattacccaaagtttttatgtagcagggaaaatatatatctaaatttaaaaatcrtttgggttaatatggctcttcataattctaaaactaatgctctctaaaaacctaaccacctaccttacagtgagggctatacatggtagccagttgaatttatggaatctaccaactgtttagggccctgatttgctgggcagtttttctgtattttataagtatcttcatgtatccctgttactgatagggatacatgctcttagaaaattcactattggctgggagtggtggctcatgcctgtaatcccagcacttggagaggctgaggttgcgccactacactccagcctgggtgacagagtgagactctgcctcaaaaaaaaaaaaaaaaaaaaaaaattcactatctacaaacctagamtatttaaaatacaaagattgcctgttttcaaacactattgaataagagggtgagatatttcttaacaacaacaacaacaaaaaaaacaggttgttttgaatgtgatgagccagccaggagatagaatactacctgcccttagggttgggggctgtccccacaagacttgatacttcagaaaccctttttattgacccacaagcagatatttgaattacttcttactttattgctccaggattcyggatgggctgcatttactgtgtgaaggataaaaatcattagcctggattctgatttctataaattgccattaaaagctttttttcccctaagaactgaaatgtgctcaccagccaaaacattttaacttgtaaattttgagggcagttaaccaaacctgtgactaatcatatctcctcctaccccccatttccaaggacatttgttactcagatacttgttatactaatacttgaacttgtaccttatggtatttgctatcttttaactagtcatgatattcttatactttagttacacttytggaatttgatacaaggttgagtggggtgtgtgggtgtatgtatgagtgaaacagttctcaaaagaatgtaagaaaaaccatttttataaaattgtgactttttaaaaacatagtctttgtcatttatagaattaacaagctgctcagggtatattttatagctgtagcactgatatctgcattaataaatactgtcgaaacacaatggacctaagtataaaacttccctgaaaaatcatctaatacttttattattaatatcagtggcaaaggtttaagcctgaggaaaaaagcktacctctacgtattgacaactttgagttctgtagataacaagcagatttgggtctcctgtgattggctaatggtctccatctcccagcagacttaattcaggttttgcttctgctacatcccgccagtaaggaagcagcaaaggtagagaagagacctttttctctatcaaaggccagagatgcgagaacaaaaattcattcccctttggagacaaatgtagtccatctgataaataagatgagaagtcctagaagggagagaaatcggttaaaggtgggtaactggccacgtgtggtagctcacccctgtcattccaacactttggggccgaggattactggaagacaggagtttgagaccctgtctctacaaaaaattttaaaaatacaaaaattagctgggtgtggtggcaaacacctgtattcccacctacttgggaggcgaagatgggaggatcacttaagcccaggagttggaggctacagtgaggtatcattgcaccactgagttccagcctgggtgatagactgtctccccccacagcrcgcgcgcgcrcrcracrcrcacacacacacrcacacacacacacacacacacacacaaaaaggccggggagggagggtataacttttctaaatgccagtgtgtaccattctctcatttgtggccctgcgacagaaatatcaccagcccctttcattgtaggcatctgaccagaggtgtcttggactacagtagcactgatgtgctatttacgtaggtgtttgaacacacagagaaccctgactagtgctatagtgctgtctccatattatagaattgagtttcatgaaagtcactcaccattaagtgagctgggacctcattccaggtcttctgaatcatatgacatgattctcaggttatttgaaagaaccttaacaggtaaatatggcctattaacgtaatcagcaaaaatgaaaaatttggtattaggagtgttcaggggccccatgagtcaatattgtttttgactctaggcaggtttttaggyagaaagaacttctaccatctaacctagaacagtaattgctgggacacaggagtccagtctccctcccattgccctgaactcaagagtacatatttaaaaagatacacatatttttggagacagggtcttgctttgctgcccaggctggagtgcagtgacatgatcatggctcactgcagcctcaacctcctgggctcaagcgatctttctaacctcagccccctragcagctgggactacaggcacgtgccaccatacctggctacctggctaatttttgtgctttttgtagagatgggtctctcattatgttgcccaggctggttttgaactcctaggctcaagcaatactcccaccttggcctcacaaagtattgggatcacaggcatgagcagccataccaggccctgaactataagaattttacccatacagccatttctttcttggggaagaatctcactagccaagagctctgttagaatctgggtggccaactagcttatgtgacttttttttttttttttgagctagagtctcactcttgttgcccaggctagagaacgatggcacagtctcggcctaattcaacctctgcctcccgggttcaggtgattctcctgcctcagcctcccaagtagctgggattacaggtgactgccaccacgcctggctaatttttgtatttttaagtagagatggggtttcaacatgttggccaggctggtctcgaactcctgacctcaggtgatccacctgcctcagcctcccgaaatgttgggatgataggcatgagccaccgcgcccggccttatgtgacttttaatagaccagaaatttagatgctatcatataatagtagcacttcttcttcggccttggttttctcatctaggcagtttgagatgagatgatctctaaggacgaccctctcagttttgtattaaattgaaaaagacatgtgagcaaaactagcccaatagtttgcagtttcctttcctagacaacagaactctagatgtcgacccttttggcactcaagctgccaaggcccctcctaatctggaattctggaaggttccagtactccagggtttcagaggaagactagaggcctagggtccagatctgcttaggctctcagggcctccaaaggtgactggtgactcggcatccacgtggtagtatgactttcccactggtgaccattttccctattacagatggataataaatgtgtaggtcattggaacgattggtatggattaatatttaggggagaggaaaaagttggcacttgggttagtttcttggctgttttctatgttgctttgtccaagtagcctaaacctaacagctaggaatagaggaaaccggtgaggctgtgagtcttcccgtttgtccaaagagcttcccgcacactggatccttccttcccttgagtacttcaaatatcatcagtcccgtccaagctttctctctggatcccagcatagcaatgaartagcctttaatgtgccctactgaacaagctctttacaaaagagtagcacaaggtcacagaaaaattaaaaaagaccagtgcctgtctgcccctcttcaccagtatctgtgtggaacctgaatttagccatacctttccttgccctaacctctggccaccatggacctgttctgttactgcagtcttgcctttttttggggggtgggctggggagggtgagacagtctccctgtatcctccagaccggagtgcagtggtgtgacctctgcctcccgggttcaagcgattctcacacctcagcctcctgggtagctgggattacaggcgcgctccaccatgcccagctaatttttgtatttttagtagagacagggtttcgccatgttggccaggctggtcttgaactcctgaactcaggtgatccacctgccttggcctcccaaagtgatgggattacaggtgtgagccaccacacccagcccaagtcttgcctttttgagacaccaaaacagatggactcatgtagtaagtagccttcagagaccagcttccttccctcagtgaagcgcctcgagagtcacccacgttgctgcgcttgtcagttcctcctctttattgccgagtagtatcccattccacggacacaccagtttccctattcatcacagaaggacactggcgtgtttccagcaggtaggaataatgctgctgtcaacagttacacccaggttctgtgtgaacatagttttcatttctctagggcagataacccaggagtggactgccaggtcctccctaagtgtatgtgtgactgcgtcagaaaccagctgtctcctgagtcagtgcaccattccatgggacctgctttttaccttttatatttgtgctttcaggctttaaaacaaagtaacttaattagaactacatatctcaaacagttttattagccaatactgtatttaaattcattgttttacctattaacaagttttagctttctgccattctctgtatgaaagaagaacttggcctggacgttcataaatatgagccatgtgttgctcattgatgtcactgcgcactaactcctagccaaggagcctggctgaattaagctgctgggcttgtgagccatcctggaacctccattcctcccctcccccaagcctgtttgttttcattggctawagggatgactgtcttagctaagcagggcctttctagggaaagctgctgcacacacacctggtttacttctgtgtgatcctatttaccccgagaggaccgagcaagccaccgtacctggctgtcctgcatcagggtccacaggtcaagtacrtcagtcccacagtcttgggccacttgtaaacacgcattggcatattcaccaacaacagagttcaggcgatttagtttgcaacctattgamgagaagaaatagaggtggcagttggtaaacccaagtgctggcccttgtgtaagttctgctccactcatctagacagtttcaaaatgccattaaatattgaccccacttgggccagccccggggtttagggtatatgttgatgagccttgcaggttactggtgtgctgctctacccagcagaggacaaggtgcagtgggaagaaggagccttcagtggtaaccggaatcttctgaggcgccagggaggatgttctagaggacaccttgaacagaggcagagaggcaggaaaggcccaggagggctgggctgcttggagagtgccggctgcaggagctgggctgggggctggtaagggctgcactagtaggaaatgccaggccatggaagctgaacgctgcgctgacaccgctggcttcttacatgtaacagctggaccgcaacacagcaaaatcatttgtcggctttagacaaagagaccttcgttttgatgcctacaattttcactaaatagcggtgtgcctgaacagcttaaccgtcctgaagctttctgcattcttatgatgacagtgcctacctagttgcaggaatattggcaggattaagagactaaacaccagcaaagcagctagcacagaacgattgagtgtatctaacacaagtgcaggctgcctcatcctcccagggagctgcaccagggaaggctggagtgcagtatctggggattgtgctaggttggtttggaaggtggggctggggctaggggagaaggctcaggaggctgcaaacaggacagtgagggctggcgagaggcggactacagaatggtattaaagagaaagcatgaggatatgggcaactggatgcgggccacaggaggacctatgctggcccaggctctacatcacagcgaagaaactattcaccagctttgattcatacttgggatcaattgtttataawattcacctagattataactagctaccccatccctacaaaaaaatttaaaaaattagctgagcatggttgcacatgcctgtggttccagctacttgggaggctgaggcaagaagatcacctgagcccagaggtggaggctgcagtgagctatgagtaatccactgccctacacagcctgggtgacacagcaagaccatctcaaaaaataacctgctgaatttctaggggaccagttattgagatgtgacccctcctctacctgctttgcccatcactgaccttttaaaaagtctgcattgggctacattcaaggctagaaaggggaaatgaaattaaacattcagaatttcatatatattattttcctgggaaacagtagacaaaaagaagtctaaacagcttctgtggaccatgctatgtaacatttttccccttttgttaaagccaagatgacactgccccccaaagcagttagggctgcaggcccagaagcaagctggggctctgaagttgtctccaggggagctttgtgggccttaaacacctccccttccctgcagaacactctggtgtctcatgcacagcaatagggcccctctgccctgatgtgatgcccagaacctactgtcaccacgtcccgcaggctggggtttctccccgtttgtctgtgcctccggtgtgtggcaccccttggcatatgctgtttgtgacttgagaacgcattggatccttctctaaggatgacaggccctttkagagcaagggacatagctacaaccccactcaacagtaaactcatacaacagtaaggacttgagctgtgaagtcacacttgctggatttgattcctggttgtgttgctggctgtgtgatcttgggccggttacttagcctctctaagactccatttctccactggtaaagtagggacaataacagccttccatgaagttgtggtatgtgtgctgtggtgtgtgtaagaaacatctggagtgctgaaaatgggtccagaaatctacctaaaaatcccagttaactcagagtcagaccacactttgagaaatagctgttctgtgttgcaaagccagtcatttgtcctagaatgttgagttctgggcagcttagaaaacttccagtccaggaacggtggctcacgcctgtaatcccagcactttgggaggctgagtcgggcagattacctgaggtcaggagttcgagaccagcctggccaacatggtgaaacccgtctctactaaaaatgcaaaaattagccgggcgtggtggtgcacacccataatcccagctactcaggaggctgaggcagaattgcttgagcccaggaggcaaaggttgcagtgagccgagatcgtgccactgcactccagcctggctgacagagccagactctatctccaaaaaaaaaaaaaaaagagaacttccataatgcacattttcaacattaacatacagctgacccttgaacaacacaggtttgaaccgtgaaggtccacttatgtgcagaggtttttcagtcaaaggtggattgaaaacacagcacttgagggatgtgaaacccaagtatatggagtgctggcgactcctatctgatcattcctacccccagcttctgtggaccagtaaaaagccccaggtgtggacttccaagtcaaggcacatcagcatcagcccccgcaggccgagcaccacagctctacacagatctcagtggccttcatgtgcaccctggagtctggtaactgtaaaggtcagcagatgccaggcccgcggttccctcctgactatccaaagccagaatcccttttctaggtcaaaaaaggtctcaggtataacataatggaagctataatttaataattttggattgaaaacagactgaaatggacatacygagcccctaagaaacagaagccccaggcaggaaaccactgtcctatcagagttcctccctcagcattcctatccagatttgccgagattggctgtggtttgtttaccttgtatgatgcactgttcttcccaggctgtttcacaaagtggggtcggcgtgatgagaatgactcgattctcagggatgtccacggacttcaggtactgcaccatgctctttaggttcgcagcgtactcctccaggggaatgtgctgcttgggattctcatctgctcaagagaaacatgagtcctcaccagatgcatatttattataagtgacaattcaggtgaacacacttctgcaaatgcctgttattcatgatgtcactggggggattgtttaacaccaaggacacaaagagaaggttttctccttatgaattaaaatgtatagttcttcataaaacaagacttcaaaggctctaactaggggcaccgtaagtactcttgtcttttcgtcactagtatccagatggttattacatcaattaggttgaatttgtaaagaaattaaagagcccaccctgttgggtgagacggcctaggttcaaatcctggctttgtcactcctcgccacagaaccgcagataaatacttagactttctgtacctcattgggaaaatgaagataataaggtctccctcctaggactgaaaatcaaaacagctaagagtttacagcactgagagcagtgtgccttcacaaagcaagcactcagtctaaacaaatggcacccacgaatactactattattgcaaaggagtattttctagataggctctcactgaagtattacaagggtcattgtttaccatttgctaaccacatgtaagtacagtataaaggaaaaaagtcaccaatgttcctaccacccagaaaaccactgttggcatttggatgtrtatctttccggtcttttcatgaagatacatacacttttaaaaaaatgagtttgcactgaagattatattcacactgaagacttcatattttgcttttctctacaaattgttttagagacaggttctcgctccatcacctaggctggagtgtagtgtgatcacagctcactgtaaccttgaactcctggggccaagcgaccctcccacacctcagcttcctaagtactgggactacaggcacgcaacaccacactaggcaaactttgttgttattgagacagagtctcactctgttgcccaggctggtctcaaactcctggcctggcctccagtgttgggattacaggcatgagccaccacgcctggctcacataacatattatgagcttttctgtgtccataaatagtttgcaaaaaaatgaaatttagttgtagggtgaccacatgatgtttccgtactgtacagcttgtaatctactgttatatataaatagcaatacacggccaggtgcggttgctcatgcctgaaatcctagcactttgggaggccgaggcaggtggatcacctgaggtcaggagttcaagaccagcctgaccaacatggggaaaccctgtctctactaaaaatacaaaaattagccaggcgtggtggcgagcgcctataatcccagctactcgggaggctgaagcaggagaatcatttgaacctgggaggtggaggttacagtgagccgagaccgtatcacttcattccagcctaggcaagagtgtgaaactgtcaaaaaaaaaaaaaaaaaaaaagcaatacacagaaatctccgcacacacatctggctgcgtatctgaatatttccttaggttgaatttctacacgtgggccgtcccttggcgcatattgccacacagctttccagaggatcacaagctattctctcaccaggaatgtaasagttccaatcttatttcatgcgtgtcagctgtaagtattactgcttcatattgcttttctgagtcaaaaaatcaaaataccttgttttaattggcattttttgataagttttcacacattttcaaatatgtatttgctgttaaatttcgccttttatctattcctgtcctttgcctacatyttctattggagttggtatttttcttattgatttctacactaaagacattactctcttgtctgccacattttgcagatattttccttaacacatcattttcttcttcagttttttcgcagcctattttatttcataaacctgtttttcctctgtggcttcctccactgctcttatacttaggaagtgttttttccttatgctaaatttgataaaaatttatctttttaaaaaattctgttttgagttttcttatggtttttggtacaagatagaaagtgaagattaatttcttcccaaatataatggttagtgtgcagtctccaccgatacctgtcatctacgtaatctttctcctagagagcaagaattcctcttactgcagttggtgttcyttcatgtccagcctcaactcagaggtctcctacggtgtgcccgtgaatagcagaccacagcacttctgtgacacaagtagggtaacaaaagaaatctctggaaggtgactacctaacttcccaaaacaaaggctgatttttctcgtcgatagcacgcagaaggcttttttcaagagtagaaggggaagaaaggcctcttacatggctagctttcctctagtcacagcagcaattcttcagcagtcarggagagaccatctccttttccaaacccacgttcaccattgcccaggattcaagcctaactgaggtcagggtggctgctgccctgacatatccctccctaagacacgccaccagctgccatcagtgtgatgcaagccacaaggtatccttaagctttctgctgccaaatgcatcaactaaagagaacacattacaaacttagcatagcactaacagactctagaaaatatttaactgtttgcaagattaggactgccagcaaccaaggtatgtagaaactgagtcaagaataaaatccaccagtgttaaagccaggaatacatataaacaacataagtttggcaaaactgtatctattgggagaaagtaaacagttgaaaaaagtatattaaatgcaagtttgctgtaacataaaaatgattaaaagtgagctagaagaacatcaaaaatgcttttaccttttagtgcactgtcattggccccaaagaaaattgtaactgctactgggatgtccaaactgtttcctttcctgattaatcttggaaggataattttggcccacctggtattgtaacctgaaaatccacgattcagaacatcacattttctgaaacgaaaaattttaaaaagatgaattgtgggcaagaagtgtttatggtcgcagtaaccggcctttagtgagggtgtgctctctgggattctaaacccgtcacgtgtctctgagccacccccaggtttcactttgataggagcaagaacatagctgaagcatgctaatcttaagccattcaaagatacaggtaaatacaccatactcctccgtgagagaagtaattatatataaaggggctgtgatgaagtctacagactacctgacttcaagcatggtatagtgaggtgcttttaaaatggagttcacaacagatagataatctgagcaagtatctcaggtaaaaagtcactaatatcctggaacttaaatagtttagtttggtttatatttaaayagtctatagaatatttgagatttctggttttgattaaatagttttagtaaatacattcgttgtgtttcaacttaaaccggttaatactttttgtttccttcttaaaaacagttggattcacagtactgtaggtgtaatgggggaaaaaaaaaaaaaagccgggttgcctggatttgtttctcggctccctgtgtgactaggcgtgaccctgggcacgctgtgctccttcctcacatgtaaagtgaggagaatcccagttaaggattcgcatcaggcagtaggtttgaaacccctcagagaataycagtcacataagagggactctttttttcttagtcttggtaaaatgatatgatttgggatttgcttcagaataatccataggagggatggatgggctcatttcactctttgcttctgtagatatttaaagttgtccataaagttttcttaaaatgacgcctggggttcaacttatgattagtaaatcaatatggttcattttgctgtattcacattcccatacatgcataaccaagcagagaagctggggcacccgcggagaactgcaggccacagcgtcaggcagcggctccaaagcagcacaaggggacactttctgacactgctcaaagttctcaggtggcatttataaactgcagaaccaccaccgaaactcagccttatttctaagagattgtttgtgtgtgtaatgattataaaatgcgactagccattttacagagtgaaatcacaatactttaatgaagtgctgggctgggtgtggtagcgagtgcctgttggtcccagctactcaggaggctgaggtgatgatgccttcagccccagaggtggaggctgcagtgagccctgatcacactgctgcactcaagcctgtgtgacagagttgtcaggcctctgagcccaagctaagccgtcataacctgttacctgcacgtatacatccaggtggcctggagcaactgaagaaccacaaaaggagtgaaacagccagttcctgccttaactgatgacattccaccattgtgatttgttcctgccccaccctaactaatcaatcgaccttgtggcattcctcccctggacaatgagtctcaggagctccccacagagcaccttgtgacccccttcccctgctaacaatagataaccacctttaactgtaattttccactacctacccaaatcctatagtactgccmtacccatctccctttgctcttttcagactcagcccacttgcacccaagtgaataaacagccttgttgctcacacaaagcctgtttggtggtctcttcacgtggacgcgcctaacaagagaccctgtcgcaaaacaaaaaccaccaaaaaccaaaacaaagtgcggtagaattgtgacaaggtgagtcttaagtcatggcagcacttcaaaaaaaggcaaagtagcttcctaccagtgtggtgtagcagtgaaactgcaagttctgcagtcatagcagctggacttggatctgtctgcccctgactagggaagaggccttggccatttccttgatttgtctgagtctacccagccatcagtgctcaaccctaaaatatctaattggtcagactgagtgaagagtaaatgttttctgttccttctcctatatactgattaggggaggcaagcaaaattaataaaggaggaatgttctgttcagaactatccttcatccataagacggatccctaagacattttccatccataagaactcaagtatcggaaaccattctcacctgaccascctgtcrgccagcgatgctccccatccaccctgctggaaggaaaactggaggaagaaaagcccattattactactaatgactgtaaccgggcatctcagygagggcagttctgattggcaacttcygttttctcggcgctcccttcttggctttgattgcttcactccaggaggtcattttggggattacaggtaagtacacctggcagcactttagcagagggggatttttctctatcaaaagctaaacagcctgtattcccagcactttgggaggccraggcgggcggatcacatgaggtctcgagttcgagaccagcctggtcaacatggcgaaaccccgtctctactaaaattacaaaaattagcccggtgtggtggcgcacgtctataatcccagctactcgggaggctgaggcaggagaaacgcttgaatccgggagrcggagcttgcagtgagccgagatcrcgctactgcactccagyctgggcgacagagcgagactccgtctcaaaaaaagaaaaaaagaaaaaaaaaaaaaagctaaacagaaatctaagttcaggaaataaagtcaaaggtcagtgaggaaatgaaggccacrccgcctcactgctttgctggttaccgagctgagggtgaacactttttcatacacattcccatggaattcggcagctctgactgccccatatgcctaaacataatgttaccagttactggcgtatacacaaaagcctggtgaagcaagtcctgtctgagaagaggacacacacaggaatggaatttctactccctccccgaagtaagaacctgcatttagaagaccgttcccttcatgggaggtgagatgatcttggatgaacggatggtccttttctacctaattcctgaaggcgttttacttccaaggtcaacccctaacggccccacctgtgcccgcagggaatggggcgagagagctcctggcgcctctgcccggagctgrccgcggggcctcctrggacacagcgcgcggtcgcccgcggccgctaacccggacccggaggggaaaggccgctgcccaggagggcgctgaggggaagaccgcgcatctcgacccgggtgggaggcggcgcggggcgggcagcgcggccgggtcccctcgcgtctgtgcctggagcccgggctctcgcggacgccgtcgtgacctccgggacgccgcgggcccggaaggcgcagccactgggggacccgccactcctccggtgtctccacgggcgtggccaggcctccggcccagccgtctcgggcgccgaagaggacggcgaggagcctcggcctgctcggcagcgaccccgcagggaggccggggcgggaggccgagcgtcggggcggccgtacctgggtgatggagtccccgaagagcaacaagcgaggccagagcagggcactcccgcagcccgcggcctcgcacagcgccatggagcagccgggcggggcggggcggggccgccagccacgagaggcgcctgcgcagtggccgcccgtgggttgcgggagccgggctcgtgggcacccacgcagtcactttggtgacgcgcgaaggtcgttgccccttggagtccgtttgcaagaagctcggcctccgcgcttgctcacccacagcaaggctgcccccagggagtccggagcccgcgtcccgctgcgtggttcccggaagaaaagcggttgggggcccttctaagcccaccccgcgctccgcgggcgcaggtgcgttcggcaaagggcaggagtgtgacctcaggacgcgcggcgggaagcacagctggctctcggtggggcggagggctgctccaggcccccctggaagaggtcgtgggatgcgcgcgcggcctcctgcgcccagcgtcactctggagggcctgtaacacccacgaggacgcaggcactgcggaaaccctggcagtacctcgtggttctgcgaatgacaagggaaagcagctgcaccttcagtgcgcgcgcagccggccgcttttctttttcccgccgtggggtggatgcgcagatgcagaaccccgcggacacggagcactgactaacttccaagggattcacctgttaaaacgtggttgtaatgcaacgttcttacctcaactgtgcaatgaagttcggcagccgagctaaaaacgaacgggtgggaaggatgccttgaaatcacggagctgtagatgagtaacagaagggccaggggcgccggcgcagaggccgaccccgctccctggggcggggcgatgggcgtagagcatgactttctttaggttgctcgtcccaagctcgcttggatcacctgggggagctttacaactaagatccaacctagggccctcattccagccggactaactcacctcctggtggcaggacttgggcacaggtgcacttgtgatgcaccccacgtgattcccacgggtagcccagattgagagcccctgctagagcaagcaaaggtgcctggacttcatctttatcacaaggacttcattaaggccttcaagcagcagaggcttgaggccaggtctgttccaggaatcagctataggggaggagatggaggtggttgcaggaattcagaggggagagtagacttggactcgaacagcagcagtggagatgaagacagaaaagattcaagtgcaacttagaatccttattattaactcaaattggttaccccagaggagagggtaaccagcagcggttgctatcggcagatcttgatggtttcaatgggagctgcacatacatgcctggaagaagaatccaaaattctaaaataatgggcagttgatctagtagttagttctagaataatggacaaattaattagcaatttagcagtattcaggctgttgaaataaaggccatttgacattaaaagtaaacaggctcccccagagaaacgaatgcattttattttaggtaacaaaagtagagtcaagtattttttcaaagttcatatacaggcacagtctcagtgaactggcgtcagggcctcgtacagtctctgtgcagccagctccaccatttctcggagggattcatcgtcttcacttccctcttcacattctacagtctgaaagtgaggcacaaacaagactgttagaattaagtctataatgattatatagaagataaatgaatactctttaaaaaaaccatcatctcataaaaaattagccagctgtggtggcgtgtgcctgtggtcccagataagagtctgaggtgggaggatcactgagccgggaaggttgaggctgcagtgagctgtgactgcaccactgcactccagcctgggcggcactgcgagaccgggtctcaaactaaaaaaaagaacaatcatctgtgtgtgcagaggtcatggtgggactgattaccatgaaacagaacggccgccctacacacttgtgggcgtgcagtgcttcctgacagcagcacggtcctaattagtgatgacttgaggctggggtgaaagactggggaaagtctagtaaactacatttacatcaaagcccacagtttgatctagtaaatgatactccagggaagttcatctatgccacacaaattacttggcaaggaatggatgtggctatctactcaacatttggtactgaatttgactgaaactcactaataatcttctagttgcttctttttttttttttttttgagacagaatctcgctctgtcgcccaggctggagtgcagtgatgtgatctcagctcactgcaacctctgtctcttgggttaaggtgattcctgggttctcctgccttagcctcccaagtagctgggattacaggcacaccaccacgcctgggtaatttttgtatttttagtagagatggggtttcatcatgttggccaggctggtctcaaactcttgacctcagatgatccacccaccttgacctcccaaagtgttgggattacaggcgtgaaccaccacgcctggcctctagttctttttttttttttttttggagacagagtctcgctctatcatccaggctggagtgcagtaatgtgatcttggctcactgcaacctctgcctccctgtttcaagcaattctcctgcctcagcctcctgagtagctgggactacaggcagctgccgccattcccggctaattttttttgtattttttagtagagatggggtttaactgtgttgcccgggctggttttgaactgtttggaaaatccacttggatcttgctggtgcaaacagaagagcggcttctttaaaaaatggagagtcaactagatgccaaactagagaagggatgaggtgaactaagctgtattatggaagaggacagcaatggagtggcatacacgcgaaccttgtactatgcagtaacccggaaaaacacggaaaacttcaaccataataatataaaaagaacaatgtgaaaaaaatgttggaaacactggaagcaaatgccaatatgcaacagtagactgttgagtgtgagagcacagattatttatgccttcactttatttcccaaatgtcttgaaacgtaggaaagagcagctacatacccgtgtctccaagttaaggttggcagttttcccgtccactgtgacgctaagaatagagtcatcctttacacttacacagtcttctccaaatatgtccctgaaaataagcagaaatgcaggattagtgaaaatgcccggctttatatatttgaggaaaaaataaaactgaagataggtcctagttctaaagcagaatactgtatttactttttttctttttttttttgagatggagtcttgctctgtggcccaggctggagcgcagtggcacaatcttggctcactacaacctccgcctcccggattcaagtgattctcctgcctcagcctccctagtagctgggattacaggtgtgcaccaccacagccagctaatttttgtatttttagtagagtcagggtttcaccatgttggccaggctggtcttgaactcctagcctcaagtgatccacctgccttggcctcccaaagtgttgggattacaggcaggagtcaccatgcccagcctgtatttacttttgagacaagcttcttatttgccttgatacagcttattaagtttataaaacagggaaaatacacagctttattcaagaatgatctattcagcaggcatcatgctaggtggtttatatacattatcttaacctataattttagtaaggatccccttttacatgtgaagaaaacaagacacagaagttaagtgatttgcttaaagcctcacagctagtaaacagctgagccggcattcaaatccaggtatctaggtttaaatggctcccaagcccactagctgtgcactcctactttaattaaacttggtatttattgagcatcttctgtgtggcagattccttctgtgctagtagctggggataaagaaggcactaagacattgcctctgtcatcgagagaaacagttttgatggttaatttcaacatcgtccccattggtacagaggtgttaggaaacagcagtccaccagcaggctgaatgcaggtaagaaaggcaggcagtgactctaaacaacccatggaccatggtcagcctaggacagttaagcactgacaacactgtattaagcgggggaagtggggagtgggaatcaactccttgcatcttcaggcagttactgctcatcatatgtgtgaataaacttaggtgggaccctagcacaaaggaaaagattatattttattttatttatttattttgagacggagtcttgcttgttgcccaggctggagtgcagtgtcccgatctcggcccactgcaacctctgcctcctggtttaagcaattctcctccctcagcctcctgagtagttgggattacaagcacccaccaccacacctggctcatttttgtatttttagtaggggtattttggatggggttttgccatgttggccaggctggtctcgaacccctaacctcaagtgatccacctgccttggcttcccaaagtgctgggattacaggtgtgggtcaccacacccagccaaaaaaattatattttaaacacagaaatgtattcaaaaggataggaaaaaaggttccattttcatgtgatccactgttggcttctctgaagaaaccaatacatctactcctatctaatcctaagtgtttaaacaactggggaaatagctgcatttttaagggtacgattggctttgaagtttaaggacatgggaacctcccattcctggccgaatggaagctgtctcatactcctgttcctcagagttgaatagttctggtgtgtttgtgggaggtgagggagagggaggggaggcgggaggagtggtgtcaggaggacagggaagaaggccagagtgaaagtccagtggaagggccgcagcctcccgcagactgccctccccacggctcctgaggaccagccacagcaatgtgaacttccattctgcaccccgactgcagcacgtgggagagcggggccagtccagggccacacgggttttctattcttgtagagccccagggaacagggccgccaacagaactattgtagtcaagtccctggtcagcaacacccaccttctacaatagggctgtttaaccgggggtcccaggatagcctgtggggagggggttgtctaacctccttgaaatcaaaggtaaaactgcatatatgtgtgtcccctgcccccgccccacagccttacctgactgccaaaggggtgaaggatctaaaaatgattaagatactcagacttcaacgctggcagacttgagccctctgcaaaatgagttaagagaaccagaggctccaggggtgggaaccagtaaaatctctggccttttcaacggccatggtaatcactgtgcctgcactgttggctggttttgtatgaggaatgctctttaaaatcaaaatgacaacacagagaatactgttttgaagatgtatgacaacttctataaacaaagtcatcatttaaagtctatcatttttttttaaagccactaaactgctgctttagtgggccgggcacgggggttcacacctctaatcccagcactttgggagaccaaggcaggtggctcatgaggtcaggagttcgtgaccagcctggccaatatggtgaaaccctgtccctactaaaaatacaaaaattagctgggtgtggtgggcatgcgcctatagtcccacttgctcgggaggttgaggcaggagaatcgcttgaacccgagaggtggaggttgcagtgagctgagattgtgccactgcactccagcctgggcgacagagtgagactccgtctcaaaaaaaaaaaaaaaaaaaaaaaaaggtcagtgtagaattttggggaaagaaaggaaggaacagaaatgttagcataaaagccttctaaactagcaggccacctta

SEQ ID NO: 96384 - DNA, 29540 bp, Homo sapiens
tattttaaggcattagggaacaaattcttaagactcagtcattaaagttacttatttttatggcgttactaccaaattaacaaaacagatgactaaaaggatgactatgtctgacctatacatgttcttttcagattgggaggagttgagaagaaagaggaatcaaaggaatctgagacacagaactgactttctaatgagtaccttagaaactatctcctctaacccctctacctttcaggcttagagaagcaaagtgacttggccaaggccggcagccccagtgggacctggggatccaagcttctaggccaaggcttgatccccacatgctggaggcggctagagctctcagtgtgttcagagtgcttgggcccttgggatcttccactgggggtggggcagttaggctggctcaacccttcaggagtggaagagggactttgaagaggtaacagttcaacagatctagctgacaattttacagtcatagaatatatcttcttaatcaactaaattactaagtagaagtgtgtattagtttttctcattaacactatacagcatagattacatgtactataacatttttctgggagctaaaaagataactagtctatgagaaaagactaacacccaatacagacagagccatactattaaactgagtacaaaaatagtaattaccattatttttcttcctttgaactcgagaataatacatgatcttcctacttcttgcccagctccactgtaaatattcaaggggagaaaaagaaggattaaaaaaaatcaaaaccaagtccaataaacttacacttttttacaatgtacactacatgccatctgatgacagcacctcactgaaaaattctgagacgtaagagagttctacaaaatcacaaagacagggaagaacagtgtccacatgagaacagatgaaaactgatccttgggagtccagggatcttgcagttcttaaaattaagagagaaggcggtacagatccaagaagcccaaaggtttgggcttgatttaaattcaattttctgaattttaggattaaattataatgtatttaaaatgtaaactagcagttacgcagattatataataatacttctagaattagcacttaagtagaaagccataagcatttcaacactgtcatcttctttaagatcataatgtgtatttgctaaatggcttaaatttaaatggccgggtgcggtggctcacgcctgtaatcccagcactttgggaggccgaggcaggcagatcacgagatcaggatatcgagacccatcctggctaacacggtgaaaccccgtctctactaaaaatacaaaaaattagccaggcgtggtggcggacacctgtagtcccagctactcgggaggctgaggcaggagaatggtgtgaacccaggaggcggagcttgcagtgagctgagatcgcgccactgcgctccagcctgggcaacagagcgagactctgcctcaaaaaaaaaaaaaaaaaatttttttttttaaaatacttattcatactgtgaatttcaatcactttttcttctactttctgttatttcagcatattttataccaactacttacataatttttgtttcttcttaataatttcagccataatttgcaatggtcacaaggcacactttaagttaaacctcatctttcaaatccctcaccttctttgatgccttttcccaaccattctagctcacaatccactcactcactcaacattaagcagcttctatttgccaagcactggattaagtgcctaggacatggaaatgccttacagggaccctgacctcaaggaactcagtcagatggacatgcaatggatctatccccaaactgagatcctacctccaaacaggtgttgatacagaagatcaaacaactgtggatgagagccgccataaattcctggccttccactttttaaacattttttatttgtaattattgtggataccctggccttccactttaactggccctcaatgttgcctggctgttttctccatttcatttccatatcaactattttcaaactttcttccctttcccaaattttccaaccttctatcctcttcttcacttgaggcatgggccatcttctgcatcaaaaaaataaacagtccatttgtaaatttcctcaacttcatgttggtacaataattaagaatacatgtaccaacagggtaccaacctgcccacatctgtctccttctatttctcctctatagatagaatagacctctctttccacaatgaaactttccaccattctactctacgtactccctccctccttctgaggaactcaacactgctgtgtcattgacattttcctcactgtctgctctttaccatccaatccaaatttaaacatactacagccatgttcatccccaaattaaaatcccttgactctaagctcctttagttcccactttattctttccccagaccacctcccagggcagtggaccctcttgtacttcctcaccttctactcgctcctcaattcgctatactctggcttttaccaatcacttttctgaaactgtccttgctgctcagtagtcatttcagtcttttttttttttttgagacaaggtccccctatgttgcccagtctggccttcaactcctgggctcaagtgatcctcccgcctcagcctcccaagtagctggaactataggtgtcagtccctatcttgttctcttggcagccgttgtcactcctaaggagtacctgctccttcctcaagcacctctcccttggcttctctgacctgatgctctcatcttgtcttgctggctttcctgtttccttcacatattcagccacctctgcctaccctttaaatgttgatattccgagggtttgctccttggccaacttctcaatcttcattctcatctttctgacatgctaaggacttccaagcctgtatttgtaacccagattgttcttctgaattctagacctttaatacatacacgtgacactaggtatctctactaggatctctcccgggacttcatattcaagatgccaaactagtttccaccacatgccccgtacttgctctactttcttcctgaaatgctttgtcttcagatattgatgtggttggctcctttgtatcatttgggtctcagttccaacgtcaccttctcagatgctttcccttgactacctcctctaatttgcccttcacagcaagccacaacccagcatcagttatcttaatacaactacatgaagttattgtacctacttatgtcttctttcaggctactaaatgaaagcttcctaagaacagaggcattgtccatcttattcactgctgtattgctacagtacctggcatgtagcacatcacaaaaaatacttattgaatgaacaaaactcctcaattttgaaccttggaaagattatgctaaatgaaagatgccagagacaaaagagtatgtattgtatgatcacacttacatgaaatgtccagaacaggcaaatctataaagaagtagattagtggttgcttagggctggagaggtagtggggattgtctatgactgctaatgaatacaaggtatctcttgggagtgatgaaaatgtgctggaattagagagaggtgatggttgtataactctatgttaagaacgactgaattatactctttaaatgagttgtatggtatgtaaattgtgagttgtatggtatgtaaactgtatctcaataaagctgttacgaaacaaccaaattcccaaatttactccagagttgccccatctcttatactccttgagtgaataacactaccctttcccaactgccaaacttaggaatctgatcataacatcctctctgccctgccttccctccccacaaccacccttccagatacagctgatcagccacaaaatcctgaagatctcatttgcatactctctcacactcacatcactcactacaggctctcgtcagctagacttagaatctttcaatatctcactgaatctgctctactcaatccatgcttttattcatccatgcttttattcatctgctacactgctgccaggagagattttcctaaaacataattcccacaatatccatgcttgcttaatagccttcgctggctccctgtaattgacttgataaaggtccaaactcctgtgtatacgaggtgcttcctaaactggacctcaactgcctgtcgcttcatctgctaactcaactctttagctacagccatgaggaatctggccacaagctgtgaccactctcactttcatatgtgccacttccactgcctagaacatcctgggccccccagtctttaactcctactcattctttaggactcagctcaggcatcacatttttcaggatccacgaggtatccttttttcctcaatctgtcagaaatcccttttccatactttcacagtgctcagtgcaatgcctgcctgcgttcttagattagctattatttacaaagcacctaccgcgatgttcactcttcaagttttatcttatttccatatgagaaaacgggttcagtgagattgttgtcctactaattggtcaagtagataatggacttcaggtctgacttcaaagtaatagtctcctattattccaaagtatctctccaatatttcccactgtgcactgtaattctctccaaaagagcgagagcaattaactgggccctctgttgcgtctatatccccatgtgtggtgcttgacacttgctcagtgtttgctcatcacaggaagacatgacaggtgtgaactaagcagaaggaaacggactatgtcccaagcaggtgctcaatgaagccttactgaatgattgtgtaaaggagatactttctaccttttggaaagcgtatattcatgttgtgccaactagtatctaacaataaacatgttgtgggttcgaaatgctcatctgtaggaattcaagttctctacatttgcatctccccttcagcagcattcccgactgatgaggatcgtgtccactgaaaggccactctccttatggacagtcgagggctgagtttttgtccctaacacctctgcactttctcttctccagctttacaccttccttattctactagggcctgagctgagaagatcgaaactcacggcaagtccctaatattttctaacttctggcacatgtgaagccctggtgttaagaaacagacttaattcttccctgcacggctgtagcctcattcaggtcctcctctcatcctgtcggtcataagcttcaccggctccctcacagcttgccctgacgcgcagagatccgtgcttgtgctaagtgaaaacgcttcttagcgtgtacgaaagcgagcggtggccccgtaaaacttttttttttccgactccaacataccctcccctgaaactgatgaaaaagcaaaatcccgttcactctatagcaggccccttccgatcaacggtcctccaacccctcgagcctgagaagcctggcccgcaagcgcggaccaaaggcaggctgccggggtaggtgggagcgcgggcgacggaggaggccagtctccggttacccctcgcgcccctcacagcccgtggcttcattccctctctcgctggtcccttacaggggtcggatcagcagctggtcgctctcctcagcaggaatcgcagacatcccgaaagtgtgagggcgaagcgggggtgaggaacaggtcgccggggtcttcctaaattggaagcacagccaccggtaaataaaaaaggaagaaccccattcaccaagagcacaacttccgtcactccggagcccgcggcactagactcctcccctcgacttccggtcgggggacgccgctcgcgaggcttcccaccacttggggtcttggaaccgggggtaggacgtcaggactgcgcctgcgcatagtcttggaggcgcggcccggcggacgtgggcaggagggctggaaaagccggcgctggagcgggaacgggagtagctgcctgggcgccaaaggccgcggcactcccacgcggaccccgaagtccgcaacccggggatgggcccgcggctgcgaggtgagcgcccagccctcgtcccgcttggggccgagctcgcggaggcctgacgggaacacggtcccgagagcggcgcggacggccaggaaggatgggtggggccgcggggcgggcggaggagggatgcctgggctcgggcttggttccgggcggggccgcgctcccggggcgcgggtggaggagcttggaaccgcagatcgggcgtgggcttgcggactgcagcttcccgagccgctgtcgccccggaggggcggcaaggcgggcggccgcgggccgtttccttgcctcttcctctgccccgcttcggccgcctcccgcctctcagggtcggggttgtctgtccccttcgctgtcacatcctccgcacccagcgcttggaaggtgctccatcacggtgacagacaggtgccaagcaggctggcgtctgggaggaacttcggagccggctctycctaggccccgagcttggccgcatccgtccttactctggtgaccctgggcaggtcactgactcttcgggcgctttggcatcctcgtttgaaaggggctgttatcctgcagccttgctggtcggtgagggtgagggtgagagggatctgtgcacctagcaccgtgcatggcacgtggtaggcgtttggtacatgggaatcgctgttggggtgtcacctccccagaaagttctcggcttcagtaagcgcgtcccctgccaggcgccctggcaatgcagaggagtcaccgagctccgcctttgaccagcgtgcagctgggagagtgagatcagagaccacagcagatcgtggcgctgtgatcagggggtacactcaagctgtgggtcccttaccccagccttgagatcccaggaaggcctgcagcctgaaacgggccttgaaaggtaagaagtagccaagtgcctgacaggtgaaggacgtcccgggcggtgcaaagcaggggcgcgtggagcatcgcgctgagaaccaggagcagctttgccttgctgagatcaatgaactgtgcccgggttgtggaggatggaagtggaaaggtgattaggagctgggtcctggaggacctggcgtgtcgtgctgaagaacgttgactttggtctctgactttggagaaccagtgaaagattttcagcaggctagtggcattagattcatgtttgaaagaaatcattttaatcgttttggctgcagtgtgggggtagatttaaagtgttagggaatccagtaggacaaggtcccttatccacgaaatatccttgggtttgtgaattccttaaattcatgccaaactttgtatggatgtgcatttttatagggtgaggatccatcacattcatcagtttctaaaaaaatagtgtctgtgcccatggtttaggatgacgggggccctggtggagagctggctcagagagctcttcaggtggggtatacagtgggtcttggtgccagattggatgtggggcctgaaggacagcaaggaaatcatgattttctggcttcctccagcaataatagaatctcctgacagggagaggagaggagaggagcagatctggaggggaggatgatgggttcagcttgagacatctttgcatttgatgagcctgcggagcatccaatcgccaatcaggatcattggcctcattttgatgcatgaataattttttttttttttttttgagacggagtctcgctctttcgtccaggctggagtgcagtggcgcgatctcggctcactgcaagctccgcctcccgggttcacgccattctcctgcctcaggctcctgagtagctgggactacaggcgcccaccaccacgcacagccaattttttgtatttttagtagagacggggtttcaccatgttagccaggatggtctcgatctcctgacctcgtgatccgcccgacttggcctcccaaagtgctgggattacaggcgtgagccacccatgaataattttgaggcaagaatgatttgcttgagaacatgcatcaaaattgcagcagatatcaaagactttaataaatgctgctttttcctaagccgctgggttgatgatgaaaagaaagccttaaggagttgctaaggcattgtcgtgtcatgattttcatatcaagggatttgaggagacacttcaggattccactgacagtagaatcacattttgtttttaaaataagttttgatttaaaattcaaatcatatttaaaattgttacctatatataaatatgtatttatatatacttaagtatctgatgtttaaatatgttacacatcaacattttaacccgtgagcgccattaacatggcactttatgctgctacgttaacctagtttcgtgcaggccttggaataaggctctcctgccatctctcactgacaagtgtcctgtgctggtaaggttcccctttgcagcaatcacccgcagtcttcttccaacacatctctcactttttacccttatccagtggagttagttcgctatctggcagccagggtcatcgtttaaaaaacagaagacacctgattgtgtcgctaaactgctttttaaaagcctccmttccagaagatcacagcagataagcaaaaaataaataaaaagccttcagagtattcctcttaaactaaagtccactgttaccgcggcctgcctggccttctgtggcactttgggcccattgctgtcctcctgctcccggacagccttgactgttccctcgggcccctctccacccgcacggcattgcctccaggctatttatggctgcccgcacttctttcagaaaaagagctacagcatctttttctgaaatacccaccccttccttccattagtctgtgtctcctcaacttgtgttagttttcctcatagcagtggtttcctaataatatgtttcatgtgtgtttttcttgttggtctgtctactctcgctaagaacaggctccctgaggtcaggggctctgtttggttcactgatgcatccccgacacctggtaggtgctcactgactatccaggaatgaatgaataaatcagattttcctggtaccccacaaataaagcaaaaatatagaartaaattggatgatgaggctgattaaaaagcttgggctcagkggtcagacttgggcaagtggcctaaygtcgtcccctagtaagtggacttagagtggggtctccaaatacggagaatctttgggttgcagcaggagctttcactgactgctgcgtgagttgctcgttctttttccttcatcaggtgcgtagtttctctgaaaagcatcacccaggtcagaatgaaaggaaactctctgtgcagaccgctgtatgtgggacctttgaagacagtcaaatagtgttcaattctatagtaagcagattttcttgttctctctggagaatacagtttttggtaaaaaattgatcaggttatcttattcataaatcgtcttgagaggcaggtcacagttccctcatctgtaaaaggcagattacagcccaccttctgtgagccccttgagggagagcttagagccctgcagagtgtgtggcatatggtatgcccttaaaaagcatcagtagagcaaatggatatgtcacaaggttatcatgaggctatgacagtagaactgtcccgggagttctgtgagctgtgcagcttcatgtaggttagttaatttgccaagtatagtatatgctgtccttatgcaactggcaaggatgaatcttagtttccaakgcatttattattattaatttcaaaaaaagaaatatgtaacacagactctgggaggcaaggtcatctccttaactacgcttaatagagaggggaggtgaggtgctggcacctgggaatgtctttgtgtcagcttttacttaaaggtatttcaaaacttcargaaaaatgcacatttctgagaggtgtgtatatcttagccctaccaagtatagaatgtgaaactgagagggttactgaatcttagtatctcgactgaaaagccaatgtgtcatagtatattttgctaaaatcttgactcaattgaagagaagtaaggcccttaaaattttgagaactaggtgacgtgtctgaaaattttgagaaaagtgcttttcacacctgtaggacaagaaggtttctgccttttttgcttattgggttaactttctataatttaataggaaagaatgaaaaggaatagtatccaagggaaaagttaattgatgatttttatttctattttgcataaagtgatttaatgttgcatttcctgatgtaactgtaaccaatatcaaagttgcttttcctggctgggcatggtggctcacagctgtaatcccagcactttgggaggccaaggcgggaggatcgcctgagagcaggagtttgagaccagcctggccaacatggcaagatcctgtctctacaaaaaatgaaattagctgggtgtagtggcacatgcctgtagtcccagctactcggggaggctgaggtgtgaggtcaagactgcagagccatgtttgtgccactgcactccagcctgggtaagagcaagactctgtctcttaaaaaaaaaaaaaaaaaagttgcttttcccgatgtaactgttaccaatatttgttttttcaggggatcttctctggatcaagcaatggtggtgaaaaatgtttcgcaagggyaaaaaacgacacagtagtagcagttcccaaagtagcgaaatcagtactaagagcaaggtagggaaatggaatttggaacagaatcataaagcagggagagttttgtttcttctagctgatattgtatggaggatactgaccgtgggcagatctcctgatartcttcaaactagtgtgttttaacatttactttttgcactagagatgcattctatgcttggcttcattttgtctgttctggtaggttttctgaaattcttaaatccattaaactagatgggacatgacctatgaatggtttcgttgaaataagcactgatttaaaaaatttttaaatgatagaaattgcaggcattaaggggctgggcctcttgaattctagggtttgtggtgtgcataattacttttacttaagagtgagattggcagatagctgtataccagagagtttttgaatgctgttggaaggtaagcgtggatttaattcatgcaaaacaaaccgttgaggagctattcaactggcaacttttgtctcaagtaataaagtgatttcattttgactgacagataatttttcaatataagagtataaagatagctgcattatatttgttctaggtttttgacaccaattttgttggtgtttagaagaatggcaattttatttctacctcctggacaatggcacgtgaacactcattcattcaccgagtatttgttgagcatggctgtgtgccaaactctgtttaaggggcataaaatagagcagttagggagagggaagaaattcctggcctcagagcttccatttcagttgggggagaaaataatgaataaataagtaaaatatagagtttcagatggtggaaactaacacggggggaagaaactacaggaatggagggggtgggagattgggagaggggcagtattcaacagtctggtagaaaaggtcttattttcaggccgggcacggtggctcatgcctgtaatcccagcactttgggaggccaaggcaggcagatcacctgaggtcaggagtttgagaccaacctggccaacatggtgaaaccccatctctgctaaaaatacaaaaattagcctggtgtggtggcacacacctgtagtcccagctacttgggaggctgagacaggagagttgcttgaaccaggagtcgaaggttgcagtgagctgagatcacaccactggactccagcctgggtgacagagcaagattccgtctcaaaaaaaaaagaaaagaaaaggtcttatttatttttttctgcccctcctcccgagaaaaggccttgttttcttggtggcatttgagcaggggcctacaggagaagtggggccatgataagatctggaaggatcgcagtttagggagaggagagagcaaaggcccatgggaggagygagcctgtgtgtttgggggacagcagggagaccagcgtggcctgggcgaggcaggtgcaggtgttgtgaagacctgggcttttactctgagagtaaagcagggggcgcctggggccagggagtgacagaatattatataagttttgttgggggtcactttggccactgtgagcagggaaagggcaggagcagagagactgccggggaggatgtggtaagaacctgagagatgatgggggcttggacggggtgtgaaggaagcgctgaaacctcaggttctgcagagagtttgaggtggcactcatgggacccatggatcgatgatgatggcttgtggagtatgaggaaaagagagttatcgaagcttaaacccttaacataccaggtgctgtgggaggcagaaaaagtgattcattccaggtgtttctacctggatgccagataccatttgagacatgattgacacccagagacagtgaataattcagaaaacatgaaggtgcgtgaggtaatgacagatactgcttgagggattcagagactggggaggttgtaggcctaaagttgtggaggaagtcgtattagttggagttctccagagaaccagtaggatgtgtttatatcctagagattytgatgtattttcaaggtttattttgaagaattggctgatgtgactgtgggggctgcaagtctgcaatctgcagggcgggctgaagacccctgggagtgggagtgggagtggcagcttgagcccaaaggcagcctggaggcagctggaggcagactcttctccttgggagcctgagtcattttcctttaaggccttcacctgcttggatgaggcccgcccacacggtggagggtcctctgctgtactccatgtctgctggtgtagacgttaatctcatttaaagaaacaccttcacggcaatgtctagacttgtatttgaccaagtatctgggtacttagcccagagaagttgatatataaaattaaccatcacagaagtcttcccaaaaaaaagcaggtagtgaatgagaccttaaaatatacgggtcaaataggcataaatgaggaagggggttagacatcccaggcacaggcaggaagctggaggctgagtcgggtcaatgagtgagtgagtgggatgggatgggatgccgtgactcaacagccttttcatgattttccacccttgcgaatgctctaattttaaagttgtgtgttcactcagtcccaggaccggggtgaggcacagcacagaaggaggcgtctcgcagggtcgcacaaggccccctcaggagatgcctccctagacctttcatcccgggtgcctgccgggcctcccatgtgccacatgtgccacgctgttaaataacagccacatgtgaatgagacaaagacacacgactgccactcagtttccagtcagggcagggtaagctggcttatctcagctgagctggtggccttgtaaccagaagcacagaaagctgacattgtaggagtcctgtgcagccttagaatggggaaacgaaccatgttcttggaagtttttgaactcctggagctgctcaacacagaacctccctactgccacttcctcagccttaagcgtggggaccctacagggaaatctcatctgtgtggcccaatgtcttgttttatttttatttttggagacggagcctcactctgtcgcccaggctggagtgcagtggtgtgatctcggcttactgcaacctctgcctgtgggttcaagcgattctcctgcctcagcctgccaaatagctgggactacaggcatgtgccaccaagcctggctaatttttgtattgttgtgtttttttttgtgtgtgtgtttttgtttgtttgttttgagatggagtttcactcttgttgcccaggctggagtgcagtggcgtgatcttggctcactgcaacctccacctcctgggttcaagctattctcctgcctcagcctcccgagtagctaggattataagtgcccgccaccatgcccagctaatttttgtatttttggtagagacggggttttaccatgttggccaggctggtctcgaactcctgacctcaggtgatccacycacgtcagcctcccaaagtgctgggattacaggcgtgagccaccacacccagccatatttttttttttaagtagagacggggtttcaccatgttggccaggctggtttcgaactcctgtcctcaggtgatccacccgcctcagcctcccaaagtactgagattacaggtgtcagccactgtgcccggccagagactattatttctaaagaaattgggagtgtagctctgaggaacaactccctttacatgtgattctattttgctcaacagttttgttgtttttttggtggcagttcacatgatagtctgctctgtcctgccagttagcctctgaattcctgctgcaggccagacactagtcagaataattgcagaagcactggaccagagacctagaattagagacctaggtttgagattggagccatttactagatgtgaccttggataagtcactaaagtctcagtctccttcctcatttagtaagcggggatcatggtccttgcctggctttctgcacagggtttgttttgggttcagtggaactcatgtgaaagcaaggcagagatgttcgcaagaatattcatagaaggcatcttgtaaggaggtggcggtaatggcttcgatttaaatcgactaagaatattgccaccgcatttatccgatattatgtcatgggacgaacgaacagttgggattatgtggttttttttttgaagtttgttacagaatttgtcttaagaaaaatctgcacagtcgatatgcctgaataattgacatggttttgtatgtgtcagctcaactctaataaatgatgtgaatgggttagaggactttagagaagacagggctgcttcagtggaggttttttacttgtttttctgtttctcagtctgtggattctagccttgggggtctttcacgatccagcactgtggccagcctcgacacagattccaccaaaagctcaggtacataaaagggttggatcattgattgtctgcgcttttcattgatgttcatgtggttttactggggtagcacaatgagttcttcagtatttgtggctttcttcctctcctttgccacttttgacaagagtttagaagtggaccaagatttggcgggacgtgggctgagggtgtggtgtgattgggggaaaccacatagcctttggagattggcacaggcacatgggcaaaatggaagtttcaaaatagttttttaagaaatggggtggcaataaatacatacacctactatgtacccacaaaaattaaaaataaaatggaaagaaatggggtggcagaagatgaattccattggacttatgttgtctatggggaatagggcaaatatcttggtgattaaagggctaaggagcctttcatttactccaaggaacccagagattcaccagctcatgaccaccaccaacacaagtaattaaggggaggatctgtcccagacccttgtagatatttatgcagctgcccgaaattagtagatcttagaaacaggctgggtgcgttggctcacgactgtaatcccagcacttcgggggtccaaggcaggtggatcacctgaggtcaggagtttgagactagcctggccaacatggtgaaaccccatctctactaaaaatacaaaaaattagccgggcgtggtggcgcatgcttgtaatcccagctacttgggaggctgaggcaggagaattgcttgaaaccagaggcagaggttgcagtgagctgagaatygcaccactgcactccaacctgggtgacagaataagactccatctcaaaaaaaagaaaaaaaaagaaatcaagaggtggtttctaaccttagctccctaagtagctggcggctaactggaaatatattcattttcttgtctaaattcctctttctcccttcaggaacctgtcctagtgaatctgtaacagaaaatgttggagcattaggtccattgtctttcctgccagatgcctttaaaattatkaaagttgtggacatctttttgttacataacctaaaagtaatcatatagtatttccttaatatggttgaggttataagtcgtttgtaggagtttttgtgttggctggatgttgyggcacacacagctcttcaaccgttgctgttacgttaagagaatttctgcctggcattattccatcgacattaaaaagacaaactatgtggtctttctgatggaacgatagaggaagagtaggcttcctgaatgaggaaagcaagctaacatggtaggccaggcacagtggctcatgcctgtaattccagcactttgggaggccaagatggtaggatcgcttgagcccaggagttcaagaccagcctgggcaacgtagtgagaccctctctctaaggggaaaaaaaatggtgaagagggagaaagaaccaaaagtaaataccatgcgtcataaaggtaatcattatgtagtaaccttttctttactgtttgttttgaagggaaggttaatatatttattcctattattgagacctttgtatactatatttagtataccatgagtcactgaggaaaaggttagtgaaattttaagttcttccccattacataaaaatattgtgtattataaaatttgtaattagtggttatgttctaatgacagtctggtttttatttgggaagggactgaggatactctgtaatgcagatatttcttcttaagtcttaccacttttctttcatcttcaggacaaagcaacaataattcagatacctgtgcagaatttcgaataaaatatgttggtgccattgagaaactgaaactctccgagggaaaaggccttgaagggccattagacctgataaattatatagacgttgcccaggtaaaaaaaaaaaattccrtaactctctggttatgagagtctggggagccaactcatggctttggggcaaaatgctcactcctcgggtccactgggtgccgctccgcttgctctcgactgaagtccccgcatcaccaccgcacatgtgcgtgagcgctgagctgcatgggaacacaggcgctgttcctcccttcaaacacggtactttttttttttttttttttttgagaccaagtttcgcttttgttgcccaggctggagtacagtggtgcaatctcggctcactgtaatctccgcctcccggcttcaagcaattctcctgcctcagcctctcaagtagctgggattacaggcgcccgccaccatgcccggctaattttgtattttcagtagagacagggtttttccatgttggtcaggctggtcttgaactcccgacctcaggtgatcttcccgccttggcctcccaaagtgctggtattataggcgtgagccactgtggccggcccacagtactttttaatacttgtttttctttttttttttgagatggagtctcggtctgtcgcccaggctggagtgcagtggtgcaatctcggctctctgcaacctctgccttccgggtttaagcgattctcctgcctcagcttcctgagtagctgggactacaggcgcatgctgccayggcccrgataattttttgtattttagtagagatggggtttcactgtgttgcccaggctagttgtgaattcctgacctcacctgatccacctgcctcggcctcccaaagcgctgggattacaggcctgagcccttgtgcccggcctattaatacttttttatggggctgatcaatcctatttaaatgaggagctggttgcrgtgactggttatattccatagattcttcttttaaaataatctggcaaaaccttaccgtaccaccatcagaccagttctgtctctcaataatctaattcataatgatgtccacctaacatatctgtttattcatgcaaggtttccaacaagaattgagatgaggtgggtttcaaaaagataaaatcaagaagataaaaaatcatcatcatgaaggaaaattaagaatgaaaattaaatcaaaagtataagatatataaacgtgaaatgttataaaatctgtacccttgccaatggtggaagtacatgagccaaaagagtgaattcggtaatgagagaaaaaaaaagaaagtaaattgcttctggagtttctagaaaatgaaattacatttttatgtgcgcattaaaagagggatattaactgcaataccaagattccttaacttcagagagtgttaagaatgtgtactctcttaaatcacagagaatgagaatatgaaatacagcgtggcagggcatggtggctcacgtctgtaatcccagcattttgggggaggcagagtagggggatcacctgaacccaggagttcaaagccagcctgggcaacacagtgaaacctcatttctacaaaaaaracaattttaattgctgagtacagtggctcatgcctgtaatcccagcactttgggaggccaaggggggcagatcacttgaggccaagagttcaagaccagcctggccaatatggcaaaaccctgtctctactaaaaatacaaaaattagctgggtgtggyggtgcatgcctataatcccagctactcgggaggctgaggttgaactgcttgcttgaactcaggaggcagaggctgcagtgagccaagattgtgccactgcactccagccctgggtgacacagtgagactgtctcaaacaaaacaaaacaccagcctgggcaagacccccatctctacaaaacattttaaaaaatcagctgagtgtggtgttatgcactggtagtcccagatactcagaaggccaaggcagggggattccttgagcccaggaagtsaaagttgcagtgagccatcattgtacactgcactccagcctgggtgacagaacagtaagactgtctcaaaaaaaacctgaaatgaagtttcatatctttatgaaagtaaaggaagatacttctgtctgaaggacatcagtgaatctaaattgccatttaagagagaactcgggctgggcgcggtggctcaggcctataattccagcactttgggaggccgaggtgggtgaatcatgaggtcaggagatagagaccatcctggctaacacggtgaaactccatctctactaaaaatacaaaaaaattagttgggtgtggtggcgcatgcctgtaatcccagctactcgggagactgaggcaggagaatcgcttgaacccaggaggtggaggttgcagtgagccgagatcgcgccattgcactccagcctgggcaacaagagcagaactccgtctcaaaaaaaaaaaaaaaaaaaagaactcacggtagtttggacaagtataattactttccagcatttagttgggaatataaagtcattccaacaaactacattaagtcctcacgtaacctcattgattggttcttggaaaaccacctagattagttcctccaagtaactcgtttttcaaggtcattttgttataatgttttatgatgttgatgagaaaaaaaaatggttttgttatatgcgtgatttcgcttaaagttgtagttccaagaacgagccgcaacgttcagtgtggtcttaaccataaaagctacaaccagtctaagtgttgtactgaaagattaataattcttcccctcaaaaatacactagcattattttcattcctataaggactactaaatttctcatatcaccatagaatttttgcttgctaaaattccagtattgacaatagcttgactattatcccataccgtggttcttggaattgctttaaacccactgtgggaagcgattggcaagcgggtactgtaacattgtgaggacccaagaagtaaggtattgggatgcagcttatttactgtaatgtctttaatgtgggcgagtggttccacaaaaccattgacagtacagaacatccataggttgccaacagcgtcttacgttagggaagacgaagtaggtggtattccggtctgggagccgagaccggatcgtccgccagggaagctgtcagggattatctgcggttcctgagtagctgaaaaccccaattcatgtttttgtgagtggagtaactgctcatcagcagcacttgccagcccgaagccctgaggcgtggcatcaccagacacgccttcccatctgggcaggatatgtgggctctgcttcctgatcatcccacacgctaacactggtctatgctgtggaaatgaagatcttcatttttctcatgtaggtattttaacatcagcaggttttgtgagaagcagctcagtgtgtaattaggattaactccaagacaaacaatatgcatgaaagggatggatgtgaattttgctcagagttgtgggctgtaaaaatgcggctgggcacagtggctcatgcctgtaatgccagcactttgggaggccaacttgggagagttacctgaggccaagaagagttcaagaccagcctaaggcaacatagtgagatcccacctcgatttaaaaataaataaattggcccacatggtggctcatgcctgtaatccctgcactttgggaggttatggtgggtggatcacttaaggtcaggagttcgagaccagcctggccaacatgatgaaaccccatctgtmctaaaaatacgaaaattagccggatgtgctcacttgaaccaaggaggcagacgttgcaacgagctgagatcatgccactgcactatagcctgggcgacagagtgagactctgtctcaaaaataaaaataacctttttgtaaatggggggaaatgtttcttctgcctctgggagagagactcttgcctggctaatgtgtaccccacattctttaaagggtttgggcttgcgatggccagatactcaaagtgactagtcagacttaagactattatgtaattttaatctttatcatggaatttatttttactttaaagcaagatggaaagttgccttttgttcctccggaggaagaatttattatgggagtttccaagtatggcataaaagtatcaacatcagatcaatatgtaagtaatataatttattaagaaaactatgttttagataacagggaattcaggccattaagagcccccttataattagggccactcctgtttgcagagtgattggtttgtaarcattcctggcagttggtcttaaacgtgaccaatttcttaaggtgaataggggcttccttttctctcctgtgttggaagggcccatgcaacctgccccccccacccccaaacacacagatggctccgaatgcattttcaactaagggcccctcatcaattaagagcagctgtcagcttggacggygggcacagacactgggatagtcagtttagatcactgcactcctggcttgctgggatctgaaggcattgcccgagactgagcatacaggacatcccttggggtgagaaacctatggatatgctgtttcaagcctcactctgcctgggagggtgtgtcatcaggactgacaaacatttgagagtcctgatctctcggaatctttcctgacttctgcaggatgttttgcacaggcatgctctctacttaataatccggatggtgtgttacgatgacggtctgggggcgggaaaaagcttactggctctgaagaccacagatgcaagcaatgaggaatacagcctgtgggtttatcagtgcaacagcctggtgagacttcgttactttggttagctgcttgcccatcaagtcgcaacacccagggactactgtttttgaaggctgaagaaatacaatccattatatatggaatatcttggcctggggatagtgaatgaatattaggccggaggtcagccggctggcaagacagtgcaggtttgtgaaatatttgttagggccagtggcagcactcgcttgygcckggatttaaaaggtaaacaaagcagctgaggaaaaatgtatcctccaggggccgaaggcttcttccatttccgaacgttgttgccctcctagactgcgtgatcagcctttgcaggctgcagtcrctgtttgctttcctctgaaggagggcagaaagggcccacgtgcagggaagctcatagtatgggttccaytgacccaggcaggcatgtgtggtcggcttgcttaggagaggtcttaagagggtcaggtgtgtgcctctgctagccaaattaagttcacgaagagacagatgaatgttgctcttactctatctttcatgtaatgtaggaacaagcacaagccatttgcaaggttttatccaccgcttttgactctgtattaacatctgagaaaccctgaatcctgcaatcaagtagaagtcaacttcatctgaaagttcagctgttttcaaactgcaatgctgaaatgttatgcaaataatgaagttatcccttgctctagattttytgaagaaaatggattgtgtaaaatgctgatcatttgtttattaaaatgtrtcctattacacagtgagttaactctcaatgaagtcatctattttctgggctaaaaaacttcatttgtctttttcaacttctaataagcttaacctaagtgtcacagaagmctagrtgtcacagaggtccactcagtgacaaacacacactgaaggcctgaggaagacgagatgtcacagaggtccactcagtgacaaacacacactgaaggcctgaggaagacgagatgtcacagaggcccactcagtgacaaacacacactgaaggcctgaggaagacgagatgtcacagaggtccactcagtgacaaacacacaytgaaggcctgaggaagactagatgtcacagaggtccactcagtgacacacactgaaggcctgaggaagactgaggacatgggctcagtggtggcttcccagtcatggtatcactggcatggacctctgtccggcagaggtgtggactggagaccaggattcatgctggtctggaacartgacattgccaacttaagacacacaaagcagattttcagaagtgtctggtcaagataacatgctggccaaccacaattcctagagttaagagaaccttaaaagattaccgctcatgctaaaagtatgtaaagatcccatgtacagtatgatagtgtactttttttaaaggactgtcaatatacaaaactttaaagattaaaaacattaaaaataaaaccatgtccatttaaaagtattttatttttttccagtcaaatgactagttaacaagaagagtaaacttattaaacatgctctaattataaatcactgcattaaggacaatgaaaataatcaatttcggttatacaatatatacagttgtgctgcaaccaaagtaatcaggtgaatgaactgaatatcatacatctcaaaatagcatcctaagctgcatattatgttatccaccccttaacagatcacacagttactcttagtctgtgtacatgttctgagccatcatcccagatctgatggagaatggcatgcaaaatgccagaatcctgcagctgcagttcatgaaacataaactttaaatataaatagatatctacaatgtttttctttctcttagttgcttttttaatttgcaaggagcaaataactaagaaaggatattagcagggtcgttaatataatttctcctctggtaagagtactattagttactgcacaatagcaccaaattgtagactggaaaaatatttcctaggtatttatgtaccagtgaacctgacagattagtttgggactggagttctaatgttgatatgaatcaactttattccttatatagctggcaccaggtggtcaaaaggctgactataaaatacagatgcaggaggattgttaaaatagacataagtgcactgtgcaaaatacatctgtttacttaaatctatgagaaaattaaatgaagggttcaaacagaaattaacaattagtgaaaacagatgtagtgctttaaaaaaaaacaaaaacaaaaaactacagatataacacatttttacccggaactttgaaaggtaaaaagcgattgctatacaacatcataaaacattccagtttgttctgtcttcctttataacaaaaacaaaaagtacaatgccaaaaaaaaaaaaaactctacacagtcttgcataataaagacaagctgcttcaatcaaatgcaccatcacaacaaatgcagttaacagcattgctgcctcactttccaagcctatatgcaaatttattcctttacttttgttaaaagtccaagtgggtatcatatgcctatttattctcagagtgccaaaatttccaatattcctactatgaatcttaccctcgcaattactaaatagaggtatgacagtcaagttcattaaacgaatgagttttggttttataatagacaacctaatcctctactaccaccccaagtagcttaagaatgatatgatggcctgaaacagtaaaaagtgggatgtttgggagtattacctgggacctatatatttctgatatgttcttgattataaacagatggacagattcaatttcaagacagtgtgactaccattcctgttggagtattatagaaatacaagacactaaactgagtaaacattctcctgggctagaagggaaggcagtggtacactcagtaggaaacagcaagtgatgtgttaatacagcatggtctgcgccacagaattctactgtgtacagttgctttctgtgtgactcaggaagttcaagaaggcaaattccaaaacacctaaagcatataaactaatttaaaagaactgttttgcaatccatcatccttagtttttaaccaaattcaggaaatgcagttttatataacctggaacagaatgaactgtagttaccctacgttgtcataaaccatcagtagttttgttaagtatgattgttcacaacaggttatacatacatgcagaatataatgatagctgcaacctcacaaattagggctagaaagtacaatgctaatgtgtaaatttccaagttgctttttaaacactgggtggatttcaaaggaatgtgtgtctttaaaggtgaactgatggcattttatcgagaaagttcagagctgggctatggacttctgaagcagcagttcactggccgcctaaaataataattgtgataaaggtcaccaactccagaactgggccaaggaatgcaggaagaatttattcattaatgcaaacatttttaggtttagctaattccgtagaggcaggatcttgattatgtataatagttaaaataacttttcagttcacctgttgggaaattcagtttttcctaataaatgcatagcaatgtttcatgaaaaccacaaattataaaaacaattactgatatgtaaaaattgcctctgagtttttaaaacagagcagtggcattagagaacatgggctgccatacaaacagttcatgaaactggttatctggcaagagttttggtaccaataacgaaacaggaacataactgttaatgcttttgttcagtagcaattcagtcagcgataaagtgcacaaatgacaccgggaatgcgcctttgcgaccaggatctccatcaatgtggccaatctgaaatggagaaaagtgtaggttgttattaaaattccaaatgttggtggaaactttgaagagcattacatagagcgtttggtgaagaaaagcaagattggttcagaagactcttccgacaaggaattacttaggtaaaacatccaaatgatttttgtccgtttttcctcaccacatttcaaatagtgcaggcctctcccgtgtaaggagctcttcccagccatgtcccagatgttcgctcgtggggatggccacccccacctgttcttgggaggcacacaggtcagctgtctgaccactacttcccacttgccatttttcaatgaatgaatgaatgaatgaactgagtgtcacaagtttgtgagctgcaacgtcacctaaagtggcaaaggtataagttggccccatttcaatgagttaagtacttgtggaaggcttcactctatccacttatgttccctcttgggtagatacataaattatatccaaatatgatctcaagagtgtaaatgatgtaggcaaataaaaggctaaaaacagccaaaatatgaatggtgggctttttgtggagtgggtggggggtgctgtggttatgggcaacttctgttttcttctttatgcctctattttccagttttggaaatgagcaggtattttccacatggctaagcctgtggtcaggttggcgccccttccggatggtgggttgtgggcaactgtgggagctggctggttcccgagtagctgggattacaggtgcctgccaccacacctagctaattttttgtatttttagtagagaaccatgttggccaggctggtctcgaactcctgacctcaagtgttccgcctgcctcggcctcccaaagtgctgggattatgggcgtgagccaccgcgcccaggccacagacactttcaatccattaagggcaaacgaggccacaggaaagaccggtgaacccagctctgccaaatgaaggcagtgctgcctggccctgagagctcacagcgcctctggaggctgaagacatgcagtttaaacactagtgggagttctgggagggacagtgactaaagacagtgtccaaactcctcgcactcgacaaagaagttcccctaaatcctgtgagttcccagctgaactgtctgctctgagctcagttgcggagctgtgccacttgcgtctactgtgtggtgggctcagcctggggctttctgtccgcgccccattcaagccggttcatccaccgccctcactgtctgcagctgccgcttagtgggtgctcacaagatcacctgcaccagactgtgtgtgtgtgacctccctgtcacagatgatcccactaatgcttaaagataaaagcaacctgccccaagccaccagcccctgagtggccaagtctgaattcttaggtggccggcactcatcttgctcccacaccctgctggacgcctgggcggccacagcttgtttcaggaccagactcaggcctggggctctgcgctctaggtcagctctctccagacacccgattccactaatccagcaatggggggtgatgacctagaaactcaagacctcaaaatgaaggagtgtcatttcaggccctcatgagtgctgtggaaactgcaccctaacaggggaggaagccaccctggggaataatcaggcctgctcagaagggggtgtccatggaggaagcagctcctgaggatgctaaggggcggaggcaccaggaactacatctggactgctcaggctgagaaaacctcacctgcaagcccgtctctccagccaggtgggcagggacgtggctcagcccccaggaacctcccaggcccacccttgactcacccaccactcctggtcctcctccccgtccacgatgatcacatccccctcggagaaggtgagctcatcggggttgtcagccacacagttatagagcgctttcacccgcttaggcttcaacttggtctgggtcaggagagggaacaacggttagtgtggctgcaggcctcagctctcagggcagagagctcaagcaccctgccttccccggtctcaggagtcccgtacctaggcctgagaagcctgcagatgccaaggtggggcaggtcagtgcagctcaggagccagggagagaaaagggaagagctccccaccaagcagagagaaggggccaagggctgggaaacgaagcggccggggcagggtactctgagtgggcccattgtggagctgcggcaggagggccaaacccaccagctgcccagatccaagcagtcaggtaccaagaagagccccgccctgccccagccaggggaagaggggaagacttgcttcccctgagcccttgtgaaaccacctgcacccccctggctagagcagagaggcaggaaagggggctcgtcacttactgcctgcgacttcctaggcatgggtgcagggggctgcaggaccatagcattggacagaggacccagagcttccgttgcagagagatccactgtagggcaaaaatgaagcagcttaagacatcccatcaatcacagccatgagatgtaaacaatgtacaagccacagggtgtgtctgaaagcaggtttccccaggtgttccgatctgttgaggggaaagggaaccttctgacttggatgcagaccttggagagcttgtgtggcagcgagtgtcccccagtgagcctgccatgtcagcaggaggggacaggtgaggggccccaggactgagctgctcaggagcaggggtctcagaggccgagggaggagggaggatggcaggagggaggagggaggaggaaggcagggaggagggtgagaggaggggaggggaagggaggggtggaggaaggcaggtggcgggggaggaaggcatgagatgggggagggagggggagaggaggagaagggagcagaggaaggcaggagtgggggaggaaggaaggaaggagggaaggaaggagaggaagagggcaggaggggaagggggcaggaggggagggggcaggaggggagggggcaggaggggagggggcaggagggctgtggaatggcagacagctgggccctccctcagtcctgaccacctggcaggaaacatcccccacattgcccccatggaccaagcagaaacaaactcagtcccaaattaaataattaccaggtcctctcggttggcctttgttggtcagtggggtggacttgtcagccctacaaagacagggaaaaagtagatttactgctaccggagggcacctgcccctttctcatccccttttatcagagaaccttctgagttcaagctcagagtgtgtgaggtggtttcctccactgtcacttagctgtctcttttttatgggaaaaggaagaatgagaggccctgaggaaagtgctaaattcaacgtttctgatcctaaaaccagggcttttccagagcactctgtccacgtgagcctgccaccgatggccagggtctggagtgatgctgggcactggccactggccccgccccgagtctgctcagccccttccctgccttgg

SEQ ID NO: 96385 - DNA, 37180 bp, Homo sapiens
cttgcatgaagtctggcaatgttattggtcttctcaaaaaaccagttctttctttcattgattttccttatttttttttttaattttcaacttcattgatttctgttccttactatttccttccttctgctttatttgggcttattttactctgtttataaaaggagatgattcttgaaagtttatcgatttcaggtttttcttttctaatataagcacatagtgatagaaattatgacatgttgtatttttattttcatttggttcaatctatcttttatttttcaagagactgggttaaaatacaaagactcagaaaaattgaaagggatagaaaaatatgtatcatccaaacactaaccaaaacaaagttggtgcagctttaataatataagagaaagtagattttaactcaacatagatgactacaggtaagacttcaaatatcgcttagagtggcttaaaggaggtgcccttcccaagagctgtttaagtagacaaactgcagaagttgtctaatttacctattttaatgtagggaactttgtctttttgggggctgcttgacatttagatcctatgcccacattttcagaatttcacattctacacctgttggtgggaggtagacaccatttccctcattagaacctgaaaaataatgatgctttattgagcaaatatttttccaacaatctacttaaactatttattgaatatttttgcaaaatatcgaacttcagcctagtacactttgggacactgtgttttcaagtaatgtttccagtgatgatgagcattttttcatctgtctgttggttgaataaatgtcttcttttgagaagtatctgttcatatactttgcccactttttgatggggttgtttttttcttgtaaatttgtttgagttctttgtagattctggatattagcccattgtcagatgaatagattgcaaaaattttttcccattctgtatcactggccatcaaataaatgcaaatcaaaaccacaatgagataccatctcacaccagttagaatggcgatcattataaagtcaggaaacaacaggtgctggagagcatgtggagaaataggaacacttttacactgttggtgggactgtaaactagttcaaccattgtggaagacagtgtggtgattcctcaaggatctagaactagaaataccatttgacccagccatcccattactgggtatatacccaaaggattataaatcatgctgctataaagacacatgcacacgtatgtttactgtggcactgttcacaatagcaaagacttggaactaacccaaatgtccatcaatgatagactggattaagaaaatgtggtacatatacaccatggaatactatgcagccataaaaaaggatgagttcatgtcctttgtaaggacgtggatgaagctggaaaccatcattctcagcaaactatcacaaggacaaaaaatcaaacaccacatgttctcactcataggcgggaattgaacaatgagaacacttggacacaggaaggggaacatcacacaccggggcctgttgttgggtggggggaggggggaggggggagggatagcattaggagatatacctaatataaatgatgagttactgggttcagcacaccaacatggcacatgtatacatatgtaacaaaccagcatgttgtgcacatgtaccctagaacttaaagtataataataaaaaaaaattataaacctactcttatgcaaacagtattggcacaacaagaaaatgattaagatgcagagagggtaggtcaaaaagactaaaaggattaatgcagattgtttgatgtatattaaaacagttggtaaaagttaaaaaaaaaaacaaataatgtttccattgtgtcaacaaatagatacttgtagatagctgcagattgtctatactattacatgtttaaaataactctctcagagtgccagaaatgttatcaatgtctcatgcttaaaaaatggtaaattctaataaacaaaagactgatataaccaggcagtttgaagcataaacaaaatcttctgtctcaattataaagtacaaagtatcaggtttgcaatatgggtttttctgttgtaacagaatttcgtaactaaagattgggttctagccatctcaaggctcaactcaggtagtcgtattcactacccagctgacacggttggtggcagaatttagtttttcacaggctactggattgaagacttttgatttttactggggttggccagggcctccctctattttttgccttgtaggcctctctataatgacagctttcatcatcaaagagtgcaaactaggaaggcaattgagtctgctatcaagatgaaagcctaatcacagaagtaacatcagatcacttgtgccatattgtgttcattagaggtgagtcactaggttttgttgacactcaaaaggaagtgattacacaagggaatcgttgcaagatcattgcaggttatcttagaaatctgactaccatatgtctatcgatgaggaaacttattaaataaatgtagccatatccatgcatcttcaaagaattaggagttctatatggtactaatatgtaaagagtaaatccctactgacataggaacagtgtgaataatatgacacattttgcttataaggcggaaaataaaaatctataattctatttgcttgtatacagttaaagaaactatgaaacaatatataagaaatgaattacagttgccaaggttgggagtgaggagtgagaactgggtggaagggaaaaagaggttgaagggactttccccgtagtttttatatttacaattttttgaaccgtataaatgcatgatctattcaaagattaaataaaaataatgggaagatgtttttgtggtcaccaaagttgtctcttctcagtcttctagaggagcatgagaagctgagagtgttagctaatgatggagttttagaagttttttcttgaaggttcaatacgccataagtagtgtcttatgcaggtgccatttagatgcaatttcgcatcaagtctactgagtacctgttgcagccactgcgaaaactcagaatggacccccacccaagatctggtttggatgttaagacaattactacatttacacacacacacacacacacacacacacatacacacatacacaccttgagagggtatgaagaggtttatttcatacacaatgagacttctctggggaaagaagggcagtcctctcaagctgatctgaaaatgacttgagaaaacagtgaaaagagacaggtcttagggtttcattgtggttagggggtaggctggtgtgagccttcctgcatgaaggttgaggtttgtgtgatttgaatctcccctggcaccaaaggtgggagcactctggcttttttttttatcatactgcccagattaagggtacaagaaaagacaagagtgaaccttaaaagcttttagtagtaaaacatcaaataatgcagtcatattctttttttttttttttttttttttttttttttttttaagagacaaggtctcgctctgttgcccaggctcgagtgcagtggctcaatcatagcttaccggaatctggaactcctgagctcaagcaatcctcccgcctcagcctctcgaggagctgggactacaggcatgtgccactggaccagattaaattttttatttttctatttagtttttgtagaaatgaggtcttgctatatctcccgggctggtcttaaattcctggcctcaagcaatcctcccacccctgcctcccaaagtgttgggattacaggtgtgagacacagagtccagcaataacttgttttgtttagtcaggaaagcaatagagacctcacaaatatttagccttctgacacaagcttgtaaaaaaacagttccttaaaaattatcaagatcatatgcataaggaaggctgtgggagacaaaggagtatttctttaggagatataatgtttcatctatcagactagcaaaaattgcaaagaattatggtattcagtatggcccaggatttgagaagttaggcaattgcatacagtcaatggaaaataaaaattgcatattcatacttctttttccaaaagtaacacattcatataaacaatttaagtgtgcatgtcctttgactcagcaattctactcctaggaatttattctgagtaaacaatcagataattgcaaaatgtacaaccacacaatcaatacatgcacacaaacacgcaagaatgttcactgaagcactggctgaaagaaaaaagtttggcagcaacctataaacccaactattgagatttaagtaaactattgtatcctcctatgacaaaatatagccataaaaggaagattcaaagtatttcatggtacaggaaagtcattcacattatatgttaaaatcaaaagcacataaaagagtattatactattattccattgttgttcattaaatagttgtaaatacataggaaaatgaccaaaataatataaatacactaaatttttacagtacagctggtgtgatattctgggttatttttattttcatcttagttctctttaattttctatatgttttttactaaattggaatctcagagattttgaaggcaaatgatcagtggtaaaataatgctactacgtataaattcattctacaaattgggctaaccagatggaaaatgggtcaccacagaaagtattataattcataagaataattataatatcatacaaatttattagacaatcaaataccataaaatatttgtgactggaaattgaataaaacttaaaagacattaataaaggtctgttccttaaagtgctcagacatttaaaagatactttcaagacaaaaacatctactacaaggaggattactagtctcttcaggccgtagtgaaaatggagtacatcatcatcaaataacaacgtcagctaaaaatacagagcctgtttattgtgtacggaccaactgtgcaagcaatttgtacaatactttggtgttaactccaatttggatacgaattactcattttcacaaacttaaattggattacactttatctttcccaattactgaaaacatttacttaacacatacacatttggaacttaacttcgatgaagtaaaaatacgaaaagttaatctctacttccaaaaatgtcgatgcacgctgcaattgtatttcatttctttcgcaaaattttgcacaggatattgttgttaattgttagtagaggaattcagaaatgactagatcctttagttgaggcaagcaggtatgttccccgtgttctagccctgcacttaagagtcaatgaaagaaagtttaaaaaagaaagcattgtctcctctggagaccccgtctgccacgaccacataccttgattcttgctttctctataaattctagaggggctttcccaaactcaaatccaactccaatccaaggaatccagcccttgatgcacgggggtctacgcaaattcttccgctgaaggagtaagaacagagcaaggcaacccaggattataatcactgttggggaaattagttccatgtttttgtccagcaccttccagaagcagaaaagtgtgaaacagtcctgccgtcccttgcttcttttctgtgggctacggaacctgtcgggactcccaacctttctgctgcaacttttgcagctctccttcgtaactgtagcttccttcctctgtcccagttttcaggtgatttttccattgtcgctccctcccacctccacttctctttgaatctcagccagcgcggaaaaaatgcaaggaggggcagggccgggctaggactgacgggcgagaaccagccgcgttgccatggaggccgggggcggagccgcagagggacccgcggccggccaatcagagacgtagcggagcccggcggactacattgcccagtaacctcctgggctccgctgtgtttttctattctggggtgtaagrggcagctggaccactccagctgggactgctaggaaggttgcgggtccacccggccgagccgaacgagggaaatggtcctcacccggccactcgccggttgaaaaggggccgccctggcagggaagcggccgccgcggcgcggtgcagcgcagcggcgagaaggagtgcgttatcgtcttgcgctactgctgaatgtccgtcccggaggaggaggagaggcttttgccgctgacccagagatggccccgagcgagcaaattcctactgtccggctgcgcggctaccgtggccgagctaggtacccggctgcccacgcctgggcctcccgggccagtggcacgcgccgcgctgggggagggwgcgcgggcggcttcgcgcccggcagtgcgcatcggagaggtcgccccttccatgcccgcctggcagaggtggcggtggaggccaggcccgcggtgggaggaggagggattgaggtctccacggccttttccttctaatctcttctaatgcttcccttaggcatgtgctgtggtgcttgaatgttgtactttaagaagcttcgcgagctgtcattcctctgtaggaatcattttccttttcatgaggatgacctttttaaaaacgtaatctgttttccatccttactgagatcatctctgtggtttatagtcttacacagccacactgtcattatcttgtgggtccaagttgtggacctaccttgtgggacttccgttattaacctgccactcacagagcatcgactacttgacctctttgagtgtaattcatctatactgtttaccttgcaggattctgagaagtcaataatatatgattgctaaacccaargcaggacacccattagttgcgacatttttataattcctacaataccagggactgtggatatatatttgaaaagacccagttctgaccttcttacaggctgctggggagacagagaaagacaattataatgtgctacttgttataatgaagatattattaggtgtcataaaagcatagaagagcagttacatctgcctacatgagtaagaaaaaactttaagaggccatctagagtggaatgatgatgcccttgaatgagcaagtagcgtttattccaaggattttgtgagtagtatactcatgtgtttcctgtgaagccttaactgtgtattttaagattacccttacattttcttgcctgttacaaaaaaataaaaagaacagttctgatgcgttatcatttgtaaatgttagttggtcctattttaagagtttattttttaattctagcatagccagccatgatcagttgtttcgtgctcttccatttttgccttttagcccctctattttttaatgtctctcctttcgaaaatgatggagaatttttacttttcattgtttttactgaaataaaattcatcagcttaaaaagatctaaaagcagattgctgaatgatatttccaggttttatttttaattgatgtgtccccctctgactcaatggcttttatacaggactattcctcgttaaaaattcatggagagaattgtgtgtggagaatggatgggaatcaaaatgtgggatggttttaagtacaaaccacttcaggaacctgaagcatcatttaacaaaccagcgagaaaacaaaacttattttgaaagacataatctgtgtaatatggagaaatctattaagatttttcaggtttcatatgtcaataaaatattgcttgaagtctatgcaagctacttctgttctagggaaactgtcagcaagatactaacttttccaaaaaccagtggtaagatttaatattcacttcccttccccacattgttttctcttggaaaaggtatactaaggttttgtgtcaggtggtggtcattgaaaagtcttatataatgtaagtaatgttcatgaacttgtctgaatgttattattttaattattcaggacgttttctgtataaggttatgagctctatcttccttatgtaggccgtttagcttaactgtattaaggtaaaaggtctgtatctaatttaaaacttaaaaccaaaaaatttttccaaaatacagttagtacttgtaaggaggccatgagtaggcgatgcatataatttagtgctggaaaaataattccatatatgctttaattgaaaggatattgagcttatgacccttgcatataaaagacaacattataaactccattacatcttctgtatctcaaacattatgtcagtcattcatctgcatgtgaacatcacccacgaaattatagagttcagcttcatctagcatttgttatagtacataagaatatatagtgcagtattctaatgttacattagatctcaaataatcatggctgcagtcaagaggatagcacacaatatggtactttaaattatttcccattgaaaagcaaaaattaatgactaacagatattaaagttaaatttctgaatagaaagaacccaaggcttgtcattttaatttttattgttaatgtttgttttttttttttttttttttttttttttttgctagtgatccaggatgctcttgcgtagtgattcttaaatttgggactgtgtgagaatcaagtttctaaaccctcttcaacctactgaattagaatccatgggcacggggctaggaaatttctaatttttaaaatctccctagctgattctgatatattctaaaatttgagaacaaccagtcttgggaaaatattactcctatgattttagatttttgtttgtttctctgaatgttgtgggtttttccctgcatttgtgtttttgttagcaacctttcccctggatctcacaaaaactcgactccaaatgcaaggagaagcagctcttgctcggttgggagacggtgcaagagaatctgccccctataggggaatggtgcgcacagcyctagggatcattgaagaggaaggctttctaaagctttggcaaggagtgacacccgccatttacagacacgtaggtatttatcttgattctagctggtaagtttgttatgagttctgtgtttgtctcctgtgcttttctgtttgtccaaaaacaagttagtttttttatcttactgatacaataactgaacacatacagcacatagtctttttttattattatttaggttttttttttgagatggagtcacactctgtcgcccaggctgtagtgcagtggcgccatctcagctcactgcaacctctgcctcccaggttcaagcgattctcctgactcagcctcctgagtagctgggactacaggtgcacgccaccacacccagctaatttttttttttttttttttagagagtctcgctctgttgcccaggctggagcacagtggtgtgaccctggctcactgcaacctttgtctcccgagttcaagcgattctcctgcctcagcctcctgagtagctaggattacaggcacatgctaccaaacctggctaatttttgtatttttagtagagatggggtttcaccatgttgatcagactagtctcaaactcttgaccttgtgaaatttttgtatttttagtagagacggggtttcaccatattgatcaggttggtcccaaactcctgacctcaggtgatccacctgacttggcctcccaaagtgctaggattacaggcgtgagccgccgtgcccagccagaacacatatagtctcttaagaagaaaaaaattaactactgattattattaagaagttactgtcctaaatttttagaaacgcatactcacgtatttagggatgaactgtcatgaaatctgtaaaccactttaaaatatttaattaagcaaaaaacaatgaagcaagccagatacagtggcttatgcctataatcccagcwgtttggaaagccgaggcgggataattgcttgagcccaggagttcgagaccagcctgagcaagatggcaagaccctgtctctacaaagagtaagaaaattagccaggcctggtggcacatgactgtagtccccactacttgggaggctgaggtgtgaaaacagcttgaatccaggaattcaaggtggcagtgagctttgatcctgccactgctctccagcctgggtaacaaaacaagaccccatctctaaaaatattaaattgggccgggtgctgtggctcacacctataatccagcactttgggaggcacaggtgggtggatcacctaaggtcaggagttcgagactagcctggccaacatggtgaaaccctgtctctactaaaaatacaaaaattagccgggcctagtggcgcattcctgtaatcccagctactcaagaggctaaggcaggaaaatcgcttgaacccaggaggcagaggttgcagtgagccgagatcatgccattgcactccaacctgggtgacaagagcgaaactctgtctcaaaaaaataaaaaatacaaaataaatttaaaaagttagaaaattaaggaaatatggcaaaaatgttagcagttaataaatctcaatggtagagatagagggagttacatattatttacttttcagtgtttgaaaattttcttaataaaaatttgtataggtttaagaaagaaaaagtgaatagctgattatcatttttcttcacttaagaactttaaacacagaatttaaatttttcatattttttgaaaattaacatatatttattacagtgccaaatctcatgagtccctgtctcataatctaagaccaggctactctgaaagaggacagagttcactgcctaatccaacactggctgtagtgtaaatgcaacacaggtgatttttgccccagttccaaggctacctaactagctatgtgggccttagtcacycttaaaggaagatggttgcaactatgccagttagaacatttttctgctctgcttccacagtggcactcacaagaggaggacttgattttatagcttgtgtacaggagaatataaagttggcttcaaaggaggtaggataggtttggcatttttctcctcataatgtttcctgaagcatgaaaggatccttgatcagaagagtgctcagttctaatttctaaaatttgctggcttaatatttttaaagattcaattctccatatgagtaagttagcgtgtatcatcaaaaactatctagaactgtgtgcagagactgttactggttttccaagttgtatatttttgagtatcttaaaatatttcatcaactttctaaaacatcaagaaaagctctctatacaaataccatggttgattttaattattttgttttccatccttttaaaaatattttctgctttgcatcccattattattttgagtttcttttcatttgtagtttgttgttcattgtgttgttttacagctaagattcatttcatacgtttgatgcttagctgaaaaattacaataaattctccaatgaaattatgtatctttatttaatgaaaatgcctgctgcgtaccaaggtatgtactagggcatctggggtaagtaaaaacaaacacatagagcctgcctggagaagctcatggtctgatggaaagataagcaagragagttaatttctaatcaatatgataaaaaggtcagagagcagtttctgaaaaacatgtttttgagttgagtcctgaaagacaaggagatgttagtaaagcagagaagggagaattcattctagaaagatcagacagtgtgtgggaagggcagagtctgaaaagagcatgccccatttggagaagcatcaagaagcccacgtgttagaagcaccggccccatgagacaaagacacagctagagagattgactaggccatgtcggaatgtcctcttattttatacatacataagcatatagatacatatagccaaagttacctttttaatgatcttttttacccagtgtattctggaggtcgaatggtcacatatgaacatctccgagaggttgtgtttggcaaaagtgaagatgagcattatcccctttggtaagttttgtttggaaaataatatgctgttgccccaaatgccttaatgtttattaggtttatgtaaaattgtacatttgtacccaaattgccttaagttatggacttaaaataataattacaatataagtccagataattgagcatttactgcagatgtayacagacatacatgtrtatacatatataaattgcatatatagagatatttagtattttactgttgaaagrattcttatagagtacctttttattcctctttttattaagaactctcggctttagagtcagacagggatgggctcaaattcctgctstgctactgtataacctggacaaactgcttcaccttttttatcttcagttttcacagctatagaagtaatacaaaccattaagtgtttttataggacacggtgagatgatgaatgtaagtgtatattatttaacggaaactgaaaaaatcggttactaaaaataatatacatagagctcctataaataaatagaaatatagaaaacacacgctgggcggggtggctcacgcctgtaatcccagcattttggaaggccaaggtgggcagattacctgaggtcaggagttcgagaccagcctggccaacatggcaaaacgctgtctctactaaaaatacaaaaaattagctgggtttggtggtgggggactgtaatccaagctacacaggaggctgaggcaggagaatcgcttgaacccaggaggtggaggttgcagtgagccgagattgcactgttgcattccagcctgggtgacagagcaaggctctgtctcaaaaaatataaaataaaaataaaaaattgcatatatatatataattatatatataaaattatataacctctcagctggaccactgccatctaactcgtctcctcctccatcctcaaatgtgtacccggtatccagagtgatttatttgaaacacagatattaacacattattggtgtccttaaaacttgtcactggcttctaatcacccacaaaataaagtggagattttggaatgtgacttagaagatctgcaatatctggcctgtgtcttcagagaactaagcaattcattgattctcttggaaagagtggtgcactaatgagctgaaagattccactgcctgcacataccaaactgttcttcacctctgtgtctgtgtgtgtgtgtgtgtgtgtgtgtgtgtgtgtgtgtgtgtatagagagagagagagaaagcacaatagaaaaataaggaaaggataccaataggcagttcacaaaagaaatatacacgttcattaaacataaaaatgttcaaactcaccaataatcaggggaattaattaaaactaactttaagctgttagtggaaatataagttactatagtctttttggagcataaattacttgttaacatttttgaacgtgtaacccctttgtgattataatcatttataaatgcttctacatatgcattaagacagacacaaagatattgactgtagcagtgttgatgatagaaaattatttttttaatttaaactattgatttggaagcagttaagtaggttatgatatatttatggcataacacagctattgaaagcatgaggtgggtttcatatgactaacatggaaagatgcctataaaatctttcttagggttaaaaaaatctaagtcacagctataaaaaggggcaatatgtagagtttcacctttcaggcaacatttctttatcytgtttttgaaaaattgtaatgtactaagctatactaattgctttcccagagtcaattatggaatagatttatagtccttgcgttttggaatttcttccagaagggaaaggtttaagtaaaaagtgcaaaggaaatattataccagaacttttagggtggataggtttaatgtccttttgacccaatcagaacaattcattcagtcagtaggtatttattgggtaattatggtatggtatgccagtcttatacttaatactgaggctatagtaatgaaaaagaaacagtcctgccgtcattcagcttacagtaacagagtcgatgaataaacaattagaattatgtaaaaaatacagagaaaagagtggttatgagagatgcaaagagaaaaaatatgataatgtatgtgctcatcattgtgtggagaaacaggtatgagagatgcaaagagaaaaaatatgataatgtatgtgctcatcattgtgtggagaaacaggcattttcacaggttgttggtggaagtgcaaattgataaaggttttctggaaagcaatttgacaggctctagcaaatgttatgtaaatgttcaaatttcttaaagttatgttcgttaaataaattatggcatatccataaaatgaaatactgtcaaactattaaaaagaatgaggctgctctatatgacctgatagggatagcctttaagatatgctgttaagaaaacagtgcagaacactgtacaacttgacattctatgttagcgcttttacaaaggaacatttatacagatatgcttgtgtatgcacaaactgtcagtcataacttagtgtttaagactgtgggctctgcatgcaggctgtctggattcacatcttggctgtcccactgattagttgtgtgatttgagctgccattcaactgctctatgcttcagtttcctcatctgacagagagaatgacagcactgtcatgagggttgatatgagaatgaaatggtatttttaaaatgctcagaacagtgcctgacatgagcattcagtgaattcgttattatctctggcaagggatataataaaatagtaattgtgattgcttcactggaggggagctggacatagaggtcagaaggagacttttcttttatacccatttgtagctcttcaagttattttaaagtaaaaggaaataaaatgcttattttccccaagagactactgcagtaatctgggttaaagttgaccggagtctagcctttgtctgttaggctgactacatctatgcagtttttattcccctgtagttggaattaaactacaattaaattrtcaattcagatgtgtatatctttgaagcaactgctctttcctttggatttcaggccatataaggcctgaaattttcactcattgtactcctttaacctcccatcagtaaacagtcaaactgtttactttactctgtgacttacttgggtatatccttttctttacttgatctgaaatctcttacctaggccctgtaccagctcagtattggttcactataaaattcrtgaaattaatggcaactttaaaaagaatttccttctgcaattaggaaatcagtcattggagggatgatggctggtgttattggccagtttttagccaatccaactgacctagtgaaggttcagatgcaaatggaaggaaaaaggaaactggaaggaaaaccattgcggtaagttctccaattaaccaatacctctctttttcccttggccaccgtcatatttttaacaagtacctaatagaattatcatccagtatgcagtaaagatattacttctgacttttttaatctggaagttcattaagaggaacactaagctggatcttttctttgcactaggaagtgtacatgttctataccagacaaattatatatgtgtaatgttctttgctgcttttcccagccaaggctagacttgtcccctactgcaggttaacataaacagtttgattattaaaatttgccctggtgtgaatctcaattttgccactgtggcttggtgttgtggaagtcacttaacatttctggtctcttgggttttcatctttataaactcgctcaaaaggctgtcatgatggttaacatgcctgactgctcattagtgtgaaaaaccttgctttcattccctttctcctgcagaaagagagtagcaaggataacgttgcatattgtcccaactttcttgttgaatctcattcctccttcatcttgaagccctctttttccctaatatggctttgggatataaaatcctcccattgcattacactatattactaaaatccacctttcttccaagggtttcatgttcaacagtttattaaaataccacttagtttcccctgggaaagggacaaaatcatgcagatggatagacctttcccagaaaaaaggtaattacaggatgacttgagctgagtacaaagggagctgctcctgtgaacactccaggtctgcagctgagccagaggcaaaggagggtttggggccatcttcaccgctgaccactgctgtctgcccctcttcatgtagctgactcagtggaaaaggagactgggctgctgcagcccagggtccccttcagccttcaaagcatgtagagaatatgcacagcacaggagaaaagggtaccactgtgacttaaccaagtagtttatagaaccccagggcccagtttgtcatcttataacaacttctaatgactaaataacagggagaagtcacactgccttgttggataggaggagaaaactggttattaggatccagaatatctgagtttttaactgatcactcagtttttttcccctctttgttcttaatgttggaaatttttggattgaatgcacctaatgtagtacactttaataatcaaactctttatattaacctgtaataggggacaagtctatatactacagtaaaaagcatgaacattgagatcagacagcctgggattcaaagccagtctttaccatattttagctttgtaatcatagtcaagttccttacccattttaagccttggtttcttcgaatgtaaattagaatcatattatatacctcacagaattttcagtattaacatgcatctcatgtatattaaatgcttggtacttagtaagtgctccataaattttagttacagtgatcatcattcatgatcataacttctcatgtatcataacagcaattatgtgtgtccaataaatatgtgatattatctttttggtgrgattcagagagtgtgatgcctgagtaaaagccacacaggctagtaagtggtgaaggtggcatgtgacttcaggtttttctgactrcataaagctcagactttcttttaatgccagaagttttcatatttgtttatgcttcttcagcaccattcttcatctatctatagagaaatgagcaagataaagatagtctactaaattttyttgaagctaaaattcttccgttttaagaactttttatgaaattgtcctttttacttcttagtctgtcattttttatgagattaattgttgttaatgtcattatttgatgaactctaaaaatttgcaggtcccttccatcaccagtaaaattaacccagaatctgataacctttggttttctcctataattaatacatgtactgataatataaaatatcaagaaaggtatttttatccatttaataatctgagaagaggatgatacagtgtataaagattttgattaaaaatatttaagtcaaatgttggccttttttctaaaggattattatgtttatctgtaaattagacttgcatagattgcttcatttctaataattctggataaattatatctggatgttatttactccagattataagagctataagtgaagcttatccagttgaatttcatacacaggaatacatggagttttcacatttaattattattctccttagatttcgtggtgtacatcatgcatttgcaaaaatcttagctgaaggaggaatacgagggctttgggcaggctgggtacccaatayacaaagagcagcactggtgaatatgggaggtaatgaaaactttgttaaattctaaaaagtcctaattgccttaatagctgtaagcacttatattagggaaattaaaatttatgttttatttttaatatattggtgaccatatattgttgactggctgtatagatgttctaggtcataactgaatattttccacagagcatttttgcttcattctatagtgatgtatgaaaaggataggatttactaaaataggcaaattgtgacaataaggacacaaggctaaactatttgtaaggcctcccctccagtccagaccttcctttaagattaaaactgatatatacagctatctgatcattattatatccagactgtccaaatctttcccctggcaatcctgctcctattcctaaataatcaatttttatacagtctcacaccccaggctggaaacctcaatgttctcttaactcatccctacccctcacttctcatattcacataccaattctgtctcccaaatatttcttaaaagtttttcccctccgccgggtgcggtggctcacacctgtaatcccaggactttgggaggccgaggcgggcggatcacgagctcaggagatcgagaccatcctggctaacatggtgaaaccccgtctctactaaaaaatacaaaaaattagccaggtgtggtggcaggtgcctgtagtcccagctactcgggaggctgaggcaggagaatggcgtgaacccgggaggcgaagcttgcagtgagctgagatcgcgccactgtactctagactgggcaacagagcgagactccatctcaaaagaaaaaaaaagaagtttttcccctcctatacgtactactttagtatccttaaaatgaccatttctacaccactagccttcaaaacctctccgctggaccactgccacagccatctaacttgtctcctcttccatcctcaaatgtgtacccggtatccagagtgatttatttgaaacacagatattaacacattattggtgtccctaaaacttgtcactggcttatcatcacccacaaaataaagtggaaattttggaawgtgacttagaagatctgcaaaatctggcctgtgccttcagagaactaagcaattcattgattctcttgcaaagagtggtgcagtaatgagctgaaagattccactgcctgcacataccaaactgttcttcacctctgtattttctgtccttttccctcctctcctacatagttttcttctagaggtcctctaatactcagctaaggtgtcttcttcaccaatatatttttcctgaacctgccacaatcccttcccccatgccatgttgtattatatgcccttttgtgtgtttctatagctattattgcttgtgtctcttttccttgcctgctactgcatgtccatatcctccactatattataaaccctttgaaggcaaggactgtgttttattcatctttattttcccagaccctcatacgtagtcaataaacatttgaagaatgaattaatgaaataatcctttctaagactaattatatggttctaagaaatatataaatagcatgtttgagggttctagaaatatagcacctaaacatcaaaggaagtcaatctgttttcagctttgctattagagtctgtctgtgtctactgtatatttgtggatattttgattttcagaaaatctttatgattgtactttcttaattcattggttcaaaatctattgtagccaaaatttctcttccaagttccagctatttactcagtatcttcttttggatatctcaagcacattactttgaatatgtccaaaccaaactcttttatcacaccaattctttcttagtatgagaaagaagctagaaactcttctttcacaccattctttctacattcttcataatttcaaaaatatatcaccactctctcagctgtacaagcagaaactcaggcatgatttttggctcttctctttcatttgctccattgcttatatccaagcagtcaccaaatccagtcgttccatcttccagatatatctcaaactcatacacttttctccattcctggagccattctgtagtccaagtattatttatcccctcctactggaccactacagaggccttctaactagtctttccatatctaccccattcccattttgccccactatgcctttgaaactgattttatcaagattacctttgctactaccttattttttttaatttaaaactgtcttcattttcaccatccctataaatggtgcctctgtcctttaaattgttcacactcaaaaccttgcagttgtttttgatttctttctccgttccatattcggtttgctggctgatcctgttgattcttcaaaatttatccagaatctgaccagggctccacaactccctaattcaagtcgtcatcatcgcttactgggattactgctctgccttgttttcctgtagtctactcttaataggaactattgagttctattaagttccagtaagaactcgatagttctattaagttctaaatagtaaccttgggcagtcactcctctgctcaaaagcctcccctggcttctgctcttcatcatctagactctgctacttcttgcatattctgctgctgccggcccagtcttctggctgttcctctaacacagcaagctgactcctgactcagggttagaaaacatactgtatttttgcctggggcaatttctcttagctatctacagggttgttttctcatgctttcttttggtctctgttcaaatgtccacttatcaagaggtcttgcctgatcacccaatttaaaattaatagaaactattcctccctaccctctggtactctctgtcccctttccttaccttctttgtcttcagggcatttacttcaagagcaagtgcatctgaaacaccatgtagtttactttattgtctcatcccacaacagagagcaaggatttttgttcattttgtccatggctgtttcccccaatgtgatcaaatgtacctatccattcttgcctcattacaacttacttccccatactttagtgtgggttaactttatataactctagcattgtgatgtcattctcctatttaaaacccttccatagctcttcattgccattagaaaaatgtataaaagggccaggcgcggcggctcatgcctataatcccagcactttgggaggttgaggtgagcagatctcttgagctccggagttggagaccagcctgggtaatatagtaaaaccccatctctacaaaaatattgaaaaattagccagatgcacacctgtaatcctagctacttgggaggctgaggcacaagaatcacttgagcccaggaggcggaggttgcagtgagccgcgatcacgccactgcactcaagcctgtgtgacagagaccctgtcttgaaaatgtataaaatgcttaatgtagaataatagtcaggaccttttatttataagtgacaggatctcaattcaaattacttgatcaaattacttttttggctaaaaaagtaatttattggctcaaatactgaaaggcccaggggttgagctgaatttaggcatagctagattaaggagtctaaatgatacatttgactttctgtctcttcttctttttctctccctctatctgtagctgtgctttccttgagaacaagaaggattccttggtagctttcatcctggtacacattcctgccccaagcctagcatattcttgacacaaaagacattcactgttgactgatgaatatttaaactttttccattgccagatttaaccacttatgatacagtgaaacactacttggtattgaatacaccacttgaggacaatatcatgactcayggtttatcaaggtaaggattgttttagttggactctgttttttttttttgtatcactttttcttccatatttgacataaattctttaggctcatttgattgggattgtactggcatcacctttagagaagagtacatttataaagagaaatttcttaaagtttcttgcagttagaatggggaagagacagacaaagttgtaggatgttttggattaaacctctcaaaatatttgcatcttgatggggccatcccaggaacaggctatgatgatggactctccaactcatttcaacagatatgtttgagtgccttttatgttaaaggcactgggcagggctctgcagtgggcaccaaaggggtaaactcaattcctacccagggaacttaccaaccaggaaaacaagacaaatataaaaacactctacaggaaatgctaaaaggaagcaactagttactacagggttcaggggaaggaaaaaacataaccacttggaaggatccacaaaggaggtagaaatagacaagggttttcaaaggctgtgactcttcacagaaagggatacgaagggctttccaggaaggagcagtaccttgatctctttgcaacacaatttcaaattatccattagaatgacttattttatagatgtctactgtccttgacattatagtgatttcatttagcttctgatcgtttccaaattctaaaacttcctatgctatttagatgaccctaaaagtagacaaccctaaaagtgtaatagtgtcaagtcaaatatttggaggtaggggtgtgtgtgtgcacgcgcatgcacacacgcatgtgaatttaaccactccaagagtattactgactcggcttttgcatgtactgttctatcttcttgtaacattcttccttcaggtcttcatatacatgtgtcctttgtaaccactcaattctgctgtcacccccggagctttccctgactgcctgtcacccagttgctccctgtcacacttccccatgtttttttcatagcttttgtcagcttctgaaattatttatttgacttctgccttttcccaagtgaagtataagctcctcaagggcagggtcttacctgtcttgttcactgcctagaagaatgcttgacaccagcaggtgcacaatgcctgtttgttgactgacattctttttgttgtttttctacctctttaattaatttagcattaattttaagcaaaaagagcattatgaagcttgtaagaatatatttagtattatattctttctgaataccacattccctttcctaagctacaaactactacataccatctttcaatttcatttatttgtatttatagtttatgttctggactggtagcttctattctgggaacaccagccgatgtcatcaaaagcagaataatgaatcaaccacgagataaacaaggaaggtagataaaaagtcttcagtatccatgtgcttgaatatctgtaatacctttgtgttttaaagatgcatctctgcattttttattgatagaaatgtatttgtgtgttttttgagaaaattgagcgcattttttttatgcaattacctgctctttgatgaaaaagtgacatgcatttggggagataagctaattaacaatcatattatttagacacaagatttttattatgactttattgtttttaaagaattgttaaaagcatattctgctgagaatttacagagcactttcttcagacgcttatgacttgagtaggtaacgtggagaatctgatttgatatgaaatagtatgttctccctggaagagaaaagatagaatgaattctaaatataagaccaagggtggcatgaatcagaagagttaaccttgaaaatatctttaagatcaaaacaagttwtctgtatctgtagaaccacaaatatttttctaaactagcagaaattttatttatttatttattttttttgagacagagtctcactctgtctctcaggctggagtgcagtggcgtgatctcccgctcactgcaagctccgcctcccaggttcaagccatcctcctgcctcagccttctgagtagctgggactacaggcgcctgccaccatgcccgactaatttttttagtagagatggggtttcaccgtgttagccaggatgacctccatctcctgacctcatgatctgcctgcctcggcctcccaaagtgctgggattacaggcgtaagccaccgcgcccggccaatatttaatttttataagattccttagacaatttttatgtacatatatatttttttacacagaaaaaaattaaaaggatcttgtttcctttttaggggacttttgtataaatcatcgactgactgcttgattcaggctgttcaaggtgaaggattcatgagtctatataaaggctttttaccatcttggctgagaatggtaaagttaggtttacttcctttgttttttttctttgtacttaaattacttttaatttataagcattttcccttttctcttctggtttgaagcatggccctgccccccaaatcaaggtcctttctttcttttttaaatcttcttttatttcctttcacttctcctcagagttatcttgccttctgtggtagagtaaggtaaaataagttacatccattgacgaataagttgatagtcttgttataaagccagtaaatagattttctgtaatgtaaaatttttagtatttcatttagtcatattttaatacaatattttagaatatatatacagattttacactagagacctctcctacaaaaaaaaatactgtttcaaaaaaatttgttactttgatagcagatgttacattacccattaatatttattaccacaaaactctgcttagtaagaaaatattatgtcatttttatttggtttagatgttatttttcattgcagtgaattaagatatagaattagatagacttgtttaagcaatatagcaaataaaatatagaattctaattctataatgtagaattagatagacttgtttaagtaatatagcaaatataataaaaacaaagtgctgacgttttttgtaagttaaaacatttgaaagaataggtgagttataggtttagaaattcaagcaatcaaaaattaacacaatatattataatacaattatatataatgtaatattatatgtatctttttaattgagtacctacatcatgcaaagccctatactgaggactcagctttgaataagaaactataagtgataaatgttatgggaagagtgcataatgctatggaaatatatagcaaataagcacagcctaagctggcaattgagtaaacctccctggagaatggacttctgaatttagatttgcaaaatgagtatgacttagccaggaaagagggcaggaaaaaaaacattctctatagagggacagttggagtggacagagagcagggtgagttcaaggaaacctagcagaccaagctacagagacctcatggagagagtcaaggggtgagaccacagagaggcagacaccacactaggaaggaccatatgagccagaagagtaatgggcaccagtttgaagaaatatgcatttttagaaaatttgttctgcctgtcgtgtggattgggaaaaggccaggagtagtgatatatgagagataatggtggcttggacaagagtatgacagtgggaatagaagatggattaaaaacatgtttaggaggtagaaagggaatagaaacatgactgattggatggggatgggagaatggttggagaagataaggaaaagtcagacttcattcccagattcctgctctgagcaactgaggatgatgatgtaatttcctaaaacggggatcatctgcagggaagatttggggataaaataaggttagtttaagacctatgaaattttggatacccataggacatccaagcagagatgtctagatgacaaactgaatatattggtctatgtcttaggagagaatacagggatggaggtttagatttgagcattttccacatatagatggtaattgaaatgttgataataaatgatatcatcaaggaatagtaggtatttgtgtattaacatgaaagtaatagccaaagcccttggcaatacctgataaaagtataccagagtttgagatgttattttggtggttttgattataccttgaaattatgtcaaaactgtggttgtttcttactggaaaggtaaattttgatttggcctgcataaaccaggcactgttataagtgctggtaacactgaggaataacatagtctttgcactggaggagcttacaatgagatgtagaagttaaacatgtaagtagttaaaattacagaaataataaaaattactaaataaatactactgaatcacttggtatatggccaacactgtgctaatcattttcatgacttaactcgttgaatttccccaacaatctgtgcagcaggttactatcatatccctcttttatagagaaggaaacaaaaagcatcaaaagtctaaatagcttggccaggtgagtggttcagggcatcaaacccaggtggcctgacacccaataacacagccttattaaggaggttgtattcttgctttaccagtggtatgaacagtactctgtgggaacacagatagtggagtggaaatggctatgaccatatttgggaagtcgcaagaggcttcacagagctgatatttgatctgggctttgaggcatcaataggcgtttgtcaagagaaatataaaggtgcaacatgagcataggcatcatgtcatgtgtaggcctgttatctttgaagaactacagaaaattcagtctggttgaagaataggtcctcataggggaggtggtaggagataaggctagagaagtacttaaggaccaagttgggaagaaccttgtgggccaagcctagtagtttagatgaactctatggagcacttgcttaagcccgggaacaatgtgctaaggtttgtttgacagcaagattactttggaagtcgtatagtagatgcattgaaagctaggatgtaagaaaggaagttctagcaatgatctaaccagttagatgactgtagaaatggagaggagataaattttagggacatttatggttaactccataggacttagtaactgattatatgtagaaggtgagggacagaaaaaagcaaatgggacttcctgtgtttctaattctaatgcaggaaactaggaggatgagtgagaccattgcagaaacacaaactcagggtcaggagggatgaggggcaagtagaatatttaagtacaaaggatgggaccactttgtttaatcctttgtctttatacatatgactcaggaagtataaataaggaaaaaaagagtacttaatacgtgcaaagctctacatacattactttttaaaactgtataagaacctagcaaaacaagcagtattatcctcatttttcagataagaaaatcatggctcagagtataagaagcttgcccaagttcatgtagctagtatgtggcagagctgggaactgacctcagatctgttccactcaaaaccctacgctccttactgatacaatatactgatttgctcaacatcctgcagctagctacagaagttttaaaattgaagagacattcctagcagtggaggggtatttaaagaaaggctggctaaccaccaaagatcaccagaaagtcactgcctggttgacttgccacagtgcatgacccagagcacagaaacctaattcatgagcatttccaagtaaattggccttgaaaatacagattcgactcagctgatctcattgacactgatgatcaggccacaatagttggctcattcacactgcacaacacatttggcaagtgatctggatgttcaagtcctctggccaatgtgttttttcctaaattcaagctatatgggtactcaagtaataattagaaggttactttcttaacacagattcaaaacaggaagagcttatttgtaaacttaatcaacccaagagagctcttatatgttcaactccacagtagcaggcatgaaaagggaccctgcttctggtttttctctagccttatggcaaaagatagaccaaaagaaacaatatgggttcatatacactggattatttgcaatgctcatagctgtatcagcgagaaaatcagcaagcaaacatagtgcccacatgtgctactcctgtacagaggcttggtaaatcccatttatataccacccacatttttggctatatgatctcccactctttaaaaactctattcaaaatccagctaaactctatcctgatcccttctactgggtagaggtactatgaccttgctttgctcagtccctggttagtacttatttcatttgcctatggattttgttgctataatgtcattaacatgaagaagattgattaccacagcaattaagaatgattgcataggggttcttaactaagacctctaccttcttcatccaactccaagtatattggtttacttcatttttattacaagaatatggtatcatcgtagctttatattccttatttcatctatgtcatcatacctttaaataaccaagatatattctcctaaatccactatttagtgaattctcagtttactaatatagcatgctcagtatttccaaacaaatatgagataaaccttgctttacaaacaaaaccaaatacatttgattttctaattgcttaagcttatttatctactctagaatgatagagctactctctgttcaattttgattagaactgaattaggcaggaattattagatccaaggcactctttctctgttccagtgtttaccctgtgatttccctctgtgtctttacagtttacatctttagcatttatgtcctcttctaacccttattcttttataattcctttagatgtagccataccttcattcaagttaaagacaagcctttytgaactggaagggcttttttctatttaatgtgaatttttatataaatgttgtgagacatcaggtgttggttttatgacctaaatctccatggataatctttcaccttcctcactttcaagttctaaagtgacttatttttatgctccatatacaaactagatatagaaaagcctgcctagaattcaggcatcttgagtcccagccctttagccagtaatggttcaataaaaagaactctgagaatggaaaacagaagcctgtggtctagctctacaacatgtcaacaggcatttgactgctaagcttcagtggtctcatctgaaaatcagggatattaatatctttcctttctattgtaagatgttgtttagagaaatctgtgatatataagacataaaaaatgctttgtaaattataaagtcctttacaaaggtgaaataccaaaatatttgttttcagcctaagtggttgcaaaatgactttgtcattcaaatatatgtatgcacatatgtagactatttataattgctttgaaatatgcactaacttctttggttaatctttcagaccccttggtcaatggtgttctggcttacttatgaaaaaatcagagagatgagtggagtcagtccattttaaacccctaaagatgcaacccttaaagatacagtgttcagtattattgaaatatgggcatctgcaacacataccccctattatttctacctctttaggaagacacctattccacagagactgatttatagggggcagcactttatttttttctggaaacccaagttctctttgactcctctttttgtccaaaagtgatctggtcggatctcacaaggccatccaatgagaccccgcacagcattttctaaagaagaatcgaagcctgaccactttcaccttgggcaagaaggtttggcctttgagttgctattctatgctgaagagcctgcttagaggaggagtaccaggagggagccagcatttcagatctgaagtagacgataggaatgtggaagaacacatacatagtgcttaagaaatacatttaacctgttatgtcagtatttatcaatgaagtttgataattcacttttctgtcattgttaaagcgtacatactgtaaattaaagggaggtgaatggaaattaatgaataaacattttgagtttccctagtgttgaaggaaggtgtactttttcttgtcagaaagataaaaaaaatcaagttgagatgatgtttgaatttcaagaaaagaggctgctttctgtcagtgccctctcattagatctgtgttaattagttagyactccactgcacatgctaatgacttcctctgacagccacacaccgaatcttgatgaaaaaagagaagagcatttgccttgttacatagtctgttacaagccagatatgttgctagctctcaagagttgtaatatattaagaactacaacttatttgattaaaactcagctgtatagatccttttataaagcaccttttgttaaacatcagcctttcattggtattttaaaagcaaggcagatagatatgaagtcagccaactctgacatgcgtcctttcttatctcccttacctgacactaggggctctagagaggcagagagagcactcacaaatcacactaaaactgccagcggcctgactcttactcagtttagcaaaaattcttgcctaaaaagtgataagtaaaaatctgtttatggtatacagttatgtctcgaatctttgaatcaaatccatgttcttattttagaaaggtaagagttcttcaaattcagctacataccaccggctctcccaacctcagacggtgggcatttctggatggatggctgcggttatggataaaggctgtaactgttaacacagaaaaacatgaaaagctcaggcccaagaaaggccttggagccagccaaacagaatttgttctaatggacatggatgatgttgaacagaaaaaagtttacaagtgctttgtggttgcactaatgtatactcactgccattttaagagggggaagtacattttaaaatatatttgaatgtcatgtactgatatgcagtagcttattgtttttctagttgcagagaatgtgaagtttaatctcttaaaatatttagatggtctactttttcattgaatttgtcaatatgtaattgcgttgtaaaatattatatatatatatatatatatatatatatatatgcttaacttcccaagtgttctgcattgaaccacttagggaaaattttgtttgtttttatgttttgtaatttttaaaattaagtaaagactggatcaaaataattgcatccaacctggaccgtgaacaattgatttagctttattctttgtggggtcggggagttgggatgaaaacactgcttacgcactgacatcattccttgggatctggatcaacacgaatttcaggaacttttaacctgaaatgactccttgggattatctaatttaaccttcccatttcacatgttagtaaactgagattcagagaagtagagttgtttatgctcatgagtgacttagtagcagagccaggataaaaacacagttctcctaatatgattattatgactgagagttattgttcactaattaggtaccaaggaagggtcttatgtcatggtcacaacccagtagagtcttctaaaaacagatttttccttatggcatttttatgtctcatacattttagatgaatctgaattgtctctagcatacattttagaatggagtcaccatgctttagcttgaacatgaagaccttctataacctaaccaaatccagtatacccaatacttatccaatcacattcataattttctggtgaaatcatatctactgattattttggaacattgcttatttttgccaacttggaatcatcttgttttccaaaataatcctcagtaaataaaaaggattaaaaatttcagtaatttttgtgtccatactcacagacttaagaattccaaactcacttacttatagtactactctatgtggtatttctctattttttctcctctcaaatgatttttttcttactgaaaatgcatatacttatttttaattatgtagttttttatatgtataaatgaattagtatatataattatagactaaatttgccatatatgatataaattatatatgaattaatttatatataattaaagggataacatttattaagtttgctttcaatatggaataacatgtctttttcaagtgctcccaatactatttgattgtaagctactagtgggtaggtatacatcttccatttttatataaatctctgctctctttagtagcatttctttgctattaagaaaaaatgattacagctacgtataacatgaatcaattaattttatctttattgttttaagaatctgtgactggccaggcatggttgctcatgcctgtaatcccagcatttcgggagaccgaggtgggcggatcacgaagtcaggagatcgagaccatcctggctaacatgatgaaacccgtctctactaaaaatacaaaaaattagcggggcgtggtggcgggcgcctgtagtcccagctactagggaggctgaggcaggagaatggcgtgaacccaggaggcggagcttgcagtgagccgagatcatgccactgcactccagcctgggtgacagagtgagactccatctcaaaaaaaaaaaaaaaagaatctgtgactatcatatgagtctgcaatttctcttttactttgctaataaaaaaataaaaattcaggacaatataaatatgaaaggatttgttattcagtcatcttcaaattttcaagcacatttatttacagttgttataattacatatattttttctattaatgaaaacaaattccttcaggactttcctagaaaaaatggtcaattttaatacttgatggttaaaacaatttctttggaaaggaaaataagtaattcttttcttcccaattaaactgagactctttaaagatgactacccagcaaatatatattattattgaatgtcagataatgtggaagaaagactgaacccagaatctaaagatctttatcctattttgggttctacttctgacagaagagtataactaggatcaagtccctccacttctctgaattcccatttccttaaaagctgaagtgggacgggcgcggtggctcacgcttgtaatcccagcactttggtaggccaaggcgggcggactgcctgagctcaggagttcaagaccagcctgggcaacacagtgaaaccctcgtctctactaaaatacaaaaaattagcatgcgcctgtagtcgcagctactcgggaggctcagacaggagaattgtttgaacccaggaggcagaggttgcagtgaactgagatcacaccactgcactccagcctgggcaacggagggagactctgtccgtgaaagaaaaaaaaaaaaagaaaagctgaagtgattgaactctagaatcttaacctgtgtatacctaaagggagccatattgatgtgatgtttaaaaaaatagaattttaaaaatgtcattaggattctttatgcttgggtttatattctcatatttcaagatggggaaaaattattcagaccttaaagtacaatacagacttctgacgtgtctggactgtcaccctgaaatccattcttcacagggaagcacagtcgtcttccatggggcaactttgggcatattctcaccttcaatttctcctatatacacacatactaaaaattaaaacctttaatgctatatccaagaccctctcaacctgactccagcccatttttctcacttttacctttcactgcatacctgtaccctacctccttggaaatgcattgctctaattatttccctggagatgcactatacttgctgcttttctatgtagtttattctgttccctccatctacctttcttcccaccaccaccacctattcatctttatttgtattggttaaattctacctcagttatctaaaataatcacctactatttcctctctgaagccttcagtatcttcagtaccccctttctcccactgcttcccctactacatagatgtacatatcagcgtcccctacacaaaatgtattgcttgaaagcaaggaccatgtaacacatctttgtatcccttacaaacttcaaataggagccactctgaaggtatctgttgaattgagagggttttttggagagtggggagaaagacatttatacacatgattaaatcattttgttctcttcttcagaataattatgttgggtcaataacacttctgattttatgaaattttttaccatattaaatgcttaattatgtttttaaatgatcatgtgtgtttaaaacatgtcataattttaaggatcatcttcatctgtttaatagctattccataaaattgagaatttgatagttttaaataatatataattgactaacagttaataaatatgtgattttaaagcatgtatggaaattatatcactatttggccttcattgatgccatatacatgaacattttacccactcaagtgttttattatttctgaattttgaggaatacattattttcttctctccccatactttacccccaacaggctgctgtgattgtcaacagcagcaggagccagttgaaggtttgataaaagcagatgaagatgcttaaagatgtctgtttgctgaaaatatctggtaacaaacaggaatatatgtgagtaaataaactgtgttattctgattttaaaagtaaatattttaaagtgcctaattgcttgttatcacgggttttgttttgtcctgatatagttctgagttaagaaggtaataacaaggaaggaaatacatgctacagcatggatgaaccttaaaaacattatgctgagtgaaataagccaggcaaaagtgaatacatacatgattctacttgaggtactagaataatgaaaattcataaagacagtttcgaatagtggggagggaatgaggagttgtttagtgtgtacagtttcagtttgggatgatgaaaaaaatctggaaatggatagtggtaatggttgtacaacaatgtgaatatatttaatgccactgagctctacactttaaaatggtttcaatggtaagttttgttttacgtatattttaccacaataaacagaaaatttaaaaatccatgtacgtagatgtgaaaaatattagcaaattgaatccagcatcatataaagtataatacatcatgactaagtgagacttatcctgggaatacaaaattggttcaacatcctaaaaaatcaatataattcatccaattaacagaacaaaacaaaacatatatcaacagaatgtgaaaaagtatttgataaaattcaacagtatttgatgtaaaaattctcaaatttttacatgagtaaaaaagaaacttcctcatcttgataaaaaggatctaagtaaaacctgtagctaacatcgtatttgtgaaagactttctccttaaatcaggaacaaggcaatatcaattcttaccattttattctaatctgtactgaaggtcttagccattgcagtaaagcaagaaaaggaaataaaaggcacatatattagaaaagaagacatggaactgcctttattcacagatgatataattacatatataaaaaaaatcccaaggaatctaccaaaagctacaagaattaataatgaagtcctagcaaattcacaagatataaggccaatatacaaaaatatattttggtatactggcaatgaaaaactagggactaaaatatttaaaaattaatattatttacaatagcataaaaacattaaaaacttagggataaatctaacaaatgtgtacaagatttgttcactgaaaaatataaaacattactgagagaaattaaagattttagtagagcaatgaactgtgtccatggattaaaagactcagtattgctccaaagttaattattgtcaaattgatctctacctacaaagcaattctaataaaaccccagcagccttcaaatttttttgcagaagttgacaagtatattctaaaatacatatagaaaatcaaaaacaattttgagggaaaagaacaaagaggattcatattacttaattttaaaattggcttttaagcagtttagaaaacaatcaaaacaaaggggtattggcacaaagacagatatatagattgatggaacagaataaagggtcaaagaataaactcacatacatatggtcaattaatttttggcaaaagcaccaagataacttaactggaaagtatagtctttgcaacaaatggcagtataacaattggatatccatatataaaaataaaatcctcaacccttacctcactacaaaaagttaatttaaaatgaatcatagacctaaatacaagagccaaaattataaaacttctaaacaaaaacattgaaagtttgttttgtgggtttttgttttgtttttttaccttgggttagtaaaagatttagtggaacaataacaacaaaataaactaccatttagaaaagaaaaatatgtgaataatttgatttcatcaaaattacaaattttcttcaaaagacactatttaagggaataaaactgtaaacatttgtcaaaatatcaaactacaatatgaaagtgtgagttttactgtacaaaaattatgcctaaatagaccaaatttttaaaaaacctaatttaagatttttaatctttaagaatcctaggagagaacatattttttaagttttaatttcattcatatcactaataactacaacttattacatgttcctgtggtgggtcttttacccatattggctcatttcgtcttcatatttaagtatagttccatttttatagatgaagagaacctaactctgaaaattttattatccatgtcaccctgagatgataaacatggactttcaaaatctaaagcccttcctttcccactatgttttgctgcatctcaagtatttatttaatgcaaacatgttaactgtatttacattaattcatgcagtccttggaaccaaagtgtaaggtgtatgccgttatatccattttcagatatggaaacagagggtaaattatttgcctgggtcacatggctcttacaaatggaggccaatcctgctgtaattcaaaagactatgctctctctac

SEQ ID NO: 96386 - DNA, 22612 bp, Homo sapiens
cccggttttgtgactagggatagtgtttacaatccttcttcctcttggctctttcagcatgaaagcccctttaggggaggtgactggaatcatccccaaagaattctcacctagtcctggtgtggctgcttcatagtcctgcgtttcttcctgcttggctgtccctaacatctcagaaacgcatagagaagtaacgggcttctagagaggtagggggtatagtgttacaactgaggatttggaagttgagaccacctggttctttaccatccactaaccatgtgaccttatgcaatttattcaactgttctgtgctttgttttcttatttacaaaatgagattaatagtatacagtagtaaatatcataaagggtagtgtgataaatgagctgatacatttggaatggaggggaatgactgttacatagtgaatgctctgtgtatcctcacacttgggaagtatatgtaatcagtgtatgtagtgcttgagggattgtgaataatacacaacatatcctcagtcatcgattcaacagatgtttattgagcatctactatgtgccagtccctattctaggtctgagaggatatactggtgaactgctctaatagtttatattccagaggagagaatttgacagtaaacatgtaaccaagttaataagataatttcagataatggcagatattatgggttgaatgatgtcccccaaaagatgttgaagtcctaacatctgggactaacacatgggaatgtgaccttttttggaaataggatcgttgcagatgaggtcattgatgttagccctagaccaatatgactgcgtccttataaataggggcaatctggacacagagacagacatgtaccgtgtctgagggaagatgatgtaaagagacacagggtgatctgtaagccaaggaagacctgaggctaccaaaagccaggaaagaggtctggaacagatacttctctggctcccttagaaggaacatggtcctgctgacaccttaattttggatttctggcatccagaactctgagacaatatatttctttggttctaagccatccactttgtggtactttgctacagcagccctagaaagctaatacagtaggtaagaaggtgatgtgatagagagtaagtgggggcagggtgggaggagctgcttcaactgggggattcaggaaggcctatgttatctggaaaccactgagggtggtaagtagggaagagacttgactggctgacttaaaaagaaactatttacggggggatagaatacataggggaaaagacacaaatcatacatgtattttcaatgaatttttacaaaatgaacacgtcaatgtaaccagtacccaactccctctcccatgccaccctctaattgatgcccaccctaagggcaaacaatattgtcaattctaacaccctagattgagttttgactgttttttgaatttcatgtaaatggaatcatacatgacatactcttgtttcctttcgctcatcatgagattcacccaccttgtgtagttttagttcatacattctcaatactttgtagtattccattgtgtgactatattaaaatatagatatctctcttgctgttaagaggcatctgggtagtttccagtttggtctattgtgaatagtgttgctatgaacattcttgttcatgtcttttggtgaatatatttatgcatttctcttgggtgggtccctagagttgaggtttctgggatctctctctctctctttctctttctctctctctctttaggtatattcagcttgagtagatgctaccatctctgtggctgacatattagcagattattttgagctggcctggtgtgcacctgtaatcccagctcctcaggaggctgaggcgggaggatcacttgagccaggagttcgagaccaacttggacaacatagcaagaccctgtctcagtcagtcaatcaatcaatgataaattttggtgctgagtgaagaacagaatgtgacagttggtggggggtggcaagagtggaaatggagagaccagataggagcctattgtaatagtcctagcaaaggatgacagtggctttggccagggtaacaagagatggaggaaagcacactcatacaggatgcattatacagggaaagctgacaggacctgctgatgggttgaatgtggagagacgaggaaaagagaggaatcaaggttgactgttaggtttttggtttgaacaactaggtggacagttatgtcaattactgagatggagaagaataggaaaataacaggtgtgtgggagaatcaagaattctggtttggccatgttaagtttgatatgctcattaggtttccaagtagaaacatcaaatagatggttagaactcagtgaagatgtcagatgggagatacgaatctggggccctcaaatcagcatacagatttttttttttttttttttttttgagatggagtttcgctcttgttgcccaggctggagtgcaatggcgcgatctcggctcaccgcaacctccacctccccagttcaagtgattctcctgcctcagcctcccgagtagctgggattacaggcatgtaccaccacgcccagctaattttgtatttttagtagagacggggtttctccatgttcaggctagtctcgaactcccaacctcaggtgatctgcctgccttggcctctcaaagtgctgggattacaggcattagcccccgtgcgtgtctggccgaatacagatgatacttaaagctatgaacatgcatagatcctcttttttttttttttttttttgagacggagtctcgctctgtcgcccaggctggagtgcagtggcgcgatctcagctcactgcaagctctgcctcccaggttcacgccattctcctgcctcagcctcctgagtagctgggactacaggcgcccgccaccacgcccggctaattttttgtatttttggtagagacggggtttcaccgtgttagccaggatggtctctatctcctgacctcgtgatccacccgcctcggcctcccaaagtgctgggattacaggcgtgagccaccgcgcctggccgaacatgcatagatcctcttagggagaaagtgtaagcagagaataaaggacctaagtctcctgaagcatgccaccattaagaagtggagcagaggaggaagagccagcaaaggaaatggggaatcactgttgaggctggagaaagatcagaacaggttgctgtgtgtattttaagaaggggagtggctaatatattgagtactactgagagattcaaataagatgagaggtgaccactggtgtcaacatggtagtcattggtaacctaacaaaaattatatcagtgagaaagtggggttgagaagtctgattagagtggattggagtaaatggggcatgaggaagtagagtaagagacaataaataattcaagaagtcttgccaggaaggagagcacagaaagggagtaacagctacagaggaatctggattcgggggggagttttctcaagataggggatattggttatgtctggaaatgacccagcagaggatgtgatgtaggaaaaagaggggctaatcatgggcacagacatgggattgagaaagtcaaaggggatggaatccaaagcacaaaaggaagagataggaacaggtttgtttccttcaatgaaagaggaaaggcagaaagtattttgcagattggcagatttggtggtgagatgatgaggtagttctcatctgcttctgttttctcaataaagaatgagcccaggccataagttggaggtgggagagaaggaatactggaggttcagggagatgagaaagtatgatagtcattgggagggtgggagagcaaacttgtcaggagcatgtagtaggagctcaggcagtgttgtgcactcatttgagattttgggacatgaatttaaaattagaccagtcatcagtgatcacatgtgacttgtaagcacccagaaatgaatagttattgttaagtgtagtggtactctccagttgttcactgaataaacaaatgaatggagtattatattaaacacttggatggggaggaggaagggaaataaagagaatgtgtatctgtcttataacctacttgaaggagacaaaacataattatttgagaacaaagcatattttaacaggcacaaacatattagcttttccagttgatgttataaattctgactggaataagaatagtggcatacttaaaatagaatggagtaaatgtgggaaataattcctgaagtttcaaatcggatctcaaaagttcccagggaaatgtgttaacagaaaacatgtaaaagggggaaaactgatagagcatgatgttatatgtggccttctataagctgaaaaggactttgagcttgaaagcaggaatggaaataattactgtaatttaaggagtaacctcttcatgctaagcattaacagatcacttacttacctgacagtggctactatttattttgtgtctaagcactgtgctaattgttttacatatattatttctaatattcacaacactacaaaattacatactattatttattactaattattaaaattccatcttacagatgagggaatcgagactcagcatttcaataatttgcccaagattccagttagtaaggagctgaggtgggatttgaagcccaggtctctgatcccaaaggccatagtcagtcttctgtgctttactccatttaattgtgtattcccctcattttcctagcacttagtagagaggccagcctaggataaatgttcaacagcaagagcgaccccaaaatacaaatctgatgacctccttttgcacttaatctagattgtttactaacaaccctcctcaccctcagctcactagtctttgtcttcaagacaatctctttccttccctagagcatttgcctgagctgcccttatacctctcaaggctcttctcactctttccatgctaacctctttatatcctttagatcacagcttgcctgttcagaggccttccttggccattcgatctaaaatagatctctcgtattttctatgtcatccactttttccctaacatttatcaaattttgcagttaccttgtcagtttactttctggtgtttttccaatattatgccccatgggaccagcgaccttgaatcttgtttgcctttgatttcccagagctgtgctcttcaatacagaagccagcagccacatgtggctactgagcactgtactacaaatgtggtgttgccttattgagatgtgcagttaagtgtaaaatacgcactggattttgaagacttggtatgagaaaagaatgcataagatctcgatttttaaatgttgattacatgttgaaatacttgtataaactgggttaaatgtatgactaaaattttcacttgttttactttttaattgtggctactagaagatttcaacctacatatgtgactcacatatttctagaatctgacacagtgccctgccccattttattgaatgatatatccaatgtcgagagagagagatcgaatgaatgggtgcatgaagaggtatagtctcatgcttccactaggcaaatagatacagcactgccgtagaagttaggagatctgggttctggctcaggatgtactggaaacgccttggacaagccctaccctactctggggatcaatttgccaattaggtagttgatctttgaggtctggaagcttacgagaatcagttggcagggaaatgtaccaggaaagcttggtacaacggcgcttgtctttttcgctctagcctaaacacttgagcctcggcaaacgggcagaggcagcgggaatcagggactacacccccgaacccagtacccgggtccccgacttccccgagcctacgtcactggggcgcgacggcgttgtccccgggagtgcagcggctgagaaggtcccttcggtgaaggcgagttccgggacaacagagagggccgcaccgtttccgagtctctcggaggctcagttctcagcgcaccattccccacagctctcctttttactttacccctacccgacacttgaccccggcagtgtgaaccccgctgggagcgtccaaagccatgcctcatcgcggctgcgcagcgcacgtgcacagcctcgcaggagtctcggcgattggctgtgacgcagtttccggcgtgagcggcgaaagccgggagggcgagcgagagagcaagcaggcagcaggctgccggcgggcgggcggacggcacagagggagggagcgagcgagcagtgagtaagccagcaagggcggtcgggtcccgaggtcagccgagatttctcaggtccctccggccccctccctggagtccacagcgcctccggtgtccagaggatcggacacggcccggcccggccatggcctcgttgctgaaggtggatcaggaagtgaagctcaaggtagcggcaccggtccggcctttttgyccctcgctttgatcccccagcagtctgaccggcttcctactccccatggcgtctttgtctccctggggataccasctctgagcttccgctcggctcagcccagcccccaactcccggggtcggcttcgcgggagaggaaaatataggatggctttctgtaccgcgtctgatgatggagagtcccggggacacctccgcggacacgtgttggactcagggctttaggcccgtgacagctggtaatcccccagcccaacaacgtccctggacactgcccctgcccttggcggctggcctgcctrgtatcatagactaggtctgggtgggggttggcacgtttgtgagctcacatcttccctaactacctgtcttttgtctgcttatcaaattcagacagcttcagacacaggaggaagggagggaagggggaggacagaggagacaggcaggtgctgtcctcaaagccctgcgttcttctgagatggaaaaatggatcctcaaaaaaataaagtatttgcagtctgggggcctctcagcttcttattacagttacaaggtgagggaaagacagttggattgggattctccatcctgctcttacctctgtccccaggtactgaattgctctctttgttaattttaggttgattctttcagggagcggatcacaagtgaggtgagtgaaataaatagaaaaatggttgttggttgagaatttcccaaagaggagatacctggagagagagagrgagagagagagagagagagaccttcccacagatattaattcagctgtattttccctcttccttaggcagaagacttggtggcaaattttttcccaaagaagttattagaacttgatagttttctgaaggtgagagaccctattctttcctcaaattccccaatttttttggccctggtattactgtcaactgggataaactgttgattcttcttctttttatttttttaaactgtaaaagcactttcatttcttgctcttcaaatcaaatacttctttgttcagcttgaaaagattaatgttttggggtgggtgtctttcaggaaccaatcttaaacatccatgacctaactcagatccactctgacatgaatctcccagtccctgaccccattcttctcaccaatagccatgatggactggatggtgtaagtgtcctatatttatctttgtgttcttgagcagtaggtcctctgtcctctgtttccttgtcagtttaagatgtacagagggaacagtgggatttggatctgggaactaggactctgttacagacatgatgactctagtatagttcttttatttcttatttatttatttatttttgagaaagggtgtcactttttttgcccaagctggagtgtagtggcgggaatgctgctcactgcagccttgacctcccgaactcaagcgatccttcctcctcagcctcgcaggtagctgggactacaggagtccaccaccatgcccactgatttttgtattttttgtagagatggggtttcaccatgttgcccaggccggtctcaaactcctgagctcaagtaatccacccgcctcagcgtcccaaagtgctgggattacaggcgtgagtcactgcacggggactccagtatattccttttagaccctcagtttcatttacgacgtgaagtgaatgtgctaatgctactgtcagtgttrgagtgagtttcaaataaaagagaactagcttaggccaggcaccttggctcacgcctgtaatcccagcactttgggaggccgacgtggacggatcatgaggtcaggagatcaagaccatcctggctaacaccgtgaaaccctgtctctactgaaaatacaaaaaattaactgggtgtggttgtgggcccctgtagtcccagctacttcggaggctgaggcaggagaatggcatgaacccaggaggcggagcttgcagtgagctgagattgcgccactgtactccagcctgggcgacagagcgagactctgtctcaaaaaaaaaaaaagagaactagcttcatcaggttacctggtttttcccatggctctgaacaagactttgcttatatttgtttgcatgtcttgagtagtgttatgggatatgcagttctcgctatgtaactgcaattgctatctttgctttgcatctctaacacctagtccttatcagtcatgtgtccacatgctactataacactgatgataccgtattgttgtctgtagtactgcctcattgttgaacttgtacatctggaaggcaggaactatctttttttttttttttttttccttgagacagagtctcactctgttgcctaggctgggtgcagtggcgcgatctcagcttactgtaacctccgcctcccgggttcaagtgattctcccacctcagcctcccacgtagctgagattacaggtgcacaccaccacgcccagccaatttttttatttttagtggagacagggtttcaccatgttgtccagactggtctcraactcctgacctcaggtgatccgcccgcctcagcctcccaaagtgctgggattacagccatgagccatcgtgctcggccggcaggagctatcttaatctttgtattcccagcacctagtgttgatcctggtccctagcaattgctgaatacatgtttgttaactgaataatgtgttcctttgtggaaccagcagatttgtacgtattcccttaattatcttccctgctttgattggttcttttttcctattctttataatacttaatgtattgtgtttctggaaagattggtcttcccaactagagcgtaatttgctttgtggtaagaaccttttctttctttctctgagggggaacccagtctcactctgtcacccaggttggagtgcagtggcttaatctcagctcactgcaacctcaaactcctgggttcaagtgatcctcctacctcagcctcccaggtagctgggactacaggtacatgtgccatcacattcagctagtttttgtattttttgtggagacagggtttccctatgttgcccaggctggtctcaagctcctgagctcaagcgatctgtgtgccttggcctcccaaagtgctgggattacaggtgtgagccatggcgcccagcccaagaaccttttctttatttccttttttttttttttgaggtggagtttcactcttgtcacataggctggagtgcagtggcacaatctcggctcactgcaacctctacctcccaggttcaagcaattctcctgcctcagccttccgagtagatgggattacaggtgcctgccaccacacccggctaattttttttatttttattttttggagatggagtcttgctctgttgcccaggctggagtgcagtggtgcaatctcggctcactacaacctctgcttcctgggttcaagcagttctctgcatcagcctcccaagtagctgggattataggtgcttgccaccacgcccagctaatttttgtatttttagtggagatgaggtttcactgtcttggccaggctggtcttgaactcctgaccttgtgatccacctaccttggcctcttaaagtgctgggattacaggcatgaaccaccgcgcctggctaactttttgtatttttagtagagatggggtttcactatgttggctaggctggtctcaaacttctgatctcaggtgatctgtccacctcggccccccaaattgctgggattacaggcatgagccaccgcgccttgcctccaataacctttcttaaagctttgtatgtacttaggaaattgtgcagaaattaataacataagctatgaggctgaggaagggattaaacttgcttgaagggtatcttgtgatggagatgtgggtgtcaaaactaggctcatccctgcctctttgtatccttagcccacttataagaagcgaaggttggatgagtgtgaagaagccttccaaggtaagaggcacccttacctcacctcccctcaccccatccctgacttgcaaccctgagaagcaggatggatctagtgttctcctgaccaggaggcaagatctaatcttacttcccagaggtagcattcccagctcctccaaacgtgcttgttattgagtgctctaaacctggttttccaataaacagaggatttaagacttttgttatgttttagacgctcatctgtagttctttttttccatacattctcgttgattctaatagtggtgtcatggtaggattgtgacaaaggcagaggtcatagcatctgataggtatagggaaaatgagagagaggcaggggatgctgtgtccttccctcttccctgatcatttgaccttcacatctctgccaggaaccaaggtgtttgtgatgcccaatgggatgctgaaaagcaaccagcagctggtggacattattgagaaagtgaaacctgagatccggctgttgattgagaaatgtaacacggtgaggcacaggctggtgacctatgggccggccccaagtaccccacctgaagtgcaaaaaacagtggatgtacgggtggtatgggaattggcagactaggtttttttgagttttttttttgagatggggtctcgctccatcacccaggttggagtgcagtggcgccatctcggctcactgcaacctctgcctcctgggttcaagtgattctcctgcctcagcctcccgagtagctgggattacaggtacctgccaacacacccagctactttttgtatttttagtagagacggggtttcaccattttggccatggttagccaggctggtctcgaactcctgacctcaggtgatccacccgcttcggggtcccaaattgctgggattaccggcatgagccaccatgcctggccagactaggtattttgacttctgtgttcctggcatctggctccagccgtctgaattgtgtacttcatggcttcagccttcaggcaaaggtcctcatatatgttttgacctccaggtcaaaatgtgggtacagctcctgattcccaggatagaagatggaaacaactttggggtgtccattcaggtaatgtacttgaattacatactgggaagagtggcttgggagatactctcatctcccctgcgttacctttttttcctttttctttggggctgctgtggatgacatggaagtggcttttgatgcacctgttgtttgtttgttttaggaggaaacagttgcagagctaagaactgttgagagtgaagctgcatcttatctggaccagatttctaggtagggctgcttgggcttggccgaggcgttgggggctgatgaggtggtgggcaccatcaagggtctcctgcatcttcctcctcttctctctctttccagatattatattacaagagccaaattggtttctaaaatagctaaatatccccatgtggtaagtaaggggtttgtggcctgagggtggaggtggcaggatagtgaagagtgactgttactgggaaggagctgtctggaaacaattgggctttggggactagctttttcctgtaccctccttgcaggaggactatcgccgcaccgtgacagagattgatgagaaagaatatatcagccttcggctcatcatatcagagctgaggaatcaatatgtgagtaatctcagtccttgtccatagttgctgtggcttctcttagttctgttgagagtattgttaaaattctctgaagggctgagatgagggtctgaggtaaaatgaatagaccaaattctattcatcacctgagtgttgagaaccatgaagtcatctagcagggtatctctcttttttctacctgagtggaggggtgtgcagtacaatatggttaagatataggtgtcagagtcagacagacttaggtttgcaaccaggctctacctgtgttgtgtgacctcgagcaaattgttcaagcttaaacttcaatttcttctttaaaatgggactgggctgggcgcagtggctaatgcctgtaatcccaccactttgggaggccaagccgggtggatcacctgaggtcaggagttcgagaccagcctgatcaacatggcgaaagctcgtctctactaaaaatacaaaattagccgggcctggtggcacatgtctgtaatcccagctacttgggaggctgaggcaggagaatcacttgaacccgggagttggaggttgcggtgagccaagattgctccattgcactccagcctgggcaacaagagcgaaactccatctcaaaaaaaaaataaaaataggctgtaatcccagcactttgggaggccaaggtgggtggatcacttgaggtcaggagttcgagaccagccttaccaacatggaaaaaccccatctttactaaaaaaaaaaaaaaaaaatttagccgggcgtggcggcacatgcctttaatcgtagctactgaggaggctgaggcgggagaattgcttgaacccgggaggcggaggttgcagtgagccgagattgcgccactggactccagcctgggcaacaagagcgaaactccgcctcaaataaaaataaataaaataaaataaaatgggactgaagaggccgggtgtggtggatcacacctgtaatgccagcactgtgggaggctgaggcaggtggatcacatgaggtcaggagtttttgaccagcctggccaacatggtgaaaccccatctctactgaaaatacaaaaaattagctgggcatggttggcggacccctgtaatcccacctaatcgggaggctgaggcaggagaatcgcttgaacccaagaggtgtaggttgcagtgagccgagatcgtgccactgtactccagcctgggcaacaagagcaaaactccgtctcaaaaaaagaaaacaaaactgaagagtacctactgcacaaaattcattcgcttttttaaaataagtgagataacacattgaaggacctggtacaattcttactatgttaagtgcacaatacatgttagttgttattagacacttggggccttggaaatacccatttatacccagttgaagtataagagaggtggtgctgccaccctgaatgcaggctcaagtgagattaaaattacagtaagttggccgggtgcagtggctcacgcctgtaaccccagcgctttgggaggccgaggcgggcggatcacgaggtcaggagatcgagaccatcctggctaacatggtgaaaccccatctgtactaaaaataaaaaaaattagccgggtgtggtggcaggcgcctgtagtcccagctactcaggtggctgaggcaggagaatggcatgaacctgggaggcggaggttgcagtcagccgagatcgcgccattgcactccagcctgagcgatagagcaagaccgtgtctcaaaaaaaaaaaaaaaaaaaaatacagtaagtcttcacttaatgttgtccataggttcttaraaactgcgactttaaaaatgatgtatatcaaaaccaagtttttttttcattaacattgtaacaaaatgacatcgaacaaaatgatgttatttgaaaccaggttatttgaggaccttctgtacttgatttgcttacctgctgtactttaatttccttcaagtcgcagttgctaagaacctattgatgacattaaggacttaccgtatgcagatgattgcttggggatttgtgaaggggtctctcattttcttgatgaggtaagggttgtacagatatgtgattcccctgatccctcttctctcaggtcactctacatgacatgatcctgaaaaatatcgagaagatcaaacggccccggagcagcaatgcagagactctgtactgaggccagggccagggccaggggactctgtgagtctggctcaagaccgacattgccttggtttgttacatgactatcgtgatggggaaactggctggaaatagtaatcacacctctctgtttttagttagagtctaatgaaactctcatctagttctgtgatgtgtttacctcttttttcaggcctcaggaactcttctatttccttccctaataccccacacccaacctgtcgtaatttctggagaactccaggtttgtgtgtgcaggatgttggcacaaaaatacctgtgttttcattctccccctctctccctcctgtgtcttgcgctttatgttttcttccgtttgataattagttggttaaaagctgagggaaccggaaggaaagtgctaggtgttttttaggaactagggtggcggggggacgaacttctcttcctcacatgaggttactgtttctttcctctgtggggcattggatcctcccacagttgccctggtgatgacttagggcttcccatctgtgtacatcccactttgaatcttgatcgtgacaagaaataccttaggccttcagtcaattccgaagctccttcagttgtttttataatgggcgttttcacatgcacatatgtgtatgcatgtatacgcccatacagacatgcacacacagactcctactccattagctaacataccctccctctccacaacccctgtcacatacctttcaggaggtgacagttgtcttagttgtcatctacccagacaaacgtcctgggcccgtcctccctcctgatactgtagcctcttggtacccagggtgagttggtggagaacagagagatgagaagcagagggcttggggaaagcctgttcctctctgactcagccctttttggcattattgcaagagcttgactcctggttgccttttcccagccagttttcagttggggtgaaggtttctgcaagtgtgaggtccagatgctgctgctcatgttgggctttccttttgggaactatttctctttatttatagtgtcgggcttccggggaaagcaatcattggtgtgtatgtgtatgtgcatgcacacacgtgcatatacacatttgtgtatgtggaaatgtgctgggcaagtcaaaactatagaagagttgcctcctgtctctcgaatcttccagagatatcacttaattgttaacagcttttgtgttaatccccttcagcccctagctcttttattctaccacggctggagagttgatacctgcagtcagcctgccagtgactcttagtgtctgtttctgacttatttttcctgtctctgtcttccaacccccaataatatttccaccggggatgcatcatttttactcccaatattctgtagagagggagtcaggatgctgtcttcccacgaatagtactcagtaacaaaccaattgcattttagttgggcagtgctcccacccaccctscagatcccttccagctaaaacccttcccccttccctccatgtgtttctcagtttcccgtttcgtttgttggactgttccactgcccctcctcctcaccctatcacccatggatcgtaatgtaaaattcttttaccatgtcaagaaattattaaaaatacaggtactttgacctctttctaaagccgcagaccctggtgcaatgctctggtggctagggatgtactcatgctcatatgtgtgcacgcttggacacccacctccatggacacctagccaccctgttgtgtgtccttatgccagttgagctgaatcttttccccagtatagtggaaagactgaggcttctgcctactgagcaaggttgggtgcttcatttgtgttcagtctgaattatgggaaagttagctcttcccagacctaagctgccttctctccctactttcagaagatcctagttccttccttcccgagtgatacccatgaactgccagtagaggctgctatcgttccatgtgtaaggaatgaactggttcaaggcgcgtcctacccagtcattttctttaccttatactaattcttcctgaataatgtcttcagtttcttgaggagactcctagttttggttttcaaattacttggagggctgcctaggaatctatctccctctgaaataaagtttcctcatcttccaccttgcaagtagccttctggtttccaatgatcccctcgttgtctctgtaaaaagagtttaaggtcttgaacaatggaggagcagctgctctgttctgtttcagagatgactaccaaaagctagcggtttgtgagtgcctcccctgtgccaggctgttaagtacctaatgtgcatgatcacatttaatcttcaggaatctataggatagttgtatctatttgttacagatgaggacactgagactcaggataagtatttccgctaaggttacacagctgagggaactgggattggtggacaaacctgattactaagcccaggccctcagccactccactggttggaaatggcctgactacaaatcaagggcttggcattaggcaacaagtagaattcagtgcttactgctgaacatggcagtgaatcctggagctgttgggatgcagttcctgccaggaggtaggaaaatggacagcttagtgcttgcatgcaggctgcagaacttaattgggcatctgaggtttgtactcttcctgagacccattccaggtggaaactggaggttagcatcgttaacccagattccctttcatctggtctaaatgatggaaatcagtagttggtactgactgctaccagtgggagttcaggggcaaggaagaggctatgcatgtggaagcagtgccctgggccaaaccacaggacagaaaattggaacagaattacataaatcaaggtcagaaatttcctgcccaacccatggggtggagttttctcccttcctatccatcctagcgaatataaaccccgacttgatgtcagtaactggaaggagcagctgttagaattctgatttcagctctcagcatccaccatgcatctcaagatagtcctggcgttcctggcactgtccctcattaccatctttgccctggcctatgttttgctgaccagcccaggtggttccagccagcctccccactgcccctctgtatcccatagggcccagccctggccacaccctggccagagccagctgtttgcagacctgagccgagaggagttgacagctgtgatgcgctttctgacccagcggctggggccagggctggtggacgcagcccaggctcagccctcggacaactgcatcttctcagtggagctgcagctgccccccaaggctgcagccctggcccacctggacagggggagccccccacctgcccgggaggcactggccatcgtcctctttggtggacaaccccaacccaatgtgagtgagctggtggtggggccgctgcctcacccctcgtacatgcgggatgtgactgtggagcgtcacggcgggcccctgccctatcaccgtcgcccggtgctgagagctgagtttacacagatgtggaggcatctgaaagaggtggagctacccaaggcacccatcttcctgtcgtccaccttcaactacaatggctctaccctggcagctgtgcatgccacccctcggggcttgcgctcaggggaccgagctacctggatggccctctaccataacatctcaggggttggtcttttccttcaccccgtggggctggagctactactggaccacagggccctggaccctgcccactggactgtccagcaggtcttctaccttgggcactactatgcagacttgggccagttggaacgggagtttaagtctggccggttggaagtggttagagtccctctacctccaccaaatggagcttcatccctgaggtctcggaactctccaggtcctcttccccctcttcagttctcgccccagggttcccagtacagtgtgcaaggaaacctggtggtatcctccctctggtcatttacctttggccatggggtgttcagcggcctgaggatttttgatgttcggttccagggtgagcgaatagcctatgaagtcagtgtccaggagtgtgtatctatctatggtgccgattcacccaagacgatgctgactcgctatttggatagcagctttggactcggccgtaacagccgaggcttggtgcggggagtggactgcccctatcaagccacgatggtggacatccatatattagtgggcaaaggggcagtccagctgcttccaggggctgtgtgtgtatttgaggaagcccagggactgccccttcgaaggcaccacaattaccttcaaaatcatttctatggtggtttggccagctcagcccttgtggtcaggtctgtgtcatctgtgggcaactatgactacatttgggactttgtgttgtacccaaatggggcacttgaagggcgggtccatgccacgggttatatcaacacagctttcctgaaagggggagaggagggcctcctctttgggaaccgtgtgggggaaagagtgctgggaacggtgcacacacatgccttccacttcaagctggacctggatgtggcaggtgagtgctgaggggatgaggatggagacttgggggcggggtcaggtggggtggagggaagggaagggaatctcccaggtcaagctgaaataacaagtggcaagagcagggtgttccaacaccacagctctagtggcaacagggcagggactgtttgagcatattcagtgcagtgagtctggtactgggctactgggtatctggtaaaaggtgaaaagagttcccccgcccagcccctctgacttgctatgattgtgaaactagtttaaatgtaatggctgggcatgattgccttagcctcaagtgacactgggtgggtgaactggcccaatggggctggagttggagcactttgcttcttcctaattctgagggtcagtaggggtggggagggcagggtcctgagccgaggtcggaagaagtctgtccagagtcttcagggtgggggtcgacctggggcttaggaaggagagggtagcaaagctggggttgctccccaggatagggccactcctcatcgggagggccatcccattcctgtcatcacagttgactcatggcaggcacacagcttgctgcaagtatggaaagagatttctcaagcacaaagggctcaaagcacacagaggacttgctgttcctgacagactttgtcaaggacagaaaggaacttacagactcacacactgatccacaaagaaaattagaaactcaccagaccctctccattttaagggaaactaaggagggtggcgggagatgggacaggaaatgactgcccaagtataatgcaacataaactagtatttcttgtgaaatgttttcttatcctcaagtctaaagacatggcacgtgcgtgcctgcgtgtgtctctgtgcatgcacttgcacttgtgttcgcagtggtgtggagggtaggaaggactaatagcatgattgaaatgatcatattaactagattactctttgacatacttggattttgacttgtcttctgattggaagtttttcttcagcatctttggcattaaagaggcttgttttgggaagtaacatttattggacccctagcgtgtgcagcatgggctgctgctgtgggccagagaggctgtgtcaggcaccagctcacaggatggctgcagaggcaccagcttcagtgcagtgcctcccgtgccaggtaccttcatataggtctcgttgaacttacagtccagacctgcagaaagtgtatgaccaagtgctgagttaggcagtgcaggttatggatgctgtagaattccaaggaactcccagacaaaggtatgaatgtgcttgcttctgaaaaacactgacagtacttcccaccttgctgagatcaaaagtgaagtctcagagctgggaggagtatgcaggggaccatgggaagggattgggttttctttttttgaggcagtgtctcactgtcacccaggctggagtgcagcggtgcaatcacaggttactgcagccctgacctcctgggctcaagcaatcctcctgcctcagcctccttagtagctgggatgacaggcatacactaccacgcccagctttttttttttttttgaagacagagtctcactctgttgcccaggctggagcacggtggtgcaatctcagttcaccgcaacctccacctcccaggttcaagcgattcttgtgtctcggcctccagagtagcacaccaccacacctggctaatttttttaaattatttatttatttaagtagagatggggtttcaccatgttggccaggctcatcttgaactcccggtctcaagtgatccactcgcctcggcttcccaaagtgctgtgagctaccatgcccggccttttttttttttttttttttttttttaagaggcagtgtttcattccgttaccccagctggtgtccagcacctgggttcaagggatctgcatcaccctgccaccagcctcctgagttgcaagctgccacacccggctcaggagtcagtttttcagctagcttctccaagacaaatatcattatccctttcatagttaaaagaatgtcactagtcagctgcaagtgcttttctgtttattgggcacagccatagaacagctttaattatgcccagtgtagggattcagaaagtgaatcagagaagcaaattggtccagggactgtttggtagtccagtgctaatagaactttctgtagtgatagaaatattccgtatttgagctgtggctctaaacaatagtcactagccatgtgtggcaactgggcacttcaagtgtggctagtgtgacagaggaactgaatatatatatatatatatatacatatatatatatatatatattttagacagagtcttgctctgttgcccaggctagagtgcagtggtgtgacctcagctcattgcagccacaacctactgggctcaagcaatcctcctaccccagcttcccaagtaactgggaccacaggcatgtaccaccatgcctggctgatttttttattgtttgtagagtcagggtttcaccacgttgcacaggctggtctcaaactcctgggctcacatgatccacccgcctcagcctcccaaagtgctgggattgcaggtgtgagccacctcagctggccctaagttttaattttcatagccacgtgtggctagtggttaccctatcggatagggcaagttggaagaagataggagcttgctcttgcccagacctcctggctcccagcacagtgtgctctgatgctctctctgccttttgtcacaccagtgcagtggacatcatggggaagacagggacctggcccagagaccttacctggtgtggaactcatctcctttccctccccctggcagggctgaaaaactgggtggtagctgaagacgtggtgtttaaacctgtggctgccccctggaacccggagcactggctacagcgcccacagctgactcggcaggtcctgggaaaggaggacctgacagctttttccttgggaagccccctaccccgctacctctacctggctagcaaccagactaatgcgtggggtcaccagcgcgggtaccgaatccagatccacagcccccttggcatacacatacccctggagagtgacatggagagggccctcagctgggggaggtgaggagggccctggcctgggtggaaggaaaggacagcccctcccctgccccagtccttggagacaaactcccttcccacggctaccattcatccctgtacctcccctcaaacccaagttagatacacggtgggaaatggtctcacacagaatcggatctaagggactcctgggccagtaaaggcacttgacatttcccaaaaccaccttcttatgattcctggccagataccagcttgtggtgacccagagaaaggaggaggagtcacagagcagtagcatctatcaccagaatgacatctggacacccacagttacctttgctgacttcatcaacaatgaaaccctcttaggagaggttggttgccctagggacatag

SEQ ID NO: 96387 - DNA, 15881 bp, Homo sapiens
cacataataagcacttaataatgttagctaacaataataataataataatataatagcagcaaggaagtcacacaaccaaaagaagacggcactgtgtggtcagggccataccaaagtgcagacaaagttctctgagcgcttacagcagggtgtggtcacctcgggagaagtgtgtttgagccagcactgggagcccagaaaacatcttcactcagagatggtgcaggaggggcaacagacaagaagggctacagaggcctacgcagcagtaaaaggcttcccccccacccccacgagagcctctgtgcaggagggaaaggggacaaagataacagaacctttctctccagcttagcaagtggggtcaagggaagggcagggaaaaggagggagcgtcaggagaaaagacttctctgcgctctctgaagagcatgaagagggaggtgtgggtgctgttctgggacaatctgggtctgtcttgatccctgccaggaatgatgggaattctgtatattaacaagagttagggtccatggggaagggggatgggactgccacttacgccctttttcatgtcctcaagcccccacactccactgaatacgagaactgagggcatgctggggtctttccttccaagttctggcctgagatgaggtctggagaacaagaacggaagccctccacccagggactcaggactagcagatacagaacaacccaggagagctgcgaggagtgcattggtcatttagggtcatggccagtcccagatttgacccagaacaagtctcacttaccctggctcatgctaaccctcaggccatccaaatcagggccatgacccctccccaacccagacaccaggagggaggaggagggagagagagggaagggccctccccgcagaatccaggctcttacatcagattcttgccctggacaggatatcctgtatttaccaggcggaaagtgtatggaggggaggtgaggtgggtggccttcagcagtaacatgaactacaactacctcccgaaaatattcctcttagacgcctgctcaagagtgggatcatttagaagtcagtttgagggtggggccagagctgaattcagaggaaagccttaaggagaagctgtttgcatacaggatgaatccaacaaacctggctccagaattgggctggcaggtctgcaagaggctgcatctgtggggcctctcattgaggggtctgatttaaaaaggaaactcctggccaagcgcagtggcttatgtctgtaaccccagcacttagggaggccgaggtgggcagatcacctgaggtcgggagttcgagaccagactgaccgacatggagaaacccatctctactaaaatacaaaattagccaggcatggtggcgcatgcctgtaatcccagctactcgagaggctgaggcaggagaatcgcttgaacccgggaggcagaggttgcggtgagccgagatcgcgccattgcactccagcctgggcaacaagagcgaaactccgtctaaaaaaaaaaaaaaaaaaaaagaaaaagaaaaaaaaaagaaacctctaaacaaatggcgtgctgaggcctcatcccaggtctctcaaaaagctgatcattttgagctctctggtgtccagggttgtggccaagattaatgataaatgagaaggagaaacaggcctgcagacttggccaaccagttcaaggcgccacacctctccgttccagtccaaacccctggcactggggtttctgaagtgggggtcctctgcaggaggaaggcagaggtgggtccccccttccactccccgccccaggcattcccaagggcagccccgggtcgtggcccgatggctgagggctgagtcacaggaggaggagatactgcagtcacgggagacacagagcccaagacaaagatcggatgacccaatcccgcctcccccaccccaaaatcagatcggcggtgtaaggctggtggcggtggggtagcaaaggctctctctcctccgtgatgggcgtgtctcgtctctttggccttgctttgggaggggccgcctcacacccccacagaccacggggctgcatgtgaccaggactctggcacggccgctgtgcccccgcccaaccccgacgacatagcccctcaagctccctcggggaaagggggcactaaccgtcactcatagtcacagaccacaattacccagagagtgtttggtgggtaggggtacaggtgtggttttaatggggggggggggggtgggtggggacggtagtgtggttgtgcgcatgcgcatgggcaccttattgttttcccccccaccagcacagcttctgggcggcggccacaactaaaaatggttggggaaggggcgataatttcgtctcccctccccacataaatgccgctctccaggagcccccaaacacaagttccttggctacgctttccacgctcgtgcacccaggtccgcgccagtttctcccgccctgccacacccccggcgctcgcccactcgtgccccactgcccagtggcctgcgcagccctgccctgccctacgcaacccgctcaccttgcggtcgctgactccctcgcccactgcgatcacaacacccgcgccctccatgcccggagtgacaggcagaggcgggagacggtcgtacagcccctgcctagccatgaggtctgcgaagttgagcccgcaggcccgcagacgcagcgtcagctggccgggcccaggggccgggggcgctgccggccggctctgcagcttcaccttgtcgtagcctccaaagccggtgagcactaggcagcgcagcagtggcggcgaggcggcggcggcggcggccccttcggaggccgcgggatgctgggggtcgctcgctgcctcggttttcggaggcggcgaagaggcgtcttccccggtcgctgcctcggctacctctctctcgtcggacatggctgggactcccgacgagagcgcacagctggatggagagtgcacagctggggaaggcggaacgcgtcgggaagagccgcggctgcgggatccagcgggaggggcggggcgccgggcgaggcggggcctcgcgctcagccttaaagggccagggccatagtggcgcaagctgggagagcacgaaaaggggcaccaggaacgtctgtgctcttgggatcaagccgactgtgatttatttattcatagtaaaccttattcaaattaaaaactattttaagggataggcctggcgcggtggctcacgcctgtaatcccagcactttgggaggccgaggctggtggatcatttgaggtcaggagttcaagaccagcctggccaacatggtgaaacccccgtctttactaaaaataaaaaagttagccgggcggtagtggcgcgcgcctgtaatctcagctacttgggaggctgaggcagaggaatcgcttgagcctgggaggcggaggtgagccgagatcgcgccactacactccagtctgggcaacagagtgagaccctgttaaaaaaaaaaaaaaaaagggccgggcggcgtggctcacgcctgtaatcccaacactttgggaggccgaggcgggtgggtggatcacctgaggtcaggaattcgagaccagcctgaccagtatggtgaaaccccagctctactaaaactacaaaaattagccaggcatggtggcaggtgcctatagtcccagctactagggaggcggaggctggagaattgcttgaacccaggaggcggaggttgcagttagccaagatcatgccgctgcactccagcctgggctacagagggagactccatctcgaaaaaaaaaaaggccgggcgcggtgtctcacgcctgtaatcccagcactttgggaggccgaggcgggcagattacgaggtcaggagattcacctggctaacacggtgaaaccccgtctctactaaaaaatacaaaaaattagccaggcgtggtggcaggcgcctgtagtcccagctacctgggaggctgaggcaggagaatggcatgaacccaggaggcagagcttgcagtgagtcgagatcgcgccactgcactccagcctgggctacagagcgagactccgtctcaaaaaaaaaaaaaaaaagttaaggaacagtcccaaaacttgaacttacatcagatttggagttaactcatatcagatttggagtcagccacctgtggactggagtccaactacattgtgtctcaggctctgacatctaacccaggcagggatgagacttaattcactgtggtcttgcagtggcaaagtagaagcatggagaccaagcctttaaaactttctgactttggtgttaacgttctgttcctcattttcccttctgtaacatagtgatgatgctgcgtgctctagttatatttatatttttatttttttgatacagggtctcactctgtcacccaggctgagcgaggtggggcgatcacagctccctacagcctcaaactcccggcttcaagcaatcctcccacctcagcctcctgaatagctgggaccacaggcatgtgtcaccacgcccggctaactttatgttttactgctctttgcagagcagggctaccccataggcagcgtgcctagagtggccaaacctagctaagttttgatttttttttctagagagagggtctcgctaatgttgcccaggatggcctcaaactcctgcacgcaagcaagccttggcctcccaaagtgctgagtttacaggcgtgagccaccgcgcccagcttctagttatctttacagaattatttgcagcatatattattgactcgaattgcctcgatataaaaaagcactttttttttttcgaaactctattgcacaagctggagtgcagtgaggcaatctcggctcactgccacctccacctcccgggttcacgccattctcctgcctcagcctcctgagtagctgggattacaggcgcccaccgtgcgggtttcaccgtgttagccaggatgatagtctcgatctcctgacctcttgatccgcccgcctcggcctcccaaagtgctggtattacaggcgtgagccaccgcgcccggcctattgtcagactcttaatcaagcctgacttttgggtttagctctggctccagcagagcaactctggcggttggttctttctcttccttatctccttgtccccaagcatccaccagaggacgcagctcccccaaaactttccacccagtgcttggctggaggaactcagtccacgcttctctgctagtctaggccggcggttaagtcaatgtaaccggagacccggctgcccgttgccatggggacggaaagctatgatgtcaccaccgtccgggtgggtgtgctggggttcaccctcccatttccccaagaccccctgccaggacataggcggacgcgggagagaaaaccaaagaggctccctccttccccttagcatctctctcccgccgtgttcaggaagtggatggctgccccagctcttgtccgcactggtacacctgcgtgcacgcgtgggtacacagcaggcccgagcttcgcgcttgtgccgctcatattctacccctaagaacttcgcttgaactctgacctgcccttatatccgagaaagtcaaataagcccagttcggcctgtcccaaaccggcaggggcccctcagaccacaccggcgggctggaccccggctctgaggcctctgttcccagggctccgccagatcttctggccccgaccccggctgcgggggtgggaggagggccggggggcgcggcgctggctgggggcggggcggagggggggccgcggacccggggcgggggctcggcgcgggcccgggagatgccggtgttggcggcccgagcggctgcagttgcaggggcgggagaggcgaaggaggggaccgggagaggggtggcgtgggggaccggctcgtagccgggaccatggaggggcagagcggccgctgcaagatcgtggtggtgggagacgcagagtgcggcaagacggcgctgctgcaggtgttcgccaaggacgcctatcccggggtgagggacctgcgtcttgggagggggacgctaaggctgctggggggtgggtgacaggggccctggcgacggatgggaatgggtactcgggtaaccagggacaagagacagggggtcggaggacgcggggaggccttgagggctcaggaaggactgcagaggattggggtgggaggaattagggagcagggtgagatagatggggtttgggagaaccagagcatccgggagggagggcgaggggaatgtcggaggtcctgggcaatggagaggggaagaactagggggctgaagggaccagaagggaacaggaggaggtcttggagcttagcagagattctccgggggggggggggggggggcaggagctcccgggatctcccctttgcccaatcccagaccaacttgtgtccaggggctgggctggacggggtgtgggagtgaggagggcatttatctggggtgaggacttggagagatgatctcatctggatccatccgtgtctgcagagttatgtccccaccgtgtttgagaactacactgcgagctttgagatcgacaagcgccgcattgagctcaacatgtgggacacttcaggtagccaagtccctgggggtcaccctgacttccaaggcggcccactctgtcccctcccttggttagacccttaggttccaggtaagcccagcccatccatccaattccaacaggaagggaaaaatcaatattctgctaaaatccagggaaactgaggtagaacttgcagagcctgacagaaaccatgtcctgaaggagaaagcctaggatctgagcccctcagctgggtcctgcctacctgggaaagttgggaaggartggcttttaatttggaacatgttccttcagagataagactgggtttagaaaagacatttagaggccaggcacggtggctcacgcctgtaatcctagcactttgggaggctggggtggggggatcacctgaggtcaggagtttgagaccagcctggccaacatggttgaaactccgtctctactaaaaatacaaaaattaatcgggcgtgtggcacgtgcctgtaatctcagctaccaggaggctgaggcaagagaatcgctggaacctgggaggcggaggctgcagtgagccgagatcatgccgctgcactccagcctgagcgatagagcgagactccatctcaaaaaataaaaaagcagaaaagacatttagaatgtcttgagtgaggggtggtcaggaggctgtttctctccattgaactagataaatctgaggtcaagtcccaggagaatgggagagtgctctccctgccactgctcttttcctcctcccaacataaggagggtttttatttttacaagagttcccttcagggctttagactgccaaagcccagaaagcacatgcaacattttatgagaatgtctatagattttatgagcttctcaaaggggtccaaacctcagtcaagaataaaaattattactttttaaaccactagggaagcagagagccgtttcccaccatgtgacctcccttctgcccgctcccccacttgggaaacccagactccatgatgggtattaatgatgggtattaatggttgctcttttccattctctgctcccagcatcccttgaccaggatctgtaaggtctcccattcccttccaggcctcccatccactcaggcccctcatgccctgtcttccttcaggttcctcttactatgataatgtccggcctctggcctatcctgattctgatgctgtgctcatctgcttcgacattagccgaccagaaacactggacagtgttctcaagaaggtgggagcctggggaaatagggcagctagactgagggggaccagaccaccatggtcctgacataacatgggccaggaggagggagtgatggctggggtatggccatcagctggttagcgagtgaagctctcatccctgccacccctgcctccagcccccatccctcccagccacccctttcctgaaagtcctcagagctggatacagcagctaggggaggtgggggagtgaagggagaagcactcacaggattccttctctgctcttccaactccttggcagtgggagtcccagatggaggggatgggatgggaagcctgatcctggagctcaggaaagccctgtggcctcctctccaggccccagtttccatgacaaaagccaggggtgaatggacagaagtcagctagggcagccccagttcccaggtgggggaggggagggtgggataaatttgttcccaggagagagtatgggaaaggcgagtgggaatgggaagtttccaggctggcagacccttcatagccactgagggagaagagtscacaggcccaygccagccctctcctccccgctgcttctctctcaccccatcctgctctcaaaccaagcctagcattctcacctccttcctcatgtgggagagtcctgagggatacatggtttctgcgtgcttgaggaagagagggcacactgctggcatggcacaaaggctcacgctgtgcctccctccacccctccacaattctcttttcttctcctacatagtggcaaggagagactcaagagttctgccccaatgccaaggttgtgctggttggctgtaaactggacatgcggactgacctggccacactgagggagctgtccaagcagaggcttatccctgttacacatgagcaggtgggacccttgacgtctgacctcatcccagcctagacctgtcacctctgccccttcagtctctgatttgaaaacaccttacctggctcatcctttgttctggtctgtgacctctgacctgatcccttgactgcccccagccttgacattcaaccccagcccacagcctccatgcccctttctaagctgcaggctaagacctataactttctcccatgcactccttccttttccagggcactgtgctggccaagcaggtgggggctgtgtcctatgttgagtgctcctcccggtcctctgagcgcagcgtcagggatgtcttccatgtggctacagtggcctcccttggccgtggccataggcagctgcgccgaactgactcacgccggggaatgcagcgatccgctcagctgtcaggacggccagaccgggggaatgagggcgagatacacaaggatcgagccaaaagctgcaacctcatgtgaggggctaggagagggcagagtgtgaagaggggtggtgagggacacaattgttcccctgcctgcgcccaggcttcttgacctcctgatcctggctgggaagttagggcaggcagagcgagcaattctgggcaggggagctggagggcagaagggtatcatcgtttctcatctcctcctccctcctcttctccagtggatgttgagggagctaacagggctggcatctggggcatgaactgggatggggcaggtgggcgttagggaagctggtatcaaatggtgaccttggtggagtctcctatgtgaagagtaccctccctctccacccccagtccccatatcctggttctggcccaaggaaaatgtccattctatgaccttctcttttcctctcctctcacttctgcagctattctcacacatctaacctctaggcaacatgcactaaattcaaaagcaaggagaagcccttgccccccatcagtccaccagccctagaacctcccttgcctcaacagtcacctaataaagcccacctccatggaaaacggctgtggctttagttttgttgctttttaaaaaaatcaatctaccaatctttagcagtaagagggaaagttagacctcagctggggaactttcctgtccatgtccacagatagagcagaggacaaagccataggttggatcagaagtgtccttttaggagtcagagttgggagaaggagacatcctgggactgttcatcctagttaatgaagtgggcaattctcaggccattagggggttttagagcagaccgacatataattagtcagcatttctcagcccagccaggcctgctgctagtgtgggaggggtcctgctcaccatctgtacccctggcttggagcctgctggtaccctgggggttgtggggataaggaggcatcaggccgggcgcgctggctcacgcctgtaatcccagcactttgggaggccgaggtgggcggatcacaagttcaggagatcgagaccatcctggctaacacggtgaaaccccatctctactaaaaatacaaaaaattagccaggcgcggtggcagtgcctgtagtcccagctgctcgggaggctgaggcaggagaatggtgtgaacccgggtgaacctgggaggcggagcttgcagtgagccgagattgcgccactgcattctagcctggatgacagagcaagactctgtctccaaaaaaaaaaaaaaaaaaaaaaaagaaggcatcaaaagcctccacatcacagaagctacccctgtacagcgtgaagtttcctaagaggtcagtagtttgattctggggtctccttagaggctcaggccagggacctttctctcctcccatgctgagtttcatgatggctttcaggggagcatcagctgttagagtcacccctaccctgtcccttaaaggaaagacggtggagaggacggctgagcgcctgttgtcaggaaagacagtactggtctgttttctcgggagtctggtttcagattgtcctgtattcccttcctggctctggtcccactggcctcttttcggtgacattctcccccaggaaccatccctggcccttccctcccccagccctagccagttctcccagacacactggaagagaacactgaccttacccaactatctgctgggatcccacccaaatttatagcccattcctccctcattcattcattcagcaagtatgtactgaacaccaactgtgtggcatacactggcttgggagattgcaaggaccagtctctaagcttttggaggccagcccagtgtggaagagaggtacctcaggtgtgagggtgccatggctgagggatatttgtacatgtatgggatgctatgggagctccttgcagcctgagaagccagtcctgtgagccaggtcctgagggttgaagaggagttttccgggcagggaaagggtaggaaaggcactctgggcagagggtacagcatgtgtaaacacgtggagatgagaatgagcatagcactgttggggctcccatggcagggagaatagaagacaaggctaggaaggtacactgaggctactgcagggtccacagaggaatcagaatttcattctgaggatgaatgaaatcatcctcagaggatgaagccaccaggaatttcaggcagagagtgaagtgatcagagttgttttttggatagatggttatctggatgtggtgttggagctgggagatttggctctgaggtgtgtcatttaaaataatagcttctcggcagtggctcacacctataatcccagccaagattcctcctttgggaggccaagctgggaggatcgcttgaggccaggagttagagactgcagtgagctatgatcatgccattgtcttccagcctgagtgtcagagtgagaccctgtctctaaaaaaaattaaaaaataaaaaataaaaaatagcttctcctttcccttatgccaggttccagtcttgagaggaaaggaatccctacccaccactccctggatcatcagatatccctatcccaacctctcctatgggactagttcatctcagccagtctcaaagattctaggataacttcaatggcatttgaaattatctaagtgtgcttggataaccaccccctcaaactgagacctggttagggactgactcaaagaccctgagtcctcggctaagggtacaggagagggcaggggctccaggcccagctaggtggatctccatctgtctctgaggactgaccctttccccacaaggacctgccataaaaatcgacttgcgatttttagctgagtggcttctcttttccactttggacttctcagtgtatagcaggttcaagcctgcaaccaccaaagtgcagagtgtggagtgtttgtgccccctctttcctccaacctccatatcctgccatgtgagctcagggaatgcaaatgcatttaaatatccatctaaagcaaacataattagaaaaatcaatcagctggaggaccccccaaagtttaatacattttcaataccaccaggaatggatttttggtccctttctgcaggtctgggttgccagacgttttatttctggggaggagggctctgggctgaggagctcagtgggtgggaggagggaatgggactgttgctgatcctcaaaggcctctgtaggatggagggaggggaccttactcccttccccaccccagatgcaggagtcacccagcttccttctctgcgctgtttccttcacaaattagacattggtttgggaaacaatgtagcctcgttaaacatttaatgaaataaacaaataatcacactgtgatggctgccagagtttctgtgttttttttttttttttttttttttttttgagacggagtttcactctgtcattcaggctggagtgcagtggcaccatctcggctcactgcaacctctgcctcctgggttcaagcgattctcctgcctcagtctcctgagtagctgggactacaggcgcgcgccaccatgcacagctaattttagtgttttttttttttttgagacggagtttcactcttattgcccaggctggagtgcactggcgcgatctcggctcacggcaacctcacctcctgggttcaagtgattctcctgcctcagcttcctgaagtagctgggattacagccatgtgccaccatgcccagctaattttgtatttttagtagagatggggtttctccatgttggtcaggctagtcttgaactcccgacctaacgtgatccacccacctcggcctcccaaagtgctgggattacaggcatgagccaccgtgcccagccatttttgtatttttagtagagacagggtttcaccatgttggccaggatggtctccatctcttgacctcatgatccgcctgcttcagtctcccaaagtgctgggattacaggcgtgagccaccatgcctgacctaatttttgtatttttagtagagatggggtttcaccatgttggccaggctggtctcgaactcctgacctcaggtgatccacccaccttggcctcccaaagtgttgggattacaggcaggagccaccgcgcccagactagtggttttttttttgagagtctcgctttcttgcccaggctggagtgcagtggcccaatcttggctcactgcaagctccacctcacaggttcacgccattctcctgcctcagccgccccagtaactgggaccacaggcacccgccaccacgcctggctaatttttttttttttttttttgagacggagtctcgctctgtcgcccaggctggagtgcagtggcgcaatctcggctcactgcaagctctgcctcctgggttcacgccattctcctgcctcagcctcccgagtagctgggactacaggcacctgccaccacgtccggctcattttttgtatttttagtagagacggggtttcaccgtgttagtcaggatggtcttgatctcctgacctcgtgatccgcctgtcttggcctcccaaagtgctgggattacaggcataagccaccgcgcccggcctaattttttgtattttttagtagagacgaggtttcaccgtgttagccaggatggtctcaatttcctgacctagtgatccacctgccttggcctcccaaagtgctgggattacaggcgtgagccacctcgcccagactagtgtttcttaacctaggcaatccgcctgcctaggagggaggagggggaaggacagggtggatgggaagagaggactcaatcaaactcctgaaacacttcagctgacaagggtcctccccttgtgactctggccctcccagggggtagtcgtgggaagagcttcaggttcagaggcagaagtcccagggcctgggttgagctctgctgcttcttccctggggaatctttggtgaggcccagcacctctctgaacctcagtttttgcacctagaaaagggggctgatcaccacatctacctcattgtgttgctcagctgatgtcaacttttattctttacaaccaagacaccaaggcttaagtgcttctaagctgggcctgagggagttgggaaaggcttcttggaggggtattttgtgctgggacttaaaggctggaggaagacagaagacagaaagcaggaggtggttatgtcttgttcccacccctatcttggggcctgaagagagctttagtgactcctccaaagattgaggtccctccctgccaaatccccctctgcgagaaacacccaagaatgatcaataaaaaaaaataaataaattgaaaaaaaaaaaaaaagattgaggtcccttggtctccatttttctgaactcctcttattacgttttctgcagtctctgggtgaggacttcatgttgccatagtgaccctctccctgcttcagatgcactcagacttgtcctgcaggctgaggaaggtgtggggggaggggtcatgtccctgagattcccagtggggcaggcactcttggcacagctctctcccccaactccacattctcttccccaggaaagggtttagcgttttgttctcagtttgttctacacaaggcagctcctctcctgcttccttccttccagccaggttcccagatctccctccatctctgtctggtcaatcccttacttgctgtcctcaaagctgtgagtgagggtcagagagaggggaggctccaggtcgggaggtgtgggatgattcctgagtagctacccgctagcagcggagagacaagagagccctgtacactagtgcccctcccgacaagaaaatgcctctgctgttgactcctaaataacagatgtctgtctgcatattaatgagactggacgaataattggtgagtttttcattcagtgtcagaatgaacccggaggccttatgttcatgcacacagacacccactcacccctgactctccccttcccccacagcacaatgaaacagacgccagcaggcttgacccataaaggggaggggcagacagggaaccaccaggagggctgttagggaggggtgttaacaggagggagacccccatggttggtctgggtttgtcaggtttctttcttgatcactgcctccccacctccctgggggcaaaagcttgcatttgtgagatttcgccacgctgcagaaggggctcagagaaggagggggctctggggggacgcagtcgctgcctagaggacagcaacaaaacagtggtctccttcagtgactttgtgcctcccttgcgcctgaaatcaatgagccccttaccctgagttagaccctgtgccagggtgtgagatggaagaacagaggttttggagtcaggtaactacaatttgctagctgggtgcccttgcacaagttacttaacctctctgagcctcaccctttttgtctctaagaacacctaccttgcaagattgaaaggatgaaatgagataaagtgcattatgtgtctgtcttagtgcctggtttataataggcccca

SEQ ID NO: 96388 - DNA, 19719 bp, Homo sapiens
ccagtacaagtgttttttaagaagtacaagaggccgggcacaatggctcacgcctgtaatcccatcactttgggaggccaaggcggatggatcacctgaggtcaggagtttgagaccagcctgaccaacatggtgaaaccctgtctctactaaaaatacaaaattagctgggcatggtaatcctgtaatcccagctatttgggaggctgaggcagaagaatcgcttgaacccgggaggtggaggttgcagtgagccaagatcacaccattgtactccagcctgggcaaggagagcaaagctccgtctcaaagaggtgcaaggccgggcacagtggctcacgcctacaatcccagcactttgggaggccgaggcgagcggatcacagggtcaggagatcgagaccgcactggctaacacggtgaacctgggaggtggagattgcagggagccgagatcacaccactgcacctccagcaaaagaggtgcgagaattgagaaagtcctgaacaataattgccagaacccagcagcatgcaccttaaagtttgctgctggtattgcacatttactctgggttggctgacctaaaggggcagagagaggccggacaccatggctcacgcctgtaatcccagcactttgggaggccgaggcaggtggatcgcttgaggtcaggagttcgagaccaacctggccaacgtgatgaaatctcatctctactaaaaaataaaaaaattagctgggcatggtggctggcacatgtaatcccagctattccggaggctgaggtgggagaatcgcttgagtttgggaggtggaggctacagtgagctgagatggcaccactgcactccagcctgggtgacagagcgagactccatctcaaaaaataaaaataataataaaagggcagagagagctgtttcttgggtgctgggatgtggtggggttgaggcagctagtgtttgggctgtcatgagagtgactgcattggcagaacttgaacaataaggaaatgatttcaagtagaaagttagctaactgtcatgatgaaagtcaagaaggcctaatttggccgggcacagtggctcaggcttgtaatcccagcactttgggaggccgaggcaagcggatcacgagatcaggagatcgagaccatcctggctaacacagtgaaaccccgtctctactgaaagtacaaaaaattagccgggcatggtggcaggcgcctgtagtagtcccagctactcgcaaggctgaggcaggagaagggcgtgaacctaggaggcggaggttgcagtgagccgagattgcgccactgcactccagcctgggcaacagcgagactgtgtctcaaaaagtgggggagggcctcatttgatgattcttagctagaaaaataaagtagttgtgggaaattgagaatgaaacattgaattttacattttattggcttgaatccaataaatgttaaaagtgaattttcaggccggatgcggtgactcacgcctataatcccagcattttgggaggccaaggcgggcggatcacgaggtcaggagatcaagaccgtcctggctaacactgtgaaaccccgtctctactaaaaaaatacaaaaaattagccaggcctgatggcgggcacctgtagtcccagctactcgggaggctgaggcaggagaatggcgtgaacccgggaggcggaacttgcaatgagctgagatcacaccactgcagtccagcctggacgaaagattcagactccgtctcaaaaaaaaaaaagtgtgaattttcagataatgtcatcgggacatggcttttgatggttgcttctaaggagtcagaccctgattccctagtgtcccacaaggatttgggctgtataggggccccggcagtatgtgggctaatcctgcctctccacctttgtccccaggtactctgtggatatccccttggacaaaactgtcgtcaataaggatgtcttcagagatcctgctcttaaacgcaaggcccgacgggaggccaaggtcaagtttgaagagaggtaagtaggctttggtcgtgaatggtggagtatggtttcactatttccattcctttcctcattggtgtcctctttttttcccttctagatacaagacaggcaagaacaagtggttcttccagaaactgcggttttagatgctttgttttgatcattaaaaattataaagaaaaaaagcctgtgtctgcatgctgtatgtattaccagactgtgaaaaggagaacattattgaataggaaacactgggtgggctgggcacggtggctcacgcctgtaatcccagtactttgggaggccaaggcgagcggatcaccaggtcaagagatggccaacatggtgaaaccttgtctctcctaaaaaatactaagaattatctgggcctggtggtgcacgcctgtagtcccagctactcgggaggttgaggcaggagaattgcttgaacccgggaggcggaagttgcagggagggctgagatagcaccactgcactgcagtctgacaacagcaagactccatctcaaaaaaaaaaaaaaaaaaagacgctgggtgatggatgaggggctgggaaaatgttaaatctgccttaatgagatttatgctgcctctgtccttagcctgataatccctgtgaagaattgtgtagcctccctggcttctacccattacatgccaggagaacctctgccacacacactctgcccctccttgtgacaaccaaaggcccctgagtggtggggatcaggtatttttgattgagaaccactaacctgaaattctcaaaccttagcacagatagaggtcacctggatggtttgttaaaccacggattgctgaaatcctgccctcagactgatccagtaggtctgagtttctagcaggttttcaggtgacactggtactggtgtaggtgagatggggaccaccctggagacctgctcctggtggtaacgacagatgcctttggtgaatccctgagcctagagcagctgtttaataggacaagggagtgctcctcaaatggcctggctggcagagacttgaaagaaagtgatcaaaggagctttggggcattgggttgtgccactactgtgtagtgcaggagagacatttggttcttaggatctggcattttatctctcaatggactgtaactagtcatgtttcatgaatgaaataggtgctccatctgaatggttctgtcgctagagggaactaagattcaaacaggccagtttgccaagtctgctaggtaccacacttgcacttgggaaccagagggggcggggtggcgggaaggggccaaaagtaggattggtgagtaactggaaaaaactttgggctaggttactaggaaactttttttttttttttttgagacagaggcttgctctgttgcccaggctggagtgcagtggcacgatctcggctcactgcaagctccgcctcccgggttcacgccattctcctgcctcagcctcccgagtagctgggactacaggcgcctgccaccatgcccggctaatatttttgtatttctagtagagacggggtttcaccgtgttagccaggatggtctggatctcctgaccttgtgatcgttctacctcagcctcccaaagtgctggaatacaggcgtgagccaccgcgcccagccacttttttttaagatggagttttgctctttcacccacccagtccggagcgaggtggtactatcggctcactgcaacttctgccccgccccggggttcaagcgattctcctgcctcagcctcccaagtagctaggactacaggagtgtgctaccacacccagctaatttttgtatttttagaagagatggggtttcactatgttggccaggatggtcttgaacttctgatctcatgatccacccaccttggcgtcccaaagtgctgggattacaggtgtgagccactgcacccagccaggaaactttttaattgaatcttcacacacttaagtattaaggcatctctattgagacagacttctattaagtagcttgcctactcagggtcacagaaatggggctgaatttaaaacttttgaggaaaaatacagcaaatttttttccactctacctcaaggcccaagtgtaaatactgttcctaccaggtttggatccatgctttgattcctagccctgtgaccttgggcaagtttctaatgctctgtgcctcaattttctcatctgtaaagtgaagaaaatagaaccaacttcatggcattgttttgaagagttaattcatgtaaggcacaagcgtgttgggcagacgatagctctccttgctggccactgttaacagttttgtgaacttttttcttttttttttttttgagccagagtctcgctctgtcacccagctggagtgcagtggcacgatctcggctcactgcaagctccgcctcccgggttcaagcgattcccccgtctcagcctcccgagtagctgggactacaggcgcatgccaccacgcccggctaatttttgtatttttagtagagacagggtttccccatgttggtcaggctggtctcaaactcctgacctcaagtgattcaccgcctcagcctcccaaagtgctgggattacaggcgtgagccactgcacccagccttttttttttttttttttttttttttaagagacaagattcactgtgttgcccaggctggcctcgaactcctgggctcaagcagtcctcctgcctcaacctgctggaactataggcacatgttaccagtgggcccagctgctgggattggcactttttttttttttttagtcagaatctcactctgttgcccaggctggagtgcagtggtgtgatccggcccggctaattttttgtattttagtagggacagggtttcaccatggtggccaggatggtctcgtgatccacccgcctggacctcccaaagtgctgggattacaaggcatgagccactgcgcctggcagttttgtgaacttgaactgtggactttatctgtcctgattgtgtttctcattcattcagcaattattattttttgagatggagtttcgctcttgtcactcaggctggagtgcaacagcgcgatcttggctcaatgcaacctctgcctcccaggttccagctattctcctgcctcggcctcccaagtagctgggattacaggaatacaccaccacacccggataatttttgtatttttttagtaaagacggggtttcaccacgttggccaggctggtgtctaacttgggatctcaggtgatctgcccacctgggcctcccaaagtgctgggattacaggtgtgagccaccgcacccggcagttttgtgaacttgaactatgggcgttatctgtcctgactgtgtttctcattcattcagcaattattgttttatttattttttgagatggagtttcactcttgtcacccaggctggagtgcaatggcacgatctcggctcaatgcaacctctgcctccgggttccagctattctcctgcctcggcctcccaagtagctgggattacaggaatgcacctccacgcccggctaatttttgtatttttttagtaaaggtggggtttcaccatgttggccaggctggtctctaactcctgacctcaggtgatctgcccgcctgggcctcccagaatgctgggattacaggtgtgagccgccgcacccagctcattcagcaattattttatcaatgttcaatgtgcccagcattattctaggctctagggaaataatccattgacaaagcagggtctaccaatgggcttgtcggagattgctgggaatggttgatgggggccagtttgcagttggggtgaggtggctttccttgaggcagcctggctgagtgaagtcgactttgctgaccaagaaggctcctcccaggggtggggaagcctcggcagggggcggcatgtgagcgccagaaggcagggatttcacggaaatgaaagtggaagcaaacagcctgcgrgcagagcctcctgaggtgtatttcgggtcttgctggggctgagagagaccacagccctttggggggtacaaacaagagttcagttgctgtgaattctgccactgtgcccagctctgaagcctcagctcttgccaaacagacccgagacccatgtcagccccactggatgccgtaagtgaggaggagggagttgggaagtggggaaacaggagtaatcctcttggctaggaacctgcagatatctcagggcctggcagccaagcctcaccctgcccatctcagacctgctgaagggctggggagaaacacagggctggggttgcctctgcaagagttggttccctaacctattgcctcagacaggaggagctcattaaatcctgtgtgtgtacacttctctggagagagaatctgtagtttccatcagatactcagcgggttctgtgacccaaataacaattgttctaggccgggcgtggtgtctcaygcctgtcatcctagcactttgggaggccttggcaatacagtgaaaatccgtctctactaaaatacaaaaaattagctgtgtgtggtggtgtgcgcctgtaatcccagctacttgggaggctgagacaggagaatcacttgaacctgggaggcggaggttgcagtgagccgagattgcatcactgcactccagcctgggtgacacagcgagactctgtctaaaaaaaaaaaaaaaaaaattaaactaaaggaattaggctgggtgtgttggctcacacctgtaatcccagccagcactttgggaggctgaggcgtgtggatcacttgaggttaggagttcgagaccagcctggccaacatagcaaaaccccatctctactaaaaacacaaaaattagccaggcatggtggcacacacctgtaatcccagctactagggagactgaggcgggagaattgcttgaacctgggaggcagaggttgcagtgagccgagattgtaccactatgctccactctgggcaacagagggagactgtctctcacacacacacacacacaaaatttatatatatatatatatatatatactataagaattatactttaagaatcacactaggtaatccatagattaacacggtaaaaacttatcccactgcttagcacctacagagcattcaatatgtgtttcttcttaatattattattgccaaccttttcagaaccccagttccccaaggacaatcccttttttttttttttttttgagacggagtctcactctgtctcctaggctggagtacagtggcatgatctcggctcactgcaacctctgcctcccgggttcaagcgattctcctgcctcagcctcccaagtaactgggagtacaggcacgttccaccatgcctggctaattttttgtatttttagtagaaatggagtttcaccgtgttagccgggatggtcttgatcttctgacctcgtgatctgcccccctcaagctcccaaagtgctgggattacaggtgtaagccaccatgcccggacttttctttcctttttttttttttttttttttgagatggagtttcactcttgttgcccaggctgaagtgcaatagcatgatcttggctcactgcaacctctgccttccagattcaagtgattctcttgcctcagcatcccaagtagctgggattataggcacacatgccaccacgcctggctcatttttttttttttttttttttttttgagatggagtctcgctctgtcacccaggctggagtgcagtggcaggatctcggctcacagcaagctccgccccatgggttcatgccattctcttgcttcagcctcccaagtagctgggactacaggcacccgccaccacgcccagctagttttttgtatttttggtagagatggggttgcactgtgttaggcaggatggtctcgaactcctgacctcgtgatccgcctgcctcagcctcccaaagtgctgggattacaggcgtgagccaccgtgcccagcatggctaattttttgtagagacagggtttcagcatgttggccaggctggtctcgaactcctgacctcacatgatctgcctcccttagcctcccaaaatgctgagattacaggcttgagccacagcacccggctttatatacgttaaattgggccatctttttcaaataaaaatccagattttttgttttttggagacaagatctcactgttttttccaggctgcagtgcagtggctggatcatgkctcactgcagccacctccacctctagggatcaatagatccttccatctcagcctcccgagtagctgggactacaggcatgtgccaccatgcctggctaatttttaaatattttgtagaggtagagttttgtcctgttgcccaggctggtctcagactcctgggctcaagcgatctgcctcccttggcctcccaaagtgctgggattacaggcatgtgccacaacaacctgcccagattttttatttctattaaaaatgggaagattagggggcctgggtccgtggctcctgcctgtaatcccagcactttgtgaggctgagttgggcagatcacttcaggtgggaagtttgagaccagcctggccaacatggtgaaaccccatctctactaaaaataaaaaattagagccgggcacrgtggctcactcctgtaatcccagcactttgggaggccgaggtgggtggatcacgaggtcaagagattgagaccatcctggccaacatggtgaaaccccatctctactaaaaatacaaaaattagctgggcatggtggtgcgtgcctgtagtcccagctactcgggaggctgaggcaggagaatcgcttgaacccgggagtcagaggtcgcagtgagccgagatcctgccactgcattccagcctggcgacagagcragactctgtctcaaaataaataaataaataaaaaataaaaaaaattagccaggagtggtggcaggtgcctgtaatcccagctacttgggaggctgaggcaggagaatctgttgaatccgggaggtggagtttgcagcgagccgatattgcgccactgcactccagcctaggcaacagagggagactccgtctcagaaaagaaaaaaaaatagagggctgggcgcggtgtctcacacctgtaatcccagcactttgggaggctaagacgggcagatcatgaagtcaggagatcgagaccatcctggctaacacggtgaaaccccgtctctactaaaaatacaaaaaaattagccaggcgtggtggcgggcacctgtagtcccagctaatcgggaggctgaggcaggagaatgaagtgaactgggaggcgaagcttgcagtgagcagagatcgcgccactgcactccagcctgggcgacagggtgagactccatcccaaaaagaagaaaaaaaaaaaatagctggcatgatggcacacgcctgtactcaggaggctgagatgagaggattgattgattycrggargtcgaggctgcagtgagccataatggagcaattgcactccagcctgggtggcattgagactttgtctcaaaaaacaaaacaaaacaaaaacatgggtagatttgctgtggggggaaactttgttatggctagaagcagtttactttagaaaggacatgctcttcccagtgcgtcagagtccccaccactctctgttatcctacatggctctattaactcattaatgtcatccaactggcccttaaaggcactgtgttagcactctctgagttacagaaatatgaataactaatgatctttttcactattcataaaccagcataatttggtcaagctctagtattcttctgctaaaaatagaacaaactcacactgaatttctttggtgtcctctgtaatgtgctcctttaccgtcattcattcacttcatttcttcattcaacacagttttaccggacacatattttgtgccggagatcttgctggacacaaggaatacagagatggtcagaacagagtcctatctttccaagagatctcatgcttctctgagctgaacttctttatcaggattcctaaccacagggtgaactctgctctattccacaaacaaaggtgcatttattggtatccctggtgtcacttccctgcctgtgatgtcagttctstctctggacccattccagatcacacccagcctaaaaggttacttggtgtacagtggaaagtgtgacagtccagggacaagctagaattgatgggtaaactacctccccactctgggcttcatttcttcactgtaaagcacaggttagtgggtgggctctggagtcagacagcctagggccaaatgactttgggcaagtcatttaacctctctgagctttaatttcctcatctataaaataaggattggccaggcattgtggcttacacctgtaatcctagcactttaggaggccgaggcgggcagatcatctgaggtcaggagtttgagaccaacctggccaacatggtgaaaacctgtttctactaaaaatacaaaaatgagccaggtgtggtggtgggtgcctgtaatcccagctacttgggaggctgaggcaggagaattacttgatcctgggaggtggaggctgcagtgagccaagatcgcgccactgcaccccagcctgggagacagagcaagactctgtctcaaaaataaataaataaataaaaattaaaaaaataaatcaataaaataaggatcacaggatatctatcttagataccctgttgttctaagaattgaatgaaataattcatcagaygggcttagcacagtgcctggcatatagtaagtacttagtaaacgttagttaagaatatgactgtatgacattttgcaactagtctcccctcctcttggaggtgtccctaattgggttaacccctttgggattgtccctcttccaaattccggctgcccttcacagtcagtcatgtgatcatgtactcttgagcactgtttggcaggcctgagggtcgtacccttatcttccactgcctgtgtcagtgccgagcactttctagcaggagcttaatcagtgtttgttgaactctagatctgtggtcacgaacaagtcatggacgctrcaaaggctcctgccctttcaagagcagctgagatgaggccagccaagccctgggtggagggggccaagaccagcccagggcagcacaaaggggttgggttgttcttgagcttagcatcaactctgcttttggagcgtccagaataggccccmcttcccctgggcttgttgattctctggaagggcgggtagaagtcttgttgtttccttctgccccaacaggccctccacgcccttcaggaggagsaggccagactcaagatgaggctgtgggacctgcagcagctgagaaaggagctcggggactcccccaaagacaaggtaaggtgggagatctggtgttgtttggtaaaaacgagctggcgaggccgggtgcggtggctcacacctgtaaacccagcactttggtaggccaagggggcctgatcacctcaggtcaggagtttgagaccagcctggccaacacagtgaaatcccatctctactaaaaatacaaaaattaggccgggcgcagtggctcacgcctgtaatcccagcactttgggaggccgaggctggtggatcacctgaggtcagtttgagaccagcctggccaacagggtgaaaccccgtctctactaaaaatacaaaaattagctgggtttggtggcacatgcctgtaatcccagctacttgggaggctgagtccgaattgcttgaacctgggaagtggaggttgcagtgagccaagatcatgccactacactccagctgggtgacagagcaagactccctttaaaacaaagaaacacaaaaaagagctggggagttctcggttttattcctggctctgctacttccttgctgtgtgacctccattatgttacttgaacatctgtaaagtagagctacccacctcccaggacaaattaagatgttgtatgtaaattgccctgtatggaccagacctgcattcatccactcatttatccagcttttctttcagtaaatgtatttatctccggcactcagcatcaatggaatggaatcggagatgccttcctcctaggtgggagtgaggaacactcctactcccctcccctacttccaggtcccattttcagtgcccaagatccccctggtattccgaggacacacccagcaggacccggaagtgcctaagtctttagtttccaatttgcggatccactgccctctgcttgcgggctctgctctgatcacctttgatgaccccaaaggtaagctcatggggagcctcaggagggaggtggggagggttcccagtactraccctgtttcccaccacccagtggctgagcaggtgctgcaacaaaaggagcacacgatcaacatggaggagtgccggctgcgggtgcaggtccagcccttggagctgcccatggtcaccaccatccaggtgatggtatgacagaatcctggggcatgcaaagcatgccaygcacctgggcatggggaagtggagctgtgtctgggaccaccccttgctgtctccccctagrtgtccagccagttgagtggccggagggtgttggtcactggatttcctgccagcctcaggctgagtgaggaggagctgctggacaagctagagatcttctttggcaagactaggaacggaggtggcgatgtggacgttcgggagctactgccagggagtgtcatgctggggtttgctagggatggaggtgagggctatgcaggcctcctgcaggggagagggtatagggtgtgcaagattayggtgcagggagaggagagggcttgatgctaaaggcccacccctccttgctccccacagtggctcagcgtctgtgccaaatcggccagttcacagtgccactgggtgggcagcaagtccctctgagagtctctccgtatgtgaayggggagatccagaaggctgaggtaagcaggaggggtgaagaacaggggctgggctgggtaacctgtctgcctgccaggaayttgcccaatgaaggatcagaggccccaaaccccactgacctacctacccaccatcagcctctccaggcctcccgacctcatacccccatggggcactgcctgccctacccccagcccccagcccttctcccatgagcctttgccatctcctggctccttttccagatcaggtcgcagccagttccccgctcggtactggtgctcaacattcctgatatcttggatggcccggagctgcatgacgtcctggagatccacttccagaagcccacccgcgggggcggggaggtaraggccctgacagtcgtaccccaaggacagcagggcctagcagtcttcacctytgagtcaggctaggggcctccccttctcatcctccccacccccccgccaaggttctcmcactggcctgggcttgggtgcccatataggaggtctgtatgttcaccaacagtgcrgaggggtcacacattgcaaaacactgcccagaacagtaaaaagagcctgcatgccatgatgttcttcctcatttcactcatgaaaggaaacgtgatttgggcatggaaagaggcagggggcaggaagcagcccagatcttctgctggcagcactagccttccaggagctcaccttccctccactctcagaggcaacaagcaggacccagggtttggctttttattgacacaaacacacaaaggcagctgtggtaatggggtggtggggtacacaaaagcagaaatcgcacttcacacatttaggcctcatttagacaatgaggaggctgagcctgtccctccacctcccattgcaatggttggggcaataaccctccctaatcctagctcagtgagtagagggagtgacctccctacccaggaagtccccattttggttgcaatggcccaggtcctgaccatcccactctgtacttccctgctccatctccccacccatgtaaacagagttttgggctgagtttgataagctgcctctctgctttgagaaggcagtagggcctcccctaactgcaaggggaatgtgcttggatttttactttggtcccagtacaagaaacagacagcactgcctttcagagctctggctagtaaatgccacacatatctgcaaggctgaggaagcttccccgcctttctcctcaaccaccatagagacgggacatggcacagaccacgatgagggcacctgtttttgccctgcctccccaggaggcttggggctgccccacccaatggcacatacacagatttttggcagtgttgtgggactggggaggagagaaaccccagctccaccagaacaaggaaggcactggggagtacaggggaggagaaggaggtgggaaacaggatcctccctccccgccgccacacacacacaagcacaggttttcgttgctaaggcactgagaacaaatccagagaactcagtgaagggtgggggctctgtatccttcccagagttgtgacctaggggagtaggtctgattcccgccctgttggaagaggcagccttggttaagaatggcagaaaacctggagatggaagaagcccaattgtgcttaagaagttggggacagaggacgagattgggaactggtcaagcccagaggcgggcactggtcagcccaggctgaagggacactagggagagacaggtacatgctggactcacagagattggccccatatcctgagctgacgtttcaattctttggggaggtggcggggcagggacgggaggaaagatgaggcagaggtgaaagcacatggaacacaacaggggggactggctaaccttggcacaaaagcagcacagcaggcccggggaaagggtgggggcaggaagcagccggcctccctctgaccctccctgtcgccttggcagggcccagacatccaaatggtcacttcccaacctcttcagaggtcaggaagcggggaggggcaggggagagcggtcatcaccacagagaacttcgggggagggagggcagagcattatgacagaggctgaaatgcaagtctggtggccaacagaacgtagcttcccaacttctcccttcgctggtctctagggtctcacagccacttgccctagttctccttctctggccctggaaccaggaggaccttgcccacattcttcttctcctgcatctgtttcatggcatcagccacctggggaggaaggaaagatgcggctcccagtgctatccaaccctcatccaacaagagccagtgtgatgcaggcagccctcctcttccccaggaatctgccccttgggaccccagccttcatgagtcctacccaagccctccctgcaaagtcctcacattcaccttctcgaagggccagactgagtcaatgtggggcttgatgtggccctggttgtacagagccaggaggcgggccaccacaccactgaccagctccacctcaccatccaggtagcccaggtggaagccacacacagcccggttggcctgcagcagctgcagagctgtcacgctgaactgattccaccatgtccgggccagggccatcaggttccgtttggggcccgtcagcaggttggccattcctgaaggacaaggtgacatagcctgtgaacccccccaggcacatccctgtgtgtctgcatctgtgctctctgttccctgtgatccccttgcaattctccacaccagtgccagggagtgattggataattctcaaactgctggttaccaggcccaaaccaaccctggctgactttaaattgctctaggggctgggtgctatggctcacatccataatcccagcactctgggaagccaaggtggggggatcacttgaggtcaggagttcgagaccagcctgcccaaaatggtgaaaccttgtctctactaaaaaatacgaaaattagccaggtgttggccgggtatggtggctcacgcctataatcccagcactttgggaggccgaggtgggcggatcactggacgtcaggagttcgagaccagcgtgaccaacatggagaaaccccgtctctactgaaaatacaaaattagctgggcatggtggtacatgcctgtaatcccagctactcaggaagtctgaggcaggagaatcgcttgaacccgggaggcggaggttgcagtgagccgagatcgcgccactgcacttcagcctgggcaaaaagagcgaaactccgtctcaaaaaaaaaaaacaaaacaaaacaaacaaaaaaacccacaacaatacaaaaattagccaggtatggtggcgtgcgcccgcagtcccagctacttgggaggctgaggcagaagaattgcttgaatccgggaggtggaggttgcagtgagccgagatcgtgtcactgcactccagcctgggtgacagccagactctgtctcaagaaaaagaaaaaaaaaaaagccaggcgtggagatgggcacctgtaattccagctactcaggagcctgaggcagaactgcttgaaccagggaggtggatgctgcagagagccgaggttgcgccactgcactccaggatgggtaacagagtgatattctgtctcaaaaaaaaaaaaattgctctaatctttatgtatttgcttgtttgttcatttgtttgagtcagggtctcgctctgttgcccaggctggagtacagtgccaccacacctggctaatttttgtattttttgtggagataaggttacaccatgttgaccaggctggtctcgaatttctaggctcaagccatctgcctgccctggccttccaaagtgctgggattacaggcatgagccaccatgcctggcttattttgttgtatgaaatacttttttaaatgaaaatgcaccctgcctaagatgctcagggaggtaggacagaaagaaggcaggctggttgttcaagaataatccccaaacaagaatgtagaatttggccaggcgtggtggctcacggctataatcccagcactttgggaggctgaggcggctggatcacctgagatcaggagttcaagaccagcctggccaacatggtgaaacaccgcctctactaaaaatacaaaaattagttgggcgtggtggcagacacctgtaattccagctactcgggagggtgaggcaggagaatcgcttgaacccaggaggcagaggttgcactgaccgagatcatgccattgcactccagcctgggcgacaagagcgaaactccatctcaaaaaaaaaaaaaaaaaaaagaatgtagaatttactatcactcatatgaaaagttgtgacagagaatgaaaagagctggtacccaagagtcagcaatctgaatgcagcatacaggaccattcctaaccctgatcgtctacagagcacctgagtccctaccccttcttcattcaaaagccctggcctctatatcccaccccttagaccctccctcctgccctcacatgctctctccatccctggcccactaactcaccataggtgacgactttgcccatgggtttcaggaggttgtagcccttggcagtatctgacccacccagagggtccatgacaatgtccactcctgtcatagagtaggggaacccaagaacaacattaggatccacagatctggagctcccctccctgtcctgtgcctccctaccccctcccatattatgccccccacctttaggggaaatcttcttgatctcatccacgtagtcagtcgtgtgatagtcgatgggatgtgtgaccccattctccttcagtgcctcgtgcttgctggccgaggccgttccgaacactgtcacattctccactgtacggcacagctgcacggcagccatacccacaccccctgcagcaagacacccataagcaggggatatggagttgccctggccaccaaccactccattctagcctcccagggactcagcctgtcaccttcattttgcctacgctcattttagggccgtgtctaatttccatgactgagaagtggtggggaaggtagctagagaggtgggggtgtggggtgagggcacgttgctaaggatagcacaccagactagacctggtgcctgaatgttaccacggcaactacacagcagaggcctctgggagccacaggccaaggcagcctggtgttgccatgacaacaacccagacaggctgcagggaaggggcctggaaggaaatctgggtggggtaaggggtgataaagtgaggggacctgtcacctgcagccatgtgtaccaagacgctgtggccaggctgtaggttgccgaagtcaaagaggaccatgtaggctgtaatgtaattgacgagcaaggcagcagcttcctcaaaggtcatggcctcaggaatcaggaaggtctggaccgagggcacagtcacctcttcctgccacatccctgaccggttcaacaccatcacccggtctcctgccttgaagaacagaagagtatcattcagtcactcattcattcacccacaggctatttactgatttccccctaggtacaaggccaccttcttccaaatgaagtagcaggagaagcagcaatagtcatggtaataataataataacatcatcatcaacaacaataacaactcacctttactgagtgctgactgagggccgagcccgatttcaagtgctttatatataatgcttaattaacccttacatcagttctttgaggcagatactatccttatcatcttcttacagatcttacatgtcactattgtgtaagatccctgaatgcaagaagcttacagttagggcagcatgaagtattgtggaaaagatcaaactgctgtggttacaaaagcggtctcaactgtttactgactgtgtgacttcggatgcataaaaattacttaatctttttgagctccacttttccagctccagttttcttatctgtcaattagggcagtttttccaaatggaaaaaaaaaattttagcacaatgtctggcacataataagcacttaataatgttagctaacaataataataataataatataatagcagcaaggaagtcacacaaccaaaagaagacggcactgtgtggtcagggccataccaaagtgcagacaaagttctctgagcgcttacagcagggtgtggtcacctcgggagaagtgtgtttgagccagcactgggagcccagaaaacatcttcactcagagatggtgcaggaggggcaacagacaagaagggctacagaggcctacgcagcagtaaaaggcttcccccccacccccacgagagcctctgtgcaggagggaaaggggacaaagataacagaacctttctctccagcttagcaagtggggtcaagggaagggcagggaaaaggagggagcgtcaggagaaaagacttctctgcgctctctgaagagcatgaagagggaggtgtgggtgctgttctgggacaatctgggtctgtcttgatccctgccaggaatgatgggaattctgtatattaacaa

SEQ ID NO: 96389 - DNA, 31821 bp, Homo sapiens
ttgtgcacatgctgtaggttatagttgagacatttattctgttagccttttaagaataaggccatttcccatatataagatcttacttaacgtgtcaattgacaacattttacttttagttgggaaagaagtcttgcttctcagacagaaaagcagaactgattgagtggtcacaaagagaagcaagaatctttcttgctttaaccttgatcacaaaggcatcagagtaacttcttgtggagtgaataagatgttgctttgtacaaggaggtgaggtttctatgttgtcatatctgtggctaccttcctgagaccacatgtagaatggagcaggggtgagcaagttaaggtaagataaacagcatgcaatccgtaggcccaatttttatgaactttgtattttcttcgtgtgtgtgtgtgtgtctgtgtgtgtgtctgtgtttgttttgttttttgagacaaggccctgctctgtcatccagactagagcgcagtggcatgatctccgctcactgcaacctccgcttcccgggttcaagcaattctcgtgcctcagcctcccgagtagctaggactacaagcacaagccaccatgcctggttaatttttgtatttttagtagagacagggtttcgccatgtttgccaggctggtctggcaatggaactcctgggctcaagtgatccacctgcctcagcctcccaaagtgctgggattataggcatgagctactgcgcccagccatgttttcttagtcatttagaaatatactttgtgtgctagagaatcagaggaaaacagatggtagtagtatccaatgtgagataatagcaagaggaaagggaagtgaaggtgaaacagagctgatccaccttgagagtctgtctttgtctttgtcatatgagatcatgtatagaatcctactctcagtaaatgagattctctcatgtatagactcttactctgctagtaagatttcaattgctagtcatagctaataagagtcaggatctgaccttaattttgattctaaaactacatcttcaaatttttaaaatgttcatttgttttttagaattgaggagttgagggtacatgagactatactctaaaaataattgctaatttctggtcttagaaattttgagaagcttcatgttcactctagaaagctaggacttctgtttttaaatgtgcatttagatcaggtgcagtggctcatgcctataatcccttggaaagccgagatgggaggatttcttgaggccaggtgtttgagaccagtctgggcaacatagtgaaaccccatctctactaaaaatacaaaaattagctgggtgtggtggcacacgcctataatcccagctactagagaggctgaggcacaagaattgcttgaactgggaaggcggtagttgcagtgagcagagatcccacccctgcgctccagcctgggcaacagaatgagactcaaaaacaaaataaaacaaaacaaaatagctgggcatggtggcacatgcctgtggtcccagctacttgggaggctgagatgggtggatcgtttgagcctgggaagctgaggctacagtgaactgtgattgcaccacagcactccagcctgggtgacagagcaagaccatgtctcaaaacaaaacaaacaaaaaataaatgtgcatttaaattttctgtgtaggatattcaaggggttcgaacccatgaactgaagccctatgtcatatttataaagccatcgaatatgaggtgtatgaaacaatctcggaaaaatgccaaggttattactgactactatgtggacatgaagttcaaggtaagagcaagtcaaaaactactgtattgctttcagtggcttctgcgtgggagagatctgggttgggctgggccaaggatctctgatctcattgtcctcctcctcctttttgaccccctctccaaaaggccctcaataaaatggtttactatggttttatttaaaaaaaaaattaaaactgtattgtttctacaggatctgtgttagagaatgtaatttttgtttctaatggataatgcccttacgatttatccttttggatggacatcacttacagatataaagtttaataaatgttatgatgctacccttattttttactttcttatttttttgggtctagcttaaaaaaaaatccttgagccgtagtttgcaaagccaaacagaaattgggcatgtatgagcctggtgtttgtattttaaacagaatatcttttacttaaaagcttactttaaaaatgctcagtgagtatatctcatctgtaaaatgatgatggtaataatagagggggcaagccaagtgaaattaatcagtgatctcatcctagaacaggtgattttttttccggttgcgtacatatattttacattaaatatgctttaaatattgtgtcataacatacattcagtaaggtgtacagagtgtacagtttaatgaatttttatgtgtgtatgcacccagataaccatcacccacatcaagatattacagccacttgtgtgtgtgtgtatatgtgtggtaaaaatacataaaactcaccatattaaccgttttaagtgtacagttcagtgttagtatttagtgttaagtatattcacattgtgtgaaacagagctctagaatttatttacctggcaaaattgaaactaaaaatatgaatgattcactaaatatttgtatgtcatgcttgtacaagggccatgctaatctctgcattgtttcagttttagtctgtgtgctaccaaagcaagcacaggtatctttaaattatcctttctcttattatttttattttcatattttttgcaatgactatggaggtctgattttccagtttgccttgtgaacagtggagtccatgaatgtatttgctgagtcttatgggcatttaaaattgttctcatttttatggcagtctaaacaaattaacaaaattgtttctggatcatatgtatggtcactttgtaaagccacaagattttggtgcctgcatttgtgtttcagattgtattggtgacaagttgtactattttcatgaactaataagaaaataacagcaatgaatttaatgcattagtgccaagtgaatgccaaattaccttcattaaatgaacatttcacaatagtagaaacataatataactggcttataccatcctcatgttgaaagtggccattttgtatctttaatgttatccctatcagattaatgttcacttgaaatttatgtttaaattttatttaaactggtacattttctttggttttatgttgtatatggttaaaaagtttcaagtgtttaggtaagagtaagataagttcacacgggaagttgaggggagtaatctgtctgcaaactatgactaaattttgcaaaacatgacgagacattaagactaaagattaaaacataagttttgtagtttagaagacatttattggacctcattttttaaaataaaaacttcagtcttttattatttaaaaaaacttccaaattaaaatttctttatctcagtaatacatttctaagaaataaaggatgacatactgtggatagtgatatacttttcccagctttgcttatgcttcacattaatttagaaggatatgtttatacctgttataataattatattttctctacaaaaattagctgggcatgatggcatgtgcctatagtcccagctacttgggaggcctaggtgggaggatcacttgagcctgggaggcagaggctgcagtgagctgagatgatcctactgcatgccagcctgggacagagtgggaccctgtctaaaaaaaaaaaaaattattttatctatacttagccacattatttcaataacagagggcaaaaaaattactattttctagtttgctggttttgtagaattttgaaaaaatatttttgaaactttattgaaaatcatctgtgcaaaattttcggaccttactgtttttatacatagtttcacaactgaatgtgacagcataacaaactgtattttttccatttgtccaattaagtctgtactatccatatttttctatttctcctaaaggatgaagacctacaagagatggaaaatttagcccaaagaatggaaactcagtttggccaattttttgatcatgtgattgtgaatgacagcttgcacgatgcatgtgcccagttgttgtctgccatacagaaggctcaggaggagcctcagtgggtaccagcaacatggatttcctcagatactgagtctcaatgagacttcttgtttaatgctggagttttaacactgtacccttgatacagcgatccatagttgcaatctaaaacaacagtatttgacccattttaatgtgtacaactttaaaagtgcagcaatttattaattaatcttatttgaaaaaaatttttattgtatggttatgtggttacctattttaacttaattttttttcctttacctcatatgcagctgtggtagaaatatgaataatgttaagtcactgagtatgagaacctttcgcagatttcacatgatctttttaagatttaaataaagagctttcctaaataaaataagcaatagttaactttagaaactgtactctatgaaacgtgttttatgaaaacatcttttacaaaaagtgcttacttgactaactcagcaagaaaggtttaatgtacacatttcacatctaaaatcaaaacctacaagaaactgcactgccttcactatttacaaatcggcctacaaggaaaaaattattctcatgagaggtgtgacaaacactaattttccttaacagccaatatctacatgcaggcctaaattagaaaaaggcaatggattaatcccagagacctatatatagaaaatcacaagagtgaaaccgtgtctcagagttaaagaaaccagggactaacagaaattcttgagcatgcaggacggcagataaaaaacaacttgctaaataaaacgcctaaacttcttccattgtgagattaaaaaacaaaacaaaacaaaacaaagcaaactggctgaaagtggttagtactaacacggatggctacctggagtctgtacaaaatgagcttgctggcgtcacagcttgaatctttccccatgtttcacactgactccctccaaaatttgcacatgcgacccatgaagggacatgaagaggtaactgcgaacgccagaggattttccagatggcttctttccttccaccaatcacctactaatcccagaatccaccccctaaacgttttctaataaaaatactgtcttaaagccaacacagggagacagattagagctatactcctgtctccttgttagctgactcacaatgaaaacttttctcaaaaaatcagcgccataatattggcttctgtgcgtatagggcaacaagccccgtttgtttggtaacaagattaggatgccattacaaagtgctgtttctctttctttccccagatttgagatttccaggcgctttccctgtccctgtatctgttcatcttctgcatcattctcttctccatatccacaccattcttccatctttcccatttctttcttaactgtaaaacagaatgcatgattcaaaatatttgtagttctctgttacttaaagtgaaagttatctttaaaaaaaaacaaacccaaccaaaccaaacgatgcaaatcaggtagtttgtagtgatatttatgtgaggttggatttgattttaaggttgagaaaaagtttttccaaatttgatttacacagttgtgggatgaagggtaagcaatcggagaaaatgtgagaattgcctatattaatacacatccacacacccaggcctgcacagactcgttggtcctggagagtaaacgcattcctcccaaacccagcagcgcctggcaggacagaggcgggcggggacctggctcagggggcggctgcctcgccaggcgccacgaagccccggcgtcccacaggtcccggaggccgctgcgtcgcggggagctgggctcgggccgccggcggttgcgccggggcagccccgcggggagagcaccatgaggactgactcgggggctcggctggaggagggccacctggtgagcggcgaggggcgcgtcggcctcgagaggtggcgggtaaacagctacacttggcagtgggggtgggtgtgtgtgggggggcgccaacgagctgggaatcactaagggagggccttgctcgtggggtgcgcgcatccgcccctccagtgttcacaggaatgggacggagacgcaggcgaggccgggaccgaactcccggagtgggagagagaggcctggcatgaagtttgcggggacctgagcccgcgttgccacgacgacgcctcactcatctgaggcccggggcccggcgggtgccggggcttccagccaggcctctcctagactcctccgaggagaggtctgtagctgcccagaagagatctgttcgcctgcggagtcctttaattaaggtcttccgtcacgccccgcttcccgcaaacaaatcaccgccaccacttaggaaaccacgggaaagctgtgattgcagcgccacggtcgccagatttctgctcctgggcacattacccccaactccgaggccccctttttggcagggctagtctggactggccaatccaggtccctgcacgcctctcaccgcaacatccccgcagggcgctgcgcgcggggtactagccaggcggcgcggcccgatgacgcattgcgcctgcgcgcgcgaccgagccgggaggggtggggcgccaggtgcttgggggccggcggccgccgaggccggctaaacgsagaatggggaagaatcctgtggtaagcgagccttagctacttttaattgttaggatttttgtcttcagttgagccrtcctacttttgaggattagaggttgggtctctgggtgggtggaasgtcatttttgcgggacttttgaaatcagttacgtgaacagagccctgggatcgatcgcgcgcgcttcgtagcatctttagaacaatagcgcgttcctgtgactgtcattcttctccaattgtaattttgactactggatggtattacggcagcttgcctcgtcctaatcttgtagtacttgcattaatctactgttcgaacgaatggattgctaaatgggacaaactacaagagtgtctaaaatttaacccttttgaataaatgtcttatgcaagcagcatgagatacttggaacattaaattggcttctaggcatttctgttactatatgattctaaaatacttctcaactgtaatgctgtctgaactacaaacacttttcttattcatgtaaatgagggtttagaagggttccccccacctttctttctgccctaaaacgcattcttcccagtgtatgcaactggcctttttaaaaattgtgttagtatgtggtttaaaacctccatttgtttcccattgaattaaaacaaaatccaaacttcccttggtctgcaaggccctaactaatctggctcctgcctacctctccttggtaattgtgcggsagccttgctgtccttttacctgaaacattccaagcccaatttaacctaaaaatatttgcatttgttccggttgctgctttctcattcaggtctcagctcaaactcagagaaactttccctaacaaaagtagcactcagtctccttcattcattacgttttgtgtgtgtgtatcttgtgtatatatatatatatgcacacacgatatgtatacaagatatgtcttaaatatagcatataaatatattttatcgtacatgctgcatataatatatagkatatattatcatatatatatttttaacattgtttctaatactcaaccactagaatgtaagtttcataagagcagagttctctccattgtgttcattagtgtattcctaatgcttagaaaagggcctggcctagagatggaaaggaatgtaggaaggaaggaattttatatgaaatttaggatgggagaacaaattttaaattgcccatgtttctcatcagtacctcccaggtttcactgatgaacaagattatcaagagatttgaagatcctagtctgatccattatatttttctgtcatgtctgaacaacagacttttgaaagaattgctttggccgggcgtagtggctcactcctataatcccaccactttcagaggccaaggtgggcggatttcctgaggtcaggagttcaagaccagcctggccaacatggtgaaaccccgtctctactaaaaatacaaaaattagccgggcatggtggtgggtgcctgtaatcccagctacttgggaggctgaggcaggggaattgcttgaacccaggagatggaagctgcagtgagccaagatcgtgccgttgcactccagcctgggccacacagcaatacwccatctcaaaaaaaaaaaaatagcktgatggtatttgaagtaaagatgctctaggcttttacttacaagcaaatttattttttccgccacagcgtcctccacgagctcttccacctgtgccaaggtaaaaataatttacagtaatttcattattgagctttaaaaatggaaaatgaagacagtggaaaaattgactagtatcattgcaaaattacaatgattcaggaaactcttctgaaaaatttagggattttctgaaattttaaaggtgaaaaatccttgaattttaagaataacagttataatggaatgttatatttaaaagcctgaatatcaacatggtaggataatggatccattccctttctaactgttttggtgtctttttttttttaaatcagaattctggtcttttgtgagaatagtttcctcagagtttaagctgattttaatcagtcacaagtaagagttcttaatctgcttaatccattttattaatagacagtagggaatatgtatatgtaggttcagaaaatattgacattattttattagcagtgttattaaaccacttaattataaacagtaaactagtttgtaaactagctattatgtgaaagctaattttattttaaatttgtaatgatttaagtcaattttcactgtgaatattaacaggtttctaattaattgtttcttttttgtctttgtcctgctgattaaatttgtttggtgttatatgacgtgttagtcaaggtgagttagtttaatgtaaatataatatttggtgttcaaaaattagtttgattccttggtttgtttctcttaaaactgagtctgaatggtgtaatttgtaattctacaatatgtttttgtgaaataatctcccatgactaccatttaaaaattgtcattgatacatagcactagatgacctttccattataaaagcacttcatccctgaatggggtcacccagcacataactgttggctaatttgtagctctataatgaggactgcaccttcctttgtctcatttagtcagggtagacaaggttatactatactaaaacccccaaatctcagtgacttagtgtcacacarggttatttctaattaatacaaagtctgctatggcaaaaatgggggaccattacctttcactacctttttactattgatatagcaatctaggctacttttttttttcttttgttttgagacagagtctcactctgttgcccaggctggagtgcagtggtgtgatctcggctcactgcaatctctgcctcctgggttcaagtcattctcctgcctcagcctcctgagtagttgggattacaggcgtgtgccaccatgcccagctactttttgtattttcagtagagacagggttttgccatgttggccaggctggtgtcgaactcctgagctcaagtgatctgcctgtcttggcctcccaaagtgttgggattacaggtgtgagccactgcgcctggtctgcaatctaggctacttctgtgctgtggtcccaccatcttaacatgaggcttcctcagtcaccacaacaagggaagagaaagctggaagattactcactggctctttcaacgtttggctctgaaatgacacagatcacttctgctcacagcctataggccagaaccagtcatagactacacctatgtgcaaggaggctgggaaatataggggatcagatgaatatttgttgaacccactttctgtgtcatggtttctaacattactgacatgcagtgtgctactggtaccacactgtgggctctctctgatcttctcaatttcttgccttcttcccctaatctataaacgtttgccaggcccagggaagagagggagaattcttccctgtttaaaagttctcttctgactgttctctgcattgaattttaggcacccttttctgttgacgttttttcttgctttatagatgatattccacttagtcgtcctaagaaaaagaagcccagaacaaaaaacacaccaggtaagacgttattctttgttgtgtgggatcacaagttttcccaggacctcaggcgtagtaaacatcacagataagggagaattaaggccccagcagccccgaatctccacttcattgaggatagaattaaggccagtttgaagcagtggaattcctggtggtggtgaggtacagggcagtgggcagcctgaggagtatctggacgcattcatggaatagaaggtggtgccatctaagctcctatttccatgatattcctggactctttaaggtcttttatccccagacaacatacatggttttaagctatgattgattccagacccttgaacaagatactgaatttagaaacacagagttcttaaatctcacttcaatcagaatatctctacattacagcatgagtctgaaggcatggccacatcatcatttaaatagtaaagcttcagtcatgagcagaactcgtttttgtcttagtcatccactrataatcctggaagttgcatccgtaactctaaactcagcacatctagaatccatcgttgcctttaagaataaataatttttttacgtctcatgattttctgttaatggaacctaccattttcccagccctcaggcctgaaacctcaagattatctttacctgatcctttaacttcactctttacttgagacctctcacactcctaaaaggtttctgtggttgctgctccttttttaaaacaaacaaacaacaacaaaaacataaaaggaatcatacatactatctttgtttcttaatacatagagttctatgtattcttaaacagtgacttcattgtattacatgataagaatgtaccataatcactgctctgttatttatttaggttatttccaatttttcactccaacaatgttgcagttctgcataaaatagtgggtggtagggaagaagtacttctgtaggatggattgctagcagtggaattgctaggtgcaggatgtgtgcattattagtatgactgactctgctaaattaccttaaggaagctttagttattatcttgctacctgtagagtctgagagtgtctcattctctaaatccttaacaacattggacaataatcaatctttaaaatttttttgttaatttagtgggggaaaagtagcttattttagtttacatttctctatgtactactgaggttaaacattttcatttgtttattgatacatttctattttttttttttttttttgagacggagtcttgctctgttgcccaggctggagtgcaatggtgtgatcttggctccctgcaacctccacctcctgggttcaagcgattctcctgcctcggcctccttgagtagctgggactacaggcrcatgccactacacccggctaatttttgtatttttagtagagagggagttttgccatgttggtcaggctggtttcgaactcttgacytcatgtgatccgcctgctttggcctcccaaagtgctgggattccaggcatgagccactgcacccagtgcaatttctatttcttttgtgaagaagacaagcaaggaagggaatgcagtcaggtatgtgttaaaattcttttaaaagatttcatgagggaagaagttgaagtgaatgaccaaatgaagagacttataaattacctgctaactccaattatccatgatgactttattattctttaacttattaatgaaggactttactatatagaggctgatgaaaattcttaaggcaagaggcaagtaagagaattctctatggtatcagtttttattatgttttccacctttttcaaagttctaaatgttctgaagcaatttctcctcctcctgtcttttgctcttctttttagccccctcgttttttcttcctcagcctttcttattccttcatttatttcttttcctaacttaaagcccaaagttacaggtgaggaggaaggaaagatttgggggataattagttctgaaagagatggggttattctataggaaacattctagttaccttttcctccatctttttaagattcagtgatctttgctcaagtaatctcatttttttctactctgtttttctatagcaagtgcttctttggaaggccttgctcagactgctggtcgaaggccctctgagggcaatgagccatcaactaaagaactcaaagagcacccagaggctcctgttcaaagaagacagaaaaagacaaggctacctcttggtatgtgaagaaaccaaggttargttgtgatagcacttgtgattttgatgacatgataaaaacctctctgctttcatttctttccccctatccatatcccacaggtggtttcttgcttttatgtttaaaatatttaccactagaataactccaatggcttaagccaagaatactttacaggtctcttttgatcatatatgtatagattatgagaggagggcaacaaatacaggactaaacagaaagttcagatctcagtgcatagaaaaatctagtaaatgatgaaatggacatttcagattagtggggaaatggtagattctgtactaacaataatatagtgaaacaacagctaacatttgtttagtctttctatgtcccaggcagttcacaaggtaaataaaatactataccattttttggcctatcaaattggcaatgcttttttcaaattataaaatccaatattgatgggaaatgggtgcactcatgctttgctcataggagcatagatacagcctgtctggatttctgggaatagtagtaaattcaatagctgcagtaattaaaggatgttaactgcagcgttatttataagagtagaaattggtaatgacccagatatttaacggtgtgatactggctaaataaatcatacttcatccataaataggaaccaggtacccattaaaaggattgttagggtgacacagataatcatcagttgtgtattattaaatcaaagaacaaaggttataaaatagtatgtattggaggatcccatttttgtaaaatatactatgttaatttcttagggttgccataacaaattaccacaaactgtgtgacttcaaacaacagtttattttttcatagttcttaggtgagaagtccaaaatcaagttgtctgcaggactatgctccctctgaagtctctagaaaagaatccttccttgtttcttcgagcctctttttttttttttttaagatggagtttcactcttatagcccaggctggagtgcaatggtgcgatctcagctcactggaacttctgcctcccgggtacaagcgattctcctgcctcggcctcctgagtagctgggattacaggcatttgccatgatgctcggctaattttgtattttttagtagagacagggttttgccatgttggccaggcttgtcttgaactcctgacctcaggtgatccgcccacctcggcctcccaaagtgctgggattacaggtgtgagccaccgcgcctggccatttcttytagcttcttatggttgttgacagtccttggcattgtttgacttgtggtggcataatgccaatctctgcttccatcttcacatttttccttgtgtgtctgtgtccacatttccctcttataaggatatcagttgttggatttagggcccattccaatctagcatgacctcatcttaacttgatttcatctgcaaagactcttgtttccaaataaggttacactcacaggtattatgagttaggacttgaacatatctctttttggagcacagttcaacccagaacgtaaatatgtacatacatctacatagtaaaaagaatggaagaatatagcagtgttacagtggtagaagttttagaaggaggaagtatgatttttaaaattttcttccttcatttattttactaattttttatattttgagcattatgacttttataataattagaaaaatgacaaagagttgtattggagcaaaactcagggaaggaacaaagatggggagattagtgctctcctattaacatcagcccttattaataatttattataattttcctaattacttgtccttctagaaaacggcgtgtcttgattggatggaagaattataggagtagaagggcaggaactagaaaagtcaggagaatggagcataattttggaaggcaagttgaagtgggatgccacagtgcctgggggcactgagggtctatgagaacgaaggggcggatgatggcagaagaaggaaaagagacagaaatggtgctcagactagctttaactactctacagtttatttcattagtggcagtaaatgtagtttcattaaaagtgcccttttagtaatttagttaagatacaagtttaaaaatcaagatggataccaatacctagttttataatttgtgaaaagtgtgtttacagaaatgacttttttagaaaattcaggacccaactaagttttgaatcaaaaaggacctgtcattgccattccaaagtacaccaagcctggcaggttcacctttctaagtttctggatttaaaaattgtgtttttatttattttgttcaggatgaccaatggtaggctctactgcttgcattatatttccagtcgaggctgtaagtattttattacaatagaattgtaaggtcttgaaggtattccagggagctagtatttccaggtaggaagagtagctagtggattagaagaaggcttcactgactcatttaaacttaatacctaccctgtgtgcagaaaagagttaatatagcagacctgagactgctatccttggaaaagcctgctgataagattggccgttagctggcatctgggaacttggatgataaacagctccctacactgatagaaaactttccctaaattataaggtgactcacggtgcatttgtgcacacatagtgatttttgctgaacatctgtttcccttccgggcatccagaattttggtatgtgctaggcttatgtgactagcccctaaccttgggcactgtctctgatgagcttcttttgtacaacatgtgtcacatgtgttgtcacaactcattactctccagtaatgttagtacatcctatttgactccactgatagaggactcttggaagcttgtacttggtttcctctggacttggtccatgtactttttccttttgctgattttgctttatatccatttgctgtagtaaaccataattgtgagtgtgatgatttccaagtcctgtgagcccttctagaaagtcagcgaaccaggagataatcttgggaatcttcagcacagcctgggtattgggttacttaatttttttccatattgtttggcattacaatttcaatttttacattgagagtttagaagtataacatttttaaaaaattaaaaatttgtaagatagtgaaaacatttttgcccaattaaaattcttgaagttcttttctcttatacaagtcttgtacattacttttctttttatgttttagttatttgaaaagttaaatttattttgttttcagaattggagacttcctccacccaaaagaagtcatctagttcatctttattacgaaatgaaaatggtattgatgcggagccagctgaggaggcagttattcaaaaacctcggaggaagacaaagtaggartttatttattcttctaactattctccaggattaccctgatgctttgtttggagctccgaagcagtagcttctcattaagtcttattacatacttgtatttgtgtacctctaggataagtattattacaaaaaatcagttaaaccaatcgaatgataaatttcagaagagtaaaccactgagaaaataaaaaaaattaagattgtacttaaataaaaaaacttaagagccatctctaaaaaagaagaacacaaatagaatatataagtagcaaaattaaacattaaggatatttaaaaattaaagataatgaaataggctattgtgatttattttcttatgttaacagaattcaaattatgattattttaggaataagtaaaactgggttttagcattaagataaaatgagtagtgtactttaaagaaataacactggaagkcatatatatagcactattatttgtwtttgaaaatgaacctacaaatagtgatcaatgtctgtgttagtccgttctcacactactaataaagacatacccgagactggataatttataaaggaaagaggtttaattgactcacagttcagcatgacttgggggtgcctcaggaaacttactatcatggtggaaggtgaagcaaacacacccttcttcacagggcagcaggaaggagaagaattagagctgagtgaagggggaagccccttacaaaacgatcagatctcctgagaactcactatcaccagaacagtcccttgacaggtggggattattacaattcaagatgagattttgggtggggacatagccaaaccttatcagtatctatacagaatcatacagttttaaatttggaaagaagcttacagatctagttcagtcacttcaattttcaaatgagaaaactgaagccctcagaaatgtaagtaacttgctgcacataatagttaataaccgatttatttgagtaaaaaccacatttcttaactccaagtccagggccctttccattatatttatagctagttccttatgtaagtctgtaaaaaattcaataatcatctatttttcatacatacgtccttattacaggaaaacccagccagcagaattacagtatgccaatgagctaggagtagaagatgaagacataatcactgatgagcaaactactgtggaacagcagtctgtattcactgcacccactggcattagccagcctgtaggcaaagtatttgtggaaaaaagccgtaagtagatgccttgttttagaatatgaactctttaaaaattgtccaaggatatcctttatacttctggaaatctgaattaaggaattaagcaaaactgtgtacaacaatttatacacaaaactggtcatcatgctatgattcatgagagtgaaaaactggaaacaacctaaatgtgaaataggagaggaataatgtcagtaagttgtggtgtatctatataataatgttcttcaccattaaacrtaatgtttagggagaatttttcattttatggaaagattctgataaaaaatgagcatatacacatgtgcacacacacacacacagtttgatctatgcataggacaaaagacttgaaggaaataggctcaaatattaatgctggttgtttctggatttatggggttatgggcaatgtaaagatcttccccacccctgcctgattctttattctttcttgtactttaccagtttgctgcaattggtagtagttgtggtgggacagataataatataaattctacaattgacaataagagaaaatacatgatgatactaccatattaaataagaaatacaacattatagctgtatattcttttgcaagatagttgtgacattgtataatgtatactaggtttgcagtgtattttagctcaggctgctataacaaaataccaccgactaagtggcttaaaccacggacatttatttctcatagttcctaaagctaggaagtgcaagacaaggttccagcagattaggttactggagaaggccccttcctggcttgccgacagctgccactgtgtcgtcatgtggcagagagagctctggtgtgtcttcttcttcttaaaaggattataatctcatcatgggagctttatcctcatgacttcatcgaaatctaattacctcccagtgacctcgcactcactggggggttagggcttcaacatatgaatttttgggggacgcattccgtctataacacagtgtttaagaaaaacctactcaaagcatgatcatgactatatactaccatggatatgttaagcatatgctgcctaaagaactcatctgaaacataaaggttagtccttaaaatttacaatttagattttgtgtaccttgttttagaaccctacttcagaagatcccatttaagggatcttgcagttcttggccaataagaaacctgtggtctagagaggctgacttacccagtgtctcacagtttggttagggtggaactgggacttgaactgtggttttatgacttctagtcacrtggttttattcatctaccacgtggtcatttaaattaccgcagttctttttcaagcagtatcacttaatcctcatttttattcttgcttcacttagcatagaaatttccctgctagagtaactggccataaaaggtaccagtggttctattgtctgcccagaagttgtcttttcttagggaaaattgtcacacccctgtctttcatcctccaaaacacctgcgaactgggtttggtgaggataattgaaatggaacctttcctgtttcctgaggtctatttgtggattactagatatacaagaaggagcctctgaatcaacagtaaaaaggctaaagccctgctcatacaatattgcagtgctgacttttgaactgatgttcttcacaggaatgttctaaagagaaatttatgaagcagcctatttctttcctgtcatcccagaaagccatgctacacatcctgacatcttttcctaagaaatttaaagtagttttcaaatattgacttaccttgatagtataggcatataaactttaatacttctaaagtctctaaattagaattttgtagactaggtcatgttaaagatttctagactttattctgagttgaaagttcatttttttttattaaatataattgatttctgaaattgttacttcactttggattgagaagaaaatacactgacatcgcttatttttcttcaagatgaaaaattatgtttaaggaaccccaagaaaagatccttctgaaataggtactgagtcaaggagaattttcagatagaacagcaatatttcagtcttagtttgcggcttcctgagtatggaatttaaaaaaaaaaatggctaccagggttctctctcgctagttgttagtaattacgttatgtgttcttagggagattccaggctgctgatcgttcagagttgataaagaccacagaaaacatagatgtgtcaatggacgtgaagccttcctggaccaccagagatgtggcacttacagtgcaccgggctttcaggtggctgcttttgttggacttttcttaaaataaatgttaactgagttctgtaattaaagaaaaaaataacctcttggttgttcagtattattaatgaaatcacaacttaaaatggyaggtaggtatattttttaaacatcctattggaattgagtgatctacctatcagtgtaactaaaaagaaagagcttgcttttacttgtcatgaaatgttgaattttattcttgtatatgaagagattttaaacatgttttagctttttactttagtaattcatgtataataatcaaacccttttccattcaggatgattggtctcttttctcatggattcttggctggctgtgctgtgtggaatattgttgtgatatatgttctagcaggagatcagctatccaacctctcaaaccttctgcaacaatacaagaccctagcgtatccattccagagtcttctgtacttgcttttggctctgagtacaatttcagcttttgacaggtaatgcctatgactccagatctgtctaacttcttcaggaggaaatgctgagcaaaatgtgtcactgaccatgatagttttcaaaatagaattatagagtatcaatgttacttcaaaaagttttaaggccagtctacttctgttcttttttgaggggatgagaccattgtaaacaaaatattcccaaaagacttcacccattccagcatcaattcataagtccaaaatttcatccaaatatagtcaactcagaagttcctaaatgtcatctaaatcaggtataggtgaaactcagagcatttgtatttgtctcctagcactgctgtaacaaagtaccacacactggctggctgaaaacagcacatttattctcttatgggtctggaggcgagcagtctgcaatcaggatgtggccagggttgattcctttttccagggctctgagggakagtctgtttcatgaccttcccctcacttcagtggttgctgacagtccttggcattccttggctgtagatgcatcattccaatatttgcctctatcgtcatgcagcactttccccctgtgtatctctgtatctgtgtctattctaataaggacagcagtcatactggattagggttcatcctaatgaccttatcttatctttattacatctgcaaagaccctgcttccaaataaggtcacattcataagtactccaggttaggagttcaacatatctttttgggaacacaatttagccccttttaaaaaaaatccaccgagttagagcccaatgatatgggtaatagaaagaggtagaaactaatgaaattttatagatcaagtttaattttctttaggatgttttaaccccaaaggaatgttgtccaaagtagtctagttagatgttttatgtggcctttgtaaattagataattttgtcatgcgtgttaagtatacactgtagctacttaaaacctagtaatagtatatgtgctagcattagactagagaaggaaaaaactatagtcaagaaagtaaagttttgttaagtttacaactgcgctgtgacaagaaacttttatattttctaggattgactttgctaaaatatcagtagcaatccgaaattttttggccctggatcctacagctttagcatctttctgtgagtaagcagtttaacatgataactgtgtaatacttcagttataccataattttgaaccaggataaatataattttttttaaaagttgtattactgctccttataaacattacctatagatgttcagtgaatttgtaattagaaacataaaaggcataatattgatagaattattttttcaattgaggttcatctaaataactttgaaaagcttaatttattgtactatattacttactttttaacttttgtattttctacttgacattaaacagattcagcgggtatggccttttaataacaaacaatattttatatctttctgatcatttggaatgcattttgttctaagttttgagaatattaataaaactagttttaggaccttgagcaagtcatttaacttttaaaaagatgttctaggttcttgtcagttctaatgatgaaatagtgaacgtctcaaaagatccttctgcacctattgttctcaaaaatttatataaggatgtctggcctattgaaatatatttatttggtcaaataaatttcttttatatcatcagtcatgaaagtatagattattttcgatattaatctataaattcaaaataaaccaggttgttaaaaattattagtaatttcatttgtctttttctcagtgtactttactgctcttatactatctctgagtcagcaaatgacaagtgacagaatccacctttacacaccttcttctgttaatggtagcctctggtaagaattcacaatgacattagcaattgttaatggcaataacagcaayttttcttatccttccattctttttcaactgcaaataatgaaggctctgtttttgtttccaaatatatggcaagaaaatacttattcctttggttaatgggtaactattgttatgtccacctgcatttttaatgaaatatcttccttttaaaaatctgttttagatcttcaagttatagtttttttttttttcgagatagagtctcgctgtgtcacccatgctggagtgcaatggcactatctcggctcactgcagccaccgcctcctgggttcaagcgattctgcagtcttagcctcctgagtagctgggattacaggcacccgccatcatgcctggctaatttttgtatttttgtagaaatgggcttcaccatgttggccaggctggtcttgaacttctgacctcaggtgatccacccgccttggcctcccatattgttgggattataggcatgagccactgcgcccagccaagttatagttctaaaataagtcatcatatgatggacggaaggagccctgcattcttaccccctgtcagggagtttcatatcccagaacagtgatgggagtgagtagctgggatagattcagaaaaccaagcaatgctagaaagagcggaacagggagagccaacatytgcagatcagcggccagccatgaagctgacaggatggctgagattatagttcataaaacttagagaagcagtcttttttttttttttttttttttttccccaaatgctgcacgtagcatccaaaagtagtcttttttgagagagtggctagggacattaggtaaagagaaagcaaagatactttattgaggattaatgtcatggtagttggaaggaaaacttttagagaattttcttgggaatactaactttgcatttatatgaatgtatacagcagatctgttcagagtttaaataacctttgaacccttgttctcattatatatgtggtatattttacagggaaattatattttctttcacactttacttgttatttctctaggagaggactgctgttttttcttaaagttcataaaatagatatatttgtgtatatgaaccaaactgaaggcacttctaatgagtgtttctacatttttagggaagcaggaattgaggaacagattctccagccatggattgtggtgaatctcgtggtggctcttctggttggattatcttggctatttttgtcttataggccaggcatggatcttagtgaaggtattaaagaaaaaaaatagcataagaatatcctgaaatcttctataatggttttataaacctccttttaataggtatagcttataatattccaataacaaagacacatttaaattaaaatgatacaagaagagagaaaataaagtggtgtaacagaatgccaagagaagcagggaggagtgtctaggagggcttgagtctggaactacttaatgaggggcttctgtggcccttgtgcattttcaggaggtatttcttctcttggaacccttcaagtaatgtagaaaaagtctttgctcttcacttctcttagtctcctgctgatgaattttgaaataaatcatgctttgtctacatagcctctctgtcggacacatactcaagtcaattattcttccttctctatttggtacaaattcttaaccgttcattggctaacagtgtttagtactcttttaacatgctcagtgtgcagtgattcactcatctctagtccccagaccccttttggaacacctgaagaagaatcatcatattagcaaactgctaaccttttatgctgcttgaggaactgtttagtatttgtattgtaaattgtgtttccttggccaatgttcaacagttttacccttgaatatctttttttttttattttttatttttggagatggagtctcgctgtgtcgcccaggtcagagtacagtggctcgatctgggctcactgcaagctccgcctcccgggttcatgtcattctcctgcctcagcctcccgagtagctggaactacaggcgcccgccaccacgcccggctaattttttgtatttttaatagagacagggtttcaccatgttagccaggacagtctcaatctcctgacctcgtgatccgcccrcctcggcctcccaaagtgctgggattaaggcgtgagccaccgcgcctggccaaacatcttttatggatattttctgggtcttggttattattttattttttatttgaccaactatttacaacctatctgcctcagaagccttagcatgcagaatttcgccaacatctatgctaagtaatagtttaaatgtagaaaatgtcagctaataacattctacattgtggctgggatcaaaactgcatctggattgtgcagtattcagtctaaatatttccagaatcctgttcttttaaggccatgttagtcatacaacatgtggatttaaaaagtaagtataaaatgagatgataatacctggcttcttgcgttgttttgatgattaaatgggatgacccatttaaaatatcctggcacacatctcttgttagttccaagtccttcctctgtatctgtcccctatgtttcagatgatctgatcactgtagaattagacattttagctgtttaatgatctttgattctctaagtgacttaaatttccaggtaggattgtgtatattgtctctattacattttacttttaaggggtctataatttaaaatttaaatattttaaaatgtaaaacttgtacatttgttatcagcttaccttttaaatcatatttcactgtcaagaaatcttacttgagggctttctattagtatatattatgtcaattttttaaaggactatttataaataagctatacaactctgttggaggtactgggaaacaattttaagtatgatctgttcattttcttctccagagttaatgttctcctcagaggtggaagaatatcctgataaagagaaagaaatcaaagcctcttcataataccagctcacctttggaggaataatgacccagtatttgtcccatttttgtttttaaatgtatttttataagatgtatacatgtgtatttgtaatagattttttgattatataatactgaaacatctctcaatattatgaaaaatgttaaaattgtgtttgctgtttatgtctaaacattaatttgtctagcattatcatcttaatgacaaagggaataatgaactagaaaccagcaagtgaaagtgtttatttcctattttctcaaaacagttgtatttataactattaccttaaaaagcactggtttagaaaaagccataacttaaatagtgttataaaatatatatcaggtttaaacataaatttagcraatatggtagaagggaaaaaagccttcatttttgacctccccttactgaataaattgaaatatgaagtttgtcttttctgaaactggcttagtgattgagtatcatgtaataattataatataatttagcttgaaagatgctctacattatgaccaataaaaagggaatgtatgttttgtttgaaaaattatataacctaaattttttacctagaagtaactaaaaagttgcttctcattataatctgtactagtggttctcatatctggttgtacatcaggatcatagagggagattttaaaaatctatgtagcaaaagaggctgagcagggcaaggctcaggggaataaaggagagacctgtgagcttgtgggctcccagttgacatctgcagtaccctttcctctgtcccttttttctgagtgacaagaaataggagtagaaattcaccatctctgttctccagctctttgtcagagaggtttctggttttccaggaaatccccctcttgagatgggtcctgcactgggaaagatctcttcagaactatatccaatggtacctcagctgttgtatatgagaccctaaagctcaagttgaggagaagactagctatgggaaaaaatgtttcaaaggctgttgagcacatcaataaaactattgagcctgccctgattagcaagcacctgaatgttatagaacagaagaggattgacaaattgatgatagagacagttgaccctgacaataggtctaaatttggagtgaacattatactgggaatctcttttgctgtttgtaaggctggagctgccgaaaagggattctccctgctgtcacagaattgtgaatttgctggcaattctgaaggcatcctgctagttccagctttcactgtgaccagcaatggttctcaatctggcaataagctggcagtataggagttcataatcttccccgtcagcaaacttcagggaagccatgctcgttagagccaaggcttagcacacttgagccgtgtcatcaaagagaaatgtgagaaagctgctgccaatgtgggggattgtggtaggctgcataatgtctcctaaagatgtccatgtcctaatccctggaacttgtgaatatactactttacttggccaaagggatttgcagatatgattaaggttatgaaccttaaaacggggacattatcctgtattatccagaagggtccagtgtaatcttatgagtccttaaaagcagagaagaaagccttttatgtctgtggtcagagaggtcagaagttatgatattgctggctttgaagatggaagagggggccatgagccaaggagagtgatgaccttgcagctgagtacggcccttggccaacaatgagcaaggaaatggatttcagtcacataaccacaaggaactgagttctatgagtatcccaaatgagcaaggaaacaaatcctcccctagagccaagaaaggaaggcagctctgtggataccttggttttggcctggtgctgcccatgtcatacttttgacatacagaactgtaagatagcaagtgtatgttgactaagctgctaaattggtggtgattgcttatggcagcaatagaaagctatatatcctagagaataaagaaggctagagctgctgtggaatgcacttgggaaagctggctacattgataatatgtaactgccatgggcatagttgcctttgtattcttccaggtctgggaagtacaacttagacttcagatctcgtaatgacccaggaggcatataaacctgagcagctagtggccctgtacaagtccttcatcagggaaaaacattgagtattccctgattaaggacttgtacagaggactctgttttccctggtgtttctggtgtgtctcaaaaattgtttgactgtgatgacagggaagtttggaagaagttcactgctaatgcatgtctccaggaagcagggaatgatctcacagtgacacttgaggcacattgctgaggccgtcgatgagaattcatgtaactttctccagcttacagtggactagattgacatgcaagctgatccagtccaattggtagggcatcatggtttctcattactcactgacttaaaatacttttattgccatcctggtgaagcactgcactgggtagataacacaggggcaccttgctgatcagagcccttggccaggtacaaagagctcagtttctaaaactctgtcatttcaataatgttataaattgaatcatacagtatgtaattttatgggattcgctttttttctgttgatctctttttttctgagtcatctcagctgttgtgtgtatcaatagttcatttccttttactgttttgtttggtttaactcattgacctattgaaggatatctgggctcattccagtctgtgaataatgctgctgtggacattcatgtgcaagtttttgtgtgaacattaagttttcatttctttaagataaatgcccaggagtgaaactgatgggttgtatgtagttacaaactgccaagctgttttccagagttggcggtaccattctaatttcccatgacaattttttgaagagtccaagctagttgctttagagtgcctcacctacattttttaattgtctgactttttcctaatgacatcacttaatttgttcctcaatctcctgaatttcctatagactggaggttaggtctggtggtttgattagattttttaaaaaaatatgacttcatctgtgatgctgtgtactttatgttgcataacatgaaccctaagaacagagtgagctgctggacagcaagtttcatggggtgcagtaattaacacaccacatagtataaatctgaaataatgacaaatgtgttaagggccttgggatattgggccatgtactctgaggagcacaaggtgaggtgcaggttcctgcccctaaagaactctatcttttgagattagcaactaacagtgtgagcccactaataggatgtgaaagttgtcaaaatcaagttctggtcattgtgttaaaaatcctaacaaatagagctggggaaggccgtgaaaggacgattttcatgcacagatgtctgataatgaggactatcattaaaagactgcacaaaaccacaccttgcacaaaggccatcacaacctgacacacacaaaaaatacttctatgaggacatttgcccagcaactccctgtccaatgtccaactggcaacatccttgttattgatccttgtagccaaggataattctctcaaaacaatcatttttgctttaaaaaccgttgtcttccttgacctccctgtatatgcacatagtttactgtggcacttgtattcttattgcaatgcctactcctgaataaacatcattttctttcagagagtctccctctctgttatttaggctgacaaggatatgccaagaagtagcttggatatagcagttaactctgcctttaggatatgtgtatggggatataagagttaactaaaagctgacctttgagttggtccttgaataaaagaagaatagattccaaaaataagaggaataaataatgatcctgagctaggagagtacattttgcagacctttggtttccatattaagaaattcagatttttatgtacaataaagaagttctggaattctctggttttgttctgtttgcatttatttatatttttaacttttaggttcaagggtacatgtgcaggtttgttatataggtaaattttgtgtcatgggggtgtacagattatttcatcacccaggtaataagcctagtgcccaaaaggtagtttttgatcctctcccgcctcccacccttcgccgtcaagtaggccccagtgtctgttgctcccctctttgtgtccatgtgttctcattgtttagctcgcatttataagtgagaacgtggtatttggttttctgttcctgtgttagtctgcttaggataatggccttcagctccattcgttactgcaaaggactaatacgggggcagtgaaagggatggatgacagcaggttggcagacccatgagtaaatcattgcaattgtctcgtgtgtgtgttgtcccaaattaggtgccataaagggaaaaggtaagtaagattcagatatttagggtcagaattttaaaatgtgtctgaatgtttaagattttgtggatatgacattgctgcaccaaatgagtttggaacctactagaggtttaagagggaagatgaatattaacgtgttatgtgtctgtggaacaattgggtaaagatgtcaaagtagactgttggatatttaacatctggagctcacgggacagtgtagaggaagtaatgactgacactgtaaatcttctagaaagaaatggtgcagggagaaaaggactcgtgagggctacagggcggacaagacagtgaactaaagtggttgggccccatgaggggccttgctctccaccagcgtgctctgatttccttctaaaggagactgaaatggcctggcaagtgcttgcagcagaccctccaggctcgctaagcacgcatgcttccaaagctggcctccagccactcccagcatgggcccggcctgagtgggtcactaggcggcacgcacgcgctgggaaaatgtgagaaaggctgcgggagggccgcgcctgcgcagtagcgggccgtcggttgggcgcagacaggccgcagaagatggagagatggagccaccccaagagacaaataggcctttcagcacacttgataaccgcagcgggcaggtccaagtcctgtccgccaccccgctattgcagaggaatccctacagcagcccggatatcatgcacattaaagggtcggaggcttcttcggtcccttacgccctgaaccagggcacgacggccctgcctaagaacaagaaccaggagggcaccgggcaccggctgctgaacgtgagtgagcgggggcctggccggcacctggaggaccggggccagcagggcacctggagggtggtgaaaggattaaagggttcaatgtgtgccaattgcatctcccttcaattggcacacattgaaccctttaatccttttttttttcgtttatagcaattccttttttttatttttattttttattttttattatactttaagttctagggtacatgtgcacaacgtgcaggtttgttacataggtatacatgtgccatgttggtgtgctgcacccattaactcgtcatttacattaggtatatctcctaatgctatccctcctccctccccccaacccacgacaggccgtggtgtgtgatgttccccccccgtgtccaagtattctcattgttcaattcccacctatgagtgagaacatgcagtgtttggttttctgtccttgcgatagtttgctgagaatgatggtttccagcttcatccatgaccccacaaaggacatgaactcatcctttttatatggctgcatagtattccatggtgtatatgtgccacattttcttaatccagtctgtcattgatggacatttgggttggttcctagtctttgccattgtgaatagtgccataataaacatatgtgtgcacgtgactttatagcagcatgatttataatcctttgggtatatgcccagtaatgggatggctgggtcaaatggtatttctagttctagacccttgaggaatcgccacactgtcttccacaatggttgaactagtttacactcccaccaacagtgtaaaagcgttcctatttctccacatcctctccagcacctgttgtttcctgactttttaatgattgccattctaactggtgtgagatggtatctcattgtggttttgatttgcatttctctgatggccagtgatgatgagcattttttcatgtgtctgttggctgcataaatgtcttcttttgagaagtgtctgttcatatactttgcccactttttgatggggttgtttgtttttttcttgtaaatttgtttcagttctttgtagattctggatattagccctttgtcagatggatagattgcaaaaattttctcccattctgtaggctgcctgttcactctgatgctagtttcttttgctgtgcagaagctctttagtttaactagatcccatttgtcga

SEQ ID NO: 96390 - DNA, 121134 bp, Homo sapiens
  misc_feature (1)...(121134): n = A,T,C or G
actctaccacctggaatctaggctgcccctaccccagccatcatctttgttatctatactgaccagactagacaatagtagtacagtgtgtgcctgaggagccccactcattctaaagctagctgcccctgctcaagccacggtggcttcttcaggacgccctgtaccaggtcagtgagattcctggctgcatctttgtccatatcaacagcttcatttgtggatgccatatccaagaaggtaccttgagcatggcccctgcaaacttgccctagtgtccaatacctatgcttcccacaaatcccagagtccagtgaaatttcctccatcttaaaaaaaaaggcaacatttctagtaagaaaggactcaaaaatgatggggatatgtcaaaaggacccaaaagccacttgatagcactcccaatgacaaaaagctggagcaactgaccaacaaaataaatgataataatatttaatttataacccacagaggaaaatacatacctaaaaattcatactggcataagtaaataactgaataaataaataactgaaggagaaggaagagtgtttctttacagtagaattcaaattaataaacggggaggaatgagaaaaagagaaaaagcacacttagacaagcaccagagtagtaatagttataggcaagaatcatccatggatgctgaaattaatggacaaaaggatgatgagaaaccgggtattggcaaagtctcaaagcatcactcagcaaaatacagtacttaactaattacaaggagaaaaatcagttaactttatagtgatcacttaaccaagttatcaaagttaacttagtagtaaaaaggcatatggatatcatatattccctgatctgatgcattgaggatggtacaacaacacatctgtactacacttgggaaaaaaacatatttttcactctaatgaaaagaaaacattagacaaacccatgtggatgcacattttacaaaataagtagccagtactctttaaaagtgtcaaggtcatgataggcaaagaaaaattgaggaactgtcactgttggggagactaaggagacatgatgattggatcctggaacaaaaaaggcattaatggaaagactggcaaaattcaaataagacctgtagaacaattaacaatattataacaatgctaatttcctgtagtatttttgtagctttttggtaaatctaaatttgtttcaggaaaaaaaaaatctgttttttaatgcaacatttctaggtgtgagatcttgctgtttcaaccccattgtgagaaatgacccattttggctagctattataatattcacattaagagagtttaccaaatggtatcagattcagaatatgtttgttgctggactgcagcaaacacaataagaaaacaagccaatgaatgaaaaacacacttttaaaactctgacggcatgctcttcacaaagaaaaaacagaaaaaaagacatgaacattctagtcataaaacaatggtccacaacacaaataaaataacctgaaacataaaatgtcaagaactgaacaaaaccaactgaatcaacatatgatgagatgatgacttggtgggtttctgtggcagtcaatttttatgagtctggtaaggaagggctgtcattaggtaaaggttgaattggttctggtacattgactgaattcattctggtacatacccagattttaagtcagttatcctcaaacagtttgtagcatccagtcccacttttccattccggaccacgctagatatgaaaggggagagcattggagatattcggttcaaggccacttctggggacattttaacttgacttgtaaatcaccactgaaagcagaaggaaagaataatgatcagggcttacaaatggactagatacaacactctgcctgaaaactggacagcatacagcagttcctcttgcatgaataaataattcatttcccatctctagcgcagcctcttccaatgatcctccagaagaaaccacctcactgctgctcagctactcaggactgggactacatcactgcttttcaggaacagaaggaactcctgaaatacaattcccttttccttcccaaagctgatttctacactgccacactctactcaaagtggtcccactctatctcactcgttctaccttagctgagtccaaggagccctcgctaacaatcctctatcccaacacaaaaacacacacatcactgagttagcaatctctccctgtgtgtccccacaaggagtaaaaacttgatggataataccgtataaaactctacaacaggctgacctgcttgaagctattacttactagaaattatttactgctgatatatctttcttttttttttttttttttttgcgacagagtctcactctgttgccaggctggagtgcagtggcgcaatctcggctcactgcaaactccacctcccgggttcaagtgattctcctgcctcagccttccgagtagctgggactacaggcacatgccaccacgcccagctaatttttgtatttttagtagagacggggtttcatcaggttggccaggatggtctcaatctcttgacgtcatgatccacccaccatggcctcccaaagtgctgggattacaggcgtgagccaccgcacccggcctactgctgatacacctttcttaatacctttccgtccacagtgtagtataactacctgcttacgtgatctcttccctgcagggtctatgttttgaatccccagggtttaacagaaatacctggcacatgctaaacactcaataaacattttttaataaataaatgagtaaggggacaaaagttagagaaatatttcagtatggagagaagataatgtgccccctccccagaatttggtaggggaatagatataacaagatccaaggaagagatataacaaaaatctacttgacaattaaattatgaaaacatacatctatgcagctatcaagcaacacagactaacatggatcttaaggtatttgactttaaggcactaagtccttacacttaaaaccacaaaagtagaaccaatacatcatatctaaattatctggaaactcatagggctgggggagggagtacacgaattcttcttaatagatttctaaatgaaagcctcttccttcagaggaaaaagtcgattcaaatgatcgtttccttcctcaattttaaagaataatgccacatcaaaagaaaattaatttccagcaagttaccagtaaatgatgctctggttctagttttcatacattataccacatgaaaacttacaagtccttgctaaaataaatgttgaaaattaaaacctgtttcagtttattatttcagatagtaagtaataaatttatttgctaatttgatagctcaaaaaataagaacactttgaccctatatagtgatgacaaccagaagtatcttcgagattaacacctttatattcatacttcagttctaaaatcatcctttttgtaaatataaaacaagctcttcttctgaccgcttaacagatgaccgccccccgactagtctctcatttcaaagtaagactaaacatctaacactgtactaccaatcataaaaatcatgtacttttttaaacattttatcacttacaaggagcgtccatatatattactgcagttgatcttcacaagcctgaggtagtaaggaattttaattcccagtttgcagataatatgggtaattattataatttgattctgaacagtatactaatccacatcataattttgaagcctatttttttctattcgccaacatttccaccttcatgtctatgtcacaattcttgaagggatgcttatcaaagtcatatgctaagtacaaatatacctatcttataaaaaagcaaaagggtctcacctatattaccgaattgttcttctgtgtttttccccacagtacccattattactttatctcttgcttctacaaaagaaggaaacagaaccaacacattctagacacctatctacccattatcaggcattatattactcatctctatctgtaatttcatttacatttccccaactctgttccctgagaacaataattgttcccatttgacaagtggaagctaaagaaacttgacaaatagaaaattaaagctcagcaaaataaaataacttgttgaatgttggaagctggaggatcagaatccaaatccggattctccaagtccactatacccatctttctctcaaataaacattgataacttctatcaccaaagagaaaagcatcaaggtgattttgtaaagcgtatatcttataaaatgtgaacagacaaaaagtaaaaatttaaacaaatgattgctttaycactaaaaacaaactggactattgctgacctactgctgaacctggtctgagtgattcactagtcaaatgttaaagggaacagccttgctctagaagccaaaccatactaagtgacaacaatacattctaattcagcaacggtcgtgactttaggatgacacctgagggaatgaattctatttccagggcagccataatactatgttttaacagtgcaaggtttcacgcagtattaaaatctatttcaaccatgaggaggtgtgacttctctaaaaaaaaagggsggggggtggggagtggaacacaatgactccaaaatcagaagtcacttagccaaaaacactggtcctttggtgcagtgaaccgggtacatggacagggagtcaccaccggtagtaactcttacgcatggcagcactataatacaccccagatatacaaatatttacggtggtcagagtcccctgaatactactactgcaatttgtatttcctgattttgacgtattgcaaaaggaaaatgcaaaattacaatttttgcaagggtctgctaccccaaaataaagttacaaaaggtcctttgatgagaggcctggggattacaaagacgtctaaagcaccatccaggttcttgcaattaaaatgagatgacaaacacggaaacatgtgccctgctgacgtcatggaacggaaaggggtggcatcctgctgcgtcacgtcgacgtcatacagcgcacgagggaagttacactggggaagcaatttcccccaaggggcaacattcgagaaaaacaagttagctcagacccgaagaatgaccaccccactctaggggacgtcttaaaaagggacactctcccctcttccaaactgtatgattcccctcatcaggcaacaaggaactaatactcggggtttacaggaaccaggggatgggccagatatggagaaagagacgcctctggccttgggggctcgttcttgagggaatcagcgtgatggggatgagaagggcatctttggaacgggggccttctccataggaagaggaggcgagtcccctggccatatttaaaccacagttctccacgccacctgtgcgactcgggatccaacctccccgcaccagccccagtccaggtacctggaacttagtccgatcggtaaccggcgactacgtggggtacaggtacccgagcgcgcccccgacagacgcaccgacctgcgcgcgcgccgcgggcaggatgcgtgcgcactccccggacgtcccgccccgccccctctgcggccccgaagctgggcggcgtgcgcgcccccgcgccgcgccgagccgggcgctcggaaaggcgtccccgcggtgcctgacagttccttcctcagcgcctgccccgtgagtgacgaggagcgcggagtctcgccatatcaggagggccctgttacgtgaggctgtgcaccgagactattccaggaagaagaggggacacttggtgggcggggtgatttcgggcagtcaggtgggckacccgcgtaggcgtctgaaaggcccgcgtcgttagggagggcaggagtggcgtctctggttacggggtcgggcaaagggcagaggtcaccgtccaggttggacagcagcacctttgagcgatggcggcgtctggggaaccccagaggcagtggcaagaggaggtggcggcggtggtagtggtgggctcctgcatgaccgacctggtcaggttagtccggggccagttactcagtctgcggctcgggggaggaggcgtgccgtgcgctatgcgcccagtggagcttttgggcgctgggtctccagggatagacagtgctagctttgggtatgagctgcaggttttcgaagccttcagcctaccttcctggcatgaaagaacttgagtatataaaggtaaatctcaggrgaggggacgtaataggccagggtttagtgaaagctctaatattactcaaagcgctccccaaagacctgccctccaaagacttgcgcccccaaagacctttcttggcccggctgctgagcctttccccaaacgagccagggaactttgcccacgtcattttacctccgagaatgtgcctacctcacagggttgttgtgaggactaaatgaagtaaagtgttttgtcaagcgtaacattatccaaattgggtattattcgtctgagcttattgtataaaataatgagttgagcagaaatcaaaaagactgtcacctttcaccatgttgattgtcggcattactgcagtattttatatttacagcgtatttttcagcaagccaagtatgaatcaaaataaaaacataaacacagtatttacaacctctgaaaacgatgatcaaattatgatagaaaatatgccaaatgaaaattgttgagttaggtcagtaagattgagtagacagatccttctgatttttcttttttttaaattaaggtagcttttctgattacaaaagtaatgtatgttcactgtaaaattagtaataaattcagatattccaagaaaatcctaccactccaattactgcagttcagtcttttgatgaatatcttttcagttgtaatgctactttgtgttataaaaatgatcaggtatgctacagtaacacctcattcgtcctgaaatgttgcttttccaaagggtaatagagaacgtggaactaaacaaaaaggctttgggacaatcaaaataagtcaccaaattgctgcaccaaaccacctgtattctactcagaaaataggtctagggtcttcatgtaaccaatttaaccttaccttaaaatatttataagctgtgttaccaaatttccactgagattagaaaggtgggagttagagaagagactgctagaggcagttatagtgactgacgaaaacttgaggatgagtaggagactgtgtaacgagaagaagcaacaaaagaattttaaataccaatgacctttatttttccacaaatattagaactattctgtcagacactgtgccaagataaaaatactttcctttggtgacagagcataaaattgaatctagttggagacatttgttgaagaggcctgtacatctttttctagagcaagagtaagtaaacttttctgtaaagggccagatagtaaatattttaggctttgcaagccgtatgtggtcaaggtcacatttttttttaacaacattttttaaatgtaaaaaccattcttacctcccaagccttacaagaacatcctgcaggccatagtttgcagacatctgtgtagaaagaacattactgtgtttacaacacaatatagcaattgattttactggtgatgactcttttcaagaaaaggttatatggtacttactaaattttgtataaaaatagagcatgtatttcactttagaaaaagtttcatcaaaaattcataaagttgagttacataaaggaataaaccttcatctaaaatgattcattccatgggaaatccaccaagctaaatgtttaccatgattttatgtgtgaagtggcagaagagtaagaaaactaaagtggaccgggcgcagtggctcatacctgtaatcccagcactttgggaggccaaggtgggcagatcacctgagtgaggagtttcagaccagcccagcgaacatggtgaaaccccatctctactaaaaatacaaaaattagctgggcatggtagctggcgcctgtgattccagctactcaggaggctgaggcaggagaattgcttgaacctgggaggtggaggtagcagtgagctgagatcgcgccattgcactccagcttgggtgacaagagcaaaactccatctcaaaaaaaaaaagaaaagaaaagaaaattttctcatacatcctacctgaataaaagtgtcagggttaaaattcagagctacttccttgttaccaaactgagagctttctgtgaagcttgaccatcagatactaaaaataactatagtactttgtggggtggggtaggggagtggtgtcaaaggcccattttagcatccgtcagggttttaaagtcttatttcagagctagaaaaatttggaaattatttattctagtccttcagtttttagataaataaactgaagcccagagaagaatttctcctcttggccatattctttccttcataaaatatccaagtttcttctcttcacatgaatcagtaaaaattttactgatgattagcaaaatcactagtaaaaattttactgatgattagcaaaatcaytagtaaaaattttactgatgattagcaaaatcattagtaaaatcatcagtaaaaaatcattagtaaaaactgtattcccatatagactctctctgctaattcccacagcttttcaacaaacttttcatgatctctcgttacttatgacactgaagatctttacaaaaatctgcgtataggattttcatttaaaaccctgcatctgtgataaacttgggtgcaacttttctagttacagttagtatcatgattatattagttatctactgctgctgtaacaaattaccaaatttaataattaacgcaagtttatttttttactgttctggaggtcagaagtctgatacaggtctcactgggctaaaatcaaggtgtcagcagggctgggctccattctggagactctagaggaggatctgttttctttccttttccaccttccagaggctgcccacatccttggctcatcgtggccccttcctccatcttcagagccagcaatggttgttcaggtctttctcacattacatcactctgatccccagtcttctggctccctcttctacattataagaactcttgtgattacattaggcacaaccagataattcagaataatctctttattttatggtgacttattaggaaccttaatttccccttgccacgtaacaacatattcacaaattctggggatttggatgtggacatactttgggagaggggagcagagagtatgttatttttgctaccacagtggttaagcttgaagtaaaaaatcctacaatatttagttctcagagactctttgaagcctatcattctatcctcacattttacaagtgagataaggaagagagcttcaatgacttactccaaatcacacagccagtaagtggttacttactggctagtaagtggctagtaaaggctactacccaggtctcccaatccttaacctttcttttttatttttttaaatatatattttctattttttattttgttaaagatgggctctcgctatattgcccaggctggtcttgaacccctgggctcaagcgatcctcctacttggtgtcccaaagtgctggggttacaggcgtgagccaccgtgcctggccccaattcgtacctttccattatatcattctacctctaactctgactagtgtttattgcccttttcatctacagtacatttgatagcttgtagtctgtacattcattgttaactttataaactgataaggaataacaactaaggatttataattttcaagtctaaagatagtatctttattactgtgccttattcctaaatttamctgtaactagcctggacacgcatgcctattctttagtatcacttcagaaataaaactgcttcaataactaagcccttttagatggcatccaagcccaacttactttatatattacattactgtgtgccagacactgctaattcaatcaatgaataaccttttttttcatttctaatttcagtcagctatgaatagtaagtcgtatgtagtaataatttttaaaaatcattagctcatacagcatggcaaacaattgaaattatttaatactcacttatatttttctcatcatcctcttccttcttgaacactcatctctaaagttacacattacaaagatacaaggaatcaaccctggtcttatgggatataaagtcaaagattttccaaagacagatttccacaacaaaacaacaatgtgtgaatatttttagacgttaggctcataggcctttgttaatcatgttttcattagtaaaccttattttttatgacctgtatcacccatttttttaattattcattcaagaaatatttattgaatttatactatgtgccaggcacttcctgatgtgcagaggatacagcagtgaaaacacagacaaaaatccctgcctcatgaagtttacattctagtaagacagtatcagtagaaataagttaattacatagtaagttaggtaaaagctaaggagaaaaattaaacatgtaaggagggatgggaataggaagtttagattactggcttcagaaagcctcactgaaaaggttatttagagtaaagacctaaaggaggaaagaaaacaagtcataatctgagggaagagcattccaggcagaaggaatagtgtactcaaaggccgtattcagtgaagaacatggagtccagtatggatgaagaagaaaaaaagagtcaggagacagcaatcagtgattaaaggacattgagtcatactttggatgagatgaaaagctagtggaggatttgagcaggggagtgacataatcttattttgattataataggatctctccaagggctatatgagaataaatagcatgaaggggaaggcaaatacagaagcagggacacaaattcagagtcaatcccaacaatctaggcaagaaatgatggtagcttgaaagcagtgaagtggagagaaagcatctttctattatatttttggggtagagttgacaggattagtggaagttgacctctatgaaaacgcagaagattgtatgcagagaaagttgggtgggagagggctgtatcaggagcacagagtggaattgggagggttgaggtacctactagatatcaaattgaggaggtgaagaaaatagatacaagagtttggatctcaaaggagaggtccaacccggagatataaatttcagagtcatcagtgtatcaatggtatttaaagccatgaggctggatgagatcactgagggtctgacctcctagggcactacaacatttaaaggataaatttttaataaaattgacttcctgtctctcttcaagtctctctgcagtcctaaaacttgctttgagacrtgcttaatacaaacctatgtttatatttccatagcaatagactctgatgtcaactaaaactctgtgttatctttttacatgctgccaattaaaagtgatggcttgagagataagactcgtgwtcacccaagcatctaagcttaatcctgccaaatcaggaaatgagtgcctaattttcaaaaggtttaattggatagtggaataagtgaatttagaagcttttagatccaaagcggatgaagcattggacctagattacttaaaaaaaaaaagttatggccaggcatagtggtggctcaagcctataatcccagcactttgggaagccaagcgggtggatcgcttgagctcaggagttaagactagcctgggcaacatggcaaaacccggtctccgcaaaaaatacacaaattagctgggcgtagtggtgtgagcctgtagtcccagctactggggggctgaggtgggaggatcgctggagacccagaggttgaggctacagtgagcctcgattgtacactgtacttcagcctggacaacagagtgagaccctgttaaacataaaaaaataaaagagagttatactgtacctatcaaagtttgtatttgtttgacataatagagtactttgtaactgggacacaggttacagagtcaagaagcctcttggcttgtcatatttagaacagagaaatctcttttacagtcacattttcaaaaactaaaaaaggaatattgatccaaaaagtatcatgctttcccagtattcgaggaatataatatccttcattattctttctgcttcttaaattggtctgaaaagttgcttatcagttaccaatcatttattaaattagtattttgttaaacatagttgtgtcaactgtattccctaatatcaaaagtaatcattcatgggaaatttggtatgtccctttaatgaaaatatacattaaaaaattatggctgggtgcagtggctcatgcctgtaatcccagcactttgggaggccgatgtgggaggattgtttgaacccaggagtttaagaccagcctaggtaacagggtgatgagactctgtctcttaaaaaaaaaaaaaattgcatatgacaaagaaagagcacctactgtgtactattacaaagcagtccctttagcaatccattcctttgccagctctctgtgccttaggcttttcatgtctgtaacctaaggagaacaaagtaaggtggactttgtgatgagttttgctctagtattttgatgacttgtttataatgctgaaatacttatagtgtgctaaacactaagaatactgcagttaggaggctgggcgtggtgtctcacgcctgtaatcccagcactttgggaggccgaggcgggcagatcacgaggtcaggagatcgagaccatcctggctaatacggtgaaaccccatctctactaaaaatgcaaacaactagctgggcgtggtggcagacgcctgtagtcccagctactcgggaggctgaggcaggagaatggtgtgaaccagggaggcggagcttgcagtgagctgagatcgtgccactgcactccagcctgggtgacagagcgagactccgtctcaaaaaaaaaaaaaaaaagaatactgcagttaggaaaacatggttactgcttgtcttgtcttagtcccttttgtgctgccataacagaatacctaagactgggtgatttatcttttttcacttttattttaagttcagaggtacatgtgcaggtttgttatataggtaaactcatgtcacacgggtttgttgtacccaggcattattattttttttttgtcacccaggtattaagcctagttctcattagttatttttcctgatcctcttccctcctttcaccctccaccctcaggtagaccccagtgtgtgttgttcacttctgtgtgtccaggtgttctcatcatttagctcccacttataagtaagaacatgcagtatttagctttctgtacctgtgttagtgtgctaaggataatggcctccagctccatcatgttctggcaaagtacatgatgtcgttctttttaacaactgtgtagtattccatagtgtatatgtaccacattttctttatccagtctaccattgatgggcatttaggttgattccatgtctttgctattgtgaatagtgctgtaatgaacatacacatgcatgtgtctttgttacagaatgatttatattcctgtgagtatatacccagtaatgggattgctgggtcaaatggtaattctgtttttagcttctgaaggaattgcaaccctgatttccacaatggttgaactaatttacactcccaccaacagtgtataagcattcctttttctccgcagccttgccagcatctgttaatttttgactgtttagtaatagtcattctgactggtatgagatggtatctcattgtggttttgatttgtatttcgctaatgatcagtgatgttgagctttttttgatatgcttattgcaaataaaataaaatgtatgtcttctttagaaaagtgtttgttcatgttctttgcccactttttaatggggttgtttttttttcttgtagatttgtttaagttccttttaggtgctgaatattagacctttgtcagatgcatagtttgcaaaaattttctcccattctgtaggttgtctgtttactcaatagtttcttttactgtacagaagcttttagttttctttagtttaattagatctcatttgtcaatttttgcttttgttgcaattgcttttggcattttgccatgaaatttttgcctgtgctatgtccagagtggtattgcctaggttgtcttccagggtttttatagttttaggttttacatttgtctttaattcatcttcagtcgatttttgtatatggtgtaagaaaggggtccagtttcagtcttctgcacgtgcctagccagttattccagcactatctgttgaatagggagtcctttctccattgcttgtttttatctgttttgtcaaagatcagatggttgtaggtatgtggccttattttgggggctctttattctgttccattggtttatatgtctgtttttgtaccagtaccatgctgttttggttactgtagccctgaaatatagtttgaagtcaggtagtgtgatgcctccagctttctttttccttaggattgccttggctattcaggctcttttttggttccatatgaatttttattttattttattttatttatttatttattttgagacagagtctcactctgtcacccaggctggagtgtagtggcacaatcttggctcactgcagcctctgcctcccagattcaagcaattctcctgcctcagcctcccgagtaactgggactacaggcccacaccactacggctggctaatttttgtatttttagtagagacggggtttcgccatgttgaccaggctggtctcaatctcctgacctcgggtgatttgccagtctcaacctcccaaagtgctgggattacagaggtgagccactgtgcctggccttatttttcttgagacaggatcttgctctttcccccaggctggagtgcagcagtgtgaaagtggcttactgcagcctcaacttccaggctccagcaatcccccgacattaacctcccaaatagctggaaccgcaggcacacaccagcatgcccagctaatttctgtttttttktttgtttgtttgtttgtttgtttgttggttggtttgcagagatggggttttgccatgttgctcaggctagtctcgaactcctgggctgaagcaacccacccacctcagcctcccaaagtgctgggattacaggtgtgagccatcgtgtgcagccccatttgaattttaaaatacttttttctagttctgtgatgaatgtcatggtagcttaataagaatagcattgaatctgtaaattgctttgggcaatatggccattttaatgatattgattcttcctgtccatgagcatggaatgttttttctatttgtttgtgtcatctctgatttcttcaatcaatattttgtagttttcattgtagagatttttcatctccctggatagctgtatttctaggtattttattttgtgtatgtggtaattgtggatgggattatgttcttaattaggctttggcttgactcttggtgtataggaatgctggtgattttttgtatcttgattttgtatcctgagactttgctgaagttgtttatcagcttaaggagcttttgggccaagattatggggtttcctaggtatagaatcatgcaaatagggatagtttgacttcctctcttcctacttggatgccttttatttctttctcttgcctggttactctggcaaggacttccaatactatattgaataggagtggtgagaggaggcatcctcgtcttgtgctggttttcaaaggaaatgcttccagctttttcccattcagtatgatgttggctgtgggtttgtcatagatggttcttattattttgagatatggtccttcaatacctagtttattgagagtttttaacatgaagcagtgttcattttatggaaagccttttctacaactattgagataatcgtgtggcttttgcctttagttctgtttatgtgatgaatcacagttattgatttgcatatgtcaaaccaaccttgcatcccagggaaaagtctacttgatcatggtggattcgctttttgatgtgctgctggattcaattttctttttttcttttgccaggttttggtatcaagatgatgctggcctcatagaatgagttagggaggagtccctcctcctcagttttttggaatagtttcagtaggaatggtactagctcttctttgtacatctgatagaatttggctgtgaattcatctgctcctggcctattttttagttggtaggctatttattactgtttcagtttcggagctcattgttggtctgttcaaggattcagtttcttcctggttctgtcttgggagggtgtatgtgtccaggaatttatccatttcttctgacttttctagtttgtgtgcatagaggtgtttataatattctctgatggttatttgtatttctgtggggtcagtggtaatatcccctttaagactggataatttgcaacgaacagaaatgtgttggctcgtggttctctccacaatggagagtccaagatcaagggcatctggtgagattgctatatcattccatggtagaagaataaagcaggttgaggggaagagagagaggtaaaagggggctaaacttgtccttttattaggaactcactcccttgataacaaacccactcccatgataatggcattaatccattcatgagaacagagctctcatgacctaaactccacttaaaagtctcacctcccagtgccatttcactggcaattaaatttcaacaggagtttaggagggaacaaacatttgaaccatagcactgctcttggggaatttacagtccagagaagaaggcagactcaaaaagagattattatagtatgacatggtaagtgcctgcaggttatgcgagagaacagggaaaacttcctagaagagatgcccccgagccaaattttcaaaaataagcaggtggtaacccagaaaaaaaggggaaggaagacattccaccacttggggttacacacagaagcaaaatcatggatgtgcttgtgtggtatgtgctgaggcacatatggcttgcatggtatctgctgaggcagcaacccttgggtcttagaacatcaggatatacagtggtgatgaaaggcctaatcagccatgctgaggtgcttaggttttattctttaggccctggaaaccagtgaagggctcaaagtacaagaatgacagccagaacaaccccatcaaaaagtgggcaaaggatatgaacagacacttctcaaaagaagacatttatgcagccaaaagacacatgaaaaaatgctcatcatcactggccatcagagaaatgcaaatcaaaaccataatgagataccatctcacaccagttagaatggcaatcattaaaaagtcaggaaacaacaggtgctggagaggatgtggagaaatagaaacacttttacactgttggtgggactgtaaactagttcaaccattgtggaagtcagtgtggcgattcctcagggatctagaactagaaataccatttgacccagccatcccattactgggtatatatccaaaggactataaatcatgctgctataaagacacatgcacacttatgtttattgcggtactattcacaatagcaaagacttggaaccaacccaaatgtccaacaaygatagactggattaagaaaatgtggcacatatacaccatggaatactatgcagccataaaaaatgatgagttcatgtcctttgtagggacatggatgaaattggaaatcatcattctcagtaaactatcgcaagaacaaaaagcaaacaccacatattctcactcataggtgggaactgaacaatgagaacacatggacacaggaaggggaacatcacactctggggactgttgtggggtgggggcaggggggagggatagcattaggagatatacctaatgctaaatgacgagttaatgggtgcagcacaccagcatggcacatgtatacatatgtaactaacctgcacattgtgcacatgtaccgtaaaacttaaagtataataataattaaaaaaataaaaaataaaaataaactgattaaaggcaaaaaaaaagaatgacagccagatttatatttcacatagttcacttagtgctaaagtcagatttaaaagaagccaatgttttaaaggcatcaaaggcattcttcttgaagacaggaagacctatttgaaaggtaaaacagtagtattcacaaatgttgatgatggtgcgaactaggacagtagtgctgggaatcaaaaagaggaaaaagcttaaagaaatatttaggggctaaaatagttggaaacaactgtttagtaaagtgggcatgaatcaagcattcactctctgatcttttataaggaaacactaatgttgaaactttattttcccacattgacaagacctagaaggtagagtccttggaaagaatcccatcttatggaacaaaagcattccatgcttactacttttattgggggggcaggggcggttatattccttaaaaatcaaaataaatggtatcaaataattaagagatagtcaaattctctctaagggaaaaaatcctaattttgttttgagatttaagaaaaaatacaggtattctttcataattgtaatggagacgctaatgacaaatttagctcaaaaaatttacaaatattaactggaggcaatgaaatgacagaagatataaacataaaaaagaatgttaaaatacaaaatagaatcttccatataccaatacagcattcttaggggaaaaaaaaaaactacacaaagctcaaccacccatgtaacaaagatatttataatgtgtaaagtgttgtcggggacttagagactgtggaactagagaatatcagagtagcaaagaaacttgagttcatttttgtgttgaaatgaccaccctgttcatgttaaatataggaagcacaagtctagaaagaattaactgattttcccccagctaatacctaattaagattggagccaggattaaagtttttaccttttggctctcaagtactaacacattgtgttattgtgaagttttgagtagcatttcagaagtttgacatgtactggatttgcaagagacaaagtgttcaaaagtgctagtaaggaccgatttccttgaaaaagaaaacaaagctaatattgcaattatcaatatcagagtacttagtattattgtcctttagaatttttttcagacctgcaatttttattatatatgcataatataacatttaccatttttaatttacaattcattggcattaagtacatccacatttttttacaaacatcaccactaatcatttccaaaacttttttcatcttcctaaatggaaatgatgttcttattaaacaataactccctatcccctcctcccctcagcccctggcaactactattctactttctatccctatgaatttgactactttaggtacattatataagtggaattatgcagtgtttgccgttatgtgacttacttatttcacttagcataacgtcctcaagaaagggtaagtgaacttgaagacatagtaatagagattatctaaatttaagcataaagaaaaaatgcacagagcctctgtaacctgtggaacagtctaccatatgtataattggagtcaaagtatctcatataggtggagtctttgtaactggcttacttcacttagcataatattttcaaagtttatccatgttgtagcatgtttcagaattttcttccttttaaggctgaaaaatactccatttatgtacattacacattttgtttattcatctatcagtggacatttgggttgcttctacctttgggtattgtgaacaatgctgctattaacatgggaatacaaatacctgtttgagcccctgttttcagttcttttgagtatatacccaaaagtgggattgctggatcatatggtaattctatgtttaatttttttgaggacccaccatattgttttccataacagcaacactgcttttccttttagtttcttgcatcttctttgtaaagtccctattctgcatcttactcaccaagcctccttttcttatttcagtttagcctattttttttgtttcgtctcccatttgtaatccctcttttatgtcctcttatgcaattttgcatccccatatgtatgtatatctgtcatgtctaagtatacgtttgtgcaagaggaaaaatgtgtctgtacaggcaaggagctcagtaaacctcataccttctctgccaccctcaatctcagccccagcatttttgtggccatttaatactctgttacgtagagatacaaaaatttgttgattcagtgccctaaataaatacttttaagttggttctgtttgctatgatgaacttctttgaacacttatcttttggactcatgtctgtttccttaggtaaattcctagagctggaatttctaggccaaaggaaataacattcttgtttttgttttgttttattttgagtcaaggtctagttctgtcacccaggccggaatgcagtgttgcgatcgcagctcactgcagccttgaccttccaggctcaatcaatcctcccacctcagccttctgagtagctgggactacaggtgcataccaccatgcccaactaatttttatattttatttttggttgagacaaggtctcgccatgttgcccaggctgctctcgaactcctaacctaaagctatctgcccaccttggcctcccaaagtgcagtgattacagacgtgagacaccatacctggctggaaataacattttttaaacttttgaaatatattgcctatttgccttcataaaagttcttctgaaatacactcctactcacagtgtatgaaaaaggcctatttcctggatttttaacgaacacattactagttgagagatgttaaatgttttcatgtttgattacaagaggagatgttgaatgttttccagatgtttgttagttatttgtgtttcttttgtgagttgccagccatgggtcctttgtccatttttctgttggacactccttaagattttaaacaagacagttcaaagaaaagaaaatgtaaagatgctggttaagagttctgcagcaaagaagctaatagtataagagtgaaaggagaattttaagactctggctagcataaaatattgtggaaatatggatgagagagattctcaaccctggttgccctttagagtcagttaaaccagcctctccagggagggaatccaggcatcaatttttgttttttaaactccccataaattttaatgttccacaggggtagacaaaaagtgacttactgataaaagcaggaactatgaagtagagtgaatgtgacaaaatactgtagcaatttggagaaattaacctttaagagaaaggggttggagttattcctgatcaaggggagtcatgattggcacagataaacacatcagcgtataagtggcatcatacctggttatccagtctctctgctgtggtaatacagagtcttcactcttgacgacgtgttgtgtcacatgatgctgtccagtgatatcagttcttgaatgatgtgagttccgcccaggacagttgcctcctagttgagtggctgcaccttcctccattctgacagtgattgtacaatgttaaaactaarctgtaagctaagtgargacagggtctgaatatctccagaacttcacacagagtctggaatgtagtaattgtaacaaatatatgcggagaatggactgagtatcataaaaaggatctgagattattccaatttcttccatagttatcatactaaatcaagattttcttcattgaatacaattttaatcactttttagtactttctacacagtgatgaacwacytttttgtcatatgatcttcaaggacaagktttctttgaattgtagaaggttcctcttatgacaactgattgaagacacgtttgaggccttaaattcttcatatgagcatttaaaatatttctatctgccttgccttaccttctttatgatttttatatcactagtttgacttggagtgtttcttgtatacatacagaaggctgctataaattatctctgtttgyatatggttgatgtgttttctaaataaaagctgagagttttgtttttgctttgggtttggggttttttgtttcagggtgttttgttkttttttttgtttgtttcccagatacatcacatattaggtactggcttgtctctcatggtcaaaaatacgttcaaatgcaattcttctgtatcattgcagaaaataatttgtgcaacagttttttaagtaccctttaaaaattatattttacatctggatttttaccaccagtttaaaaaattacaattcatacactgttatagcaacaatattggttttttctgagttagaggtcttcattttgaagtgagaaatacaaacctacatttttagttacctaaattttcaaccaaatactctgccaaaagtcttttagaaactcaattttaaagtccttcaggctgtctcaatgaaaatcataagcagttctttggtattctgtcaagaccataaagaaaatagagtattatctaaaatgtttcttttaagccatttgaaattatcacagtaccttgctcaaagtagttactcagtgaacatttgtggagggaaggagggaatgcttgcatgccacagttgcccaagaatagcagctgtgtagaatgtctgtgtggggaccccgattccagcagaactttaaccctattgacagctgcaacaaggaaactgcattatttaactggttagttatttgggttgtaatgagcagaggatcatttcagttacttcaagaatggatacttgtttgcaaggtgacccagaattagcttaacagccaggtctcaggaagagcaggaaccagggaaggttcctaggaaatggattgttctttaatttttaccccagtgctccatcattaccctggccccactgccctcctcatgtgtgttccataccctcactcctctccccatttgcaggctttctctgcgagtatagcacctgctcattcccaaccctgccagtgttttgcctttactggcctcctttacccctctgcatccattcaagcttctgcttccaccacaaattgcttccttcttgccatgtttcttatttgatgggtgttcagctgtggtgtttcatatacattcattaagctaggctgactttctgtctgcttgacgttttgcttacctagggaattgcattaacatcacctaccgtgatggtggatttgacaatttcttgttgttgttatatatttttttggttttatgtattttacggctaatttattggttatacttagacttgaattattacattttcctgccgagtttaaccttttttctccctttcctgtggtgctgatgaatttaaccttttgattaaagtgagttaccatattttatctgtctttgccttaagcttttttattttttaatttttggctgatattgataaagctatccaggtttgttttagttgctatttgccttgtatatcttttcctgtctttttttcttttcacccttcaatgtgtctcataaacagcgcatacctgaattttagtcttttgttggcttgttttatttattaattttttttataactgcactacttttttctttttactagagaatgtaatccagtcacatttgttgggagttctgatttatttgaatttattttaaatgtgttacgttacaataaacggctctttagaacactatttttcaagctcattaagcctgtagagcaggggtccccaacccctgggccacagaccagtactgatctgtggtgtgttaagaaccaggctgcaaagcaggaggtgagtggcaggcaagtgagcaaagcttcatctgtatttacagccactccccattgctcacattacctcctaagctccacctcctgtcagatcagcagtagcattagtttctcatagtagcgtgaaccctatcgtgaactgcacatgcaagggatctaggctgtgcactggttttgagaatctaacgcctgatgatctaaggtggagctgaggcactgawgctagcattgaggagcagctgcaaatacagattaacattagcagagaggtttgactgcacagagaccatcataaatcaactgcttgcagacttatatcaaaaccctatcagtgagtggcaaatgacaattaagctgtatctggtggcaggcttaactttatagtggcaagtgagttgatgtacttcagttgtacagctgcatctggtagcaggccttaagtcagaatccaacagttattttagcccacacatggcccacccattattttatttaccatgcctctttctcacactgcacacttgtctcagtcacagttttggtaagcccatgagctaatcctagccaaattagtaaaaaataaacgtcactggagagcttctttgaaaaggggggaaagacccaatgatgagacagcagaagacttttaagactggcaacaaaatgaaagctgcatttaaaagaaaataccaagagtcctatttaaattacgggtgcattsaacctgctttgtataatatgtggtaactagctatccaacgaagccatgaaaccttcaaaactgctttgctacatggagaccaagcacctcgcattaaaaaacaagcttttgggtttttttgtttgtttgtttgtttgttttagtgaacacgaagaacagaagcaatcattgaaggccacagcttcatcaaatgtgtctgtactgagagtatcattgttagtggctaaatgcattgctaaagctaagaagtcctttactgttggtgaagagttgaccctgcctgctgctaaggacatttgtcttgaacttttaggagatcttgcagttaaaaaggtggcacaagttcctcattcagctggcaccataactagacaaattgatgaaatagcagaggacattgaggcacaattgttagagtggattaatgagtcactgtgatacgcagtccaggttgatgagtctaccgatgttgacaaggcaacaatgcttgttttgtgtaatgtatttttcaggaggatgtgcatgaggatatgttatgtgcacttttgttgccagcccacaccacagctgcagaactgttcaagtctttgcgtgattacatgtcaggaaaactgaactggtcattttgtgtgagtatatgcatggacagagtggctgccatggctggacagcttctggtttcactactcacatcaaagaggttgcttctgaatgtgagtctacacaccatgtcatccatagagaaatgctggctagccaaaaaatgtcacctgaacttaacagcattttgcaggatgtgattaaaattatcaaccacgttaaagtacatgcccttaactcacgtctcttcgcacagctctgtgaggaggtgggtgcagtgcacacatgtcttctctcacacacacaagtgagatggctttctaaaggtagatcactgatcagagtttttgagttacaagagccactccggagatttcttttagaaaaacagtcaccactggcagcacatttcagtgacacagaatgggttgcaaacctggcttccttgtgtgacatattcaacctgctcaacgaactcgatctgtcacttcaggggagaatgacaactgtgttcaaattgtcagataaaggggctgcattcaaagccaaactggaattatgggggtgacaagtgaacatggggatttctgacatgtttcaaacattagcagatattttgaaagagactgaaccagggccttctttcccccagctggtgcatgatcacctatctcagcttttaaaggagtttgagcattacttcccaaccacaaaagaccccccagactgggaaggaatggatctgcarcccatttgtggataagccaaggtgaatcgactttgtccgtgctggaaaaggaccaactgcttgagatcgcaaatgacggtggccttaaaagtatgttgaaacagcttcaaatcttcacacagtccggattgaagtcaaggcataatatccagagactgccccaaaagcactgaaaagcttgcttccatttccaacaccctatctttgtgaagcagagttttctgcagtaacagcaaccaaaacgagattatggagtagactggacataaacaacacacttcaggtatcactgtctcccgtcacccccagataggaccgtctagttgcaggaaaacaagctcagggctcctactgattcaacattatgatgagttgtataattattccattatatattacactgtaataataatagaaataaagtgcacaataaatggaatgtgcttggatcatcccaaaaccatttcctccccctggtccctggaaaaattgtcttccacaaaaccagtccctggtgccaaaaaggctggggaccactgctgtagagcacaggtaagtcacactttttgtggaataccacagaacattaagcttaagttaactatattcatacttcccatgaaattgtatgctctcttctgctagactataggttacataaagaatactgcactcgggtttaagaagaaaagttaaatttgataacatagtgtccattcacttaatgccttctgaattaagtaggaaaggagcaccattatttggccttgctgtctcagcatcttggttcagcttgaagaacaccagtgttcttcagaagtataattactattaaataaaaattacacaataaattataaaatcctaaaatataaataggtccaaggagctttaggtacatttctggataatattttgtaagttttggagtcagatcaaccttgctttgaatcctggccctgccatcttctactgggtgaacatggatatgttttgtaatctctctgattttcattctccttatctgtgaaataggatcaaaataataataactttctcatggggttattgtaatgattaagtgaattgatagttataaagtgtttagtgcagtatttatcatataataagtcctctagaaatatctgccattattaatgtattagttatttcaattggacttactatattaggactcccaaaggagatgattgtctgagttgaattttaaaggatttgaatggattagctcagctgagaagcaaaggaaagaactttcaggcataaagaataggctatgcaaagatatttgaaatacaagtaagattttaagaatgaacagtgtcaagagaccacgaggaaagccaccattctttcctgtgtaacatcacctagtgacacactcaaaacaagaagtggtggaaagggatgaaatataggttgtttttagtatagaattattgtttcttatgctcttatataaatgactgttaagtaaatatttgtgtgttttatgtattgaatatccaacattatagtcaaaattgaaagaataccaattgtcaaagaaagtagcatattgtggttaaaaactatagcaatggagtcagaagagctgaattaaaaattagctcaacccctaacagctatgtgtttttttgataagccaataccttttgaactctcactttttccctaaaacagatgatgataatgcctaccctagatcatcttacaaatatattgttaagctcaaaataacataatgagttcttgattatatatgatcaccaaaaatagtagataaattaaaatttaataattgattccagattacattattttgtcttatgctgatttatccttctaattatattttgcttaggataaaattaaaatctgtttttatttctttaaactacaccagcagatggcaaaaagatgtaacccagataattataatgtagtgacagaagtcattctggaatttaaaatttactataattaattggcaaaatagaaaataaaatattggttttgtagttatttgtcactgtcatttttattattttacaaatgcatacttttcttgtcttcagtgratttaaaagcagttcatcaggaacttttgacaaatgactttgttccaccaaaccctttctgctctgtttttcagcattctgattttcccactttccagttcttgtacacatacctttgccatccaaaatagttgtccaatccccacttcctaatcccctatacatacatatacattttgcctgcccttgcctcttgcaatctctaattccaaaattagctcattccccacctccctatccaaccttttttcttcctctaggactgatctcagctggaaggaagtatatatatataattatccaaaaagatttgctgagcttaggtagtattttaatttttatgtgtatgtttaatattttgagtgataagcctctcctgacaccttgtatactcagccctccatgccatactggaagaataaaaaggatgtgcccctttttgtccccatttttctgaccatattcccaactaagtttataaagactcccgtcacataacttcattttcaattcggaaatttcataactggcttactttttcccttgggcctctgtcatacatagcacttttgccctgttctcaccccattgtattatttattatgtacctaggcatctgtcatctcaactttctataatataatttcttttaagctgtagaccgttcattcaaaaatatttacttctgcccatgttggagtaactagtgagcatccagagatcactagacatgcaaagaatcaggaaaatgtgatctatarccaagagtggggagaaaaccactcagtcaaaataaacacagaaaaacagggatggtggaattagcaaaaaggcattttttttttttttttgagacagggtcttactctgtcactcaggctggagtgcagtggtgcaatcagagctcactgcagcctcaacctcytaggcacaagcaatcctcctgccccagcctcccaagtagctgcgaccacaggtgcacgccaccatacccagctaatttttaaattatttgtagagacaaggtctcactatgttgcccaggctggtctcaaactcttgagctcaaacaatcctcccacctcagccttttaaaatgttgggattacaggcatgagcaaccatgcccagccagaaagggattttaaaagacctgttacaaatatgctcagtgatttaaagaaaaagatgaacagaagaaaaatggaagatctatagatgaaccaaattccaggtctaaaaaatgaaaaatgcaatatctgaaataaaaaatccactggatgagcctaatagcagagtgaacatgacagaagaaaggataagtgaacttgaaaaactagtaaaagagattatctaaactgaagcacagagaaaaaaaatgcacagtgtctgtgacctgtggaacagcctaccatatatgtcactggagtctaagaataaaaggagagagaagcagagaggcactaaaagcgtttgaaaaaataatggctgaaattttttaaacttgatgcaaactatgcaaacaatgaacatccagcaggatgagcatgatataaactacatcagagcacattgtgatcaaattcctgcaaatcagttataaacagagactcttaaaagcatccagaggttaagaaaaaaaaggtacacattacatatagaggaacaaagattgattgcagacttcctgtcagaaacaagatgcaagtcagaagaaaataaaatctttaaagtgcttgaaaactaaactgtcaacatggaattctatatctttccaatataaaggggaaagataaagacttcctaaagactttttaggaaaataaaagaatttatcaccagaaaactcacactataataaatgttaaaggaagttcctttaggtggaaccaaaatgattccagatggaaacccagatccacccaaaggaatgaagacccccagaaatggtaaatatatgggtaaatacaaagactttttcttcacttctcaatttctttaaaaggcaattgacatttaaaattaataaagtaataacagtattgtgacgtttacatcatgtggaagtaaaatgtatgacaatagcacaaaggttaggaaggggaaatggaagaatatgtaaagtagattacatttttaagtaaagtggtatggtactgtttgaaaataaagtgtgatcagtttaagatgcatattgtaaaccctagatcaaccacttttaaaatactaggggaaaaaatcwgccaggcatggtgacttatgcctgtaatcccaacactttgagaggccaaggtaggaggctcactttaggccaggagttcaagaccagccctgggcaacttactgagatttgtctctaccaaaaaaaaaaaaaaaaaaaaaggaggaggagaagggaaggtagaatataacacacaaacagggaacgtaaaatggaatacagttaatccaaaagaaagcaggaaaagaaggaaatgagtattgtaatgtcatgtagtgatattgctatgaagaaaattgttgggaagcaatgcttcatgaatgttttcatgtttctgcatgatcaggactttctgagcaaagatttctggcaccggattaaagaattttgtttgtttgtttgtttgtttgtttgagaaggagtctcgctctgtcgcccaggctgcagttcagtggcgcgatctcggctcactgcaacctccgcctcctgggttcacgccattctcctgcctcagcctcccgagtaactgggactacaggtgcctgccaccacgcctggctaattttttgtatttttagtagagatgaggtttcaccgtgttagccaggatggtcttgatctcctgacctcgtgatctgcccacctcagcctcccaaagtgctgggattacaggcgtgagccrtcgcgcccggcctaaagaatgtttgaatggcaaacaagccttggaagttaaagacctgtggagagattcagagacttctccccaagataatttgttttccttctgaaggttgtaaacctagagaccctccccttctctccctgagaggatttgtttacaaagcaaaggtcagtaggtcatgtgcaggtgatgcatgctgcttcttcccccaccccagaggggagaaggagcagcagctgtgtgtgaaatgtcctatataggctccaaaatttactattagggagttattcttatcatgtaaccttgtgggggactggagaactaaagtataagtatttaaatgctgtctctgattcaaaaacctggttttttttttctcagaatgaatgagtcaatacttaaaaattatattaagaagggagtgtctcctataaggtggtctgggaagtcctctctaaagaggtaacatttgagcagagatgtgaatgaagtcagccctgtaagactgtaacatgggagaagaccatatgtactaatctttattgtctctctcattgcctggtacactttttcacacataagtaagttttaaataaatarggctcaaggatatgacattgtgaaaggctggtcacttctggctagagtgttgtttgtccactctacaaattccagagtagctgcatcttcagacaaaatgacattttagtcrcagacattttagctaggaaaagatatgagtttcacgcctgtaatatcagtgctttgggaggccaaggtgggaggattgcttgaggccaggagttcaagagtagcctgggcaacatagcgagaccccatttctacaaaaaaaaaattagttgggcatggttgtgtgcccccgtagtcctagctaatcagaaggccaaggcaggaggattgcttgagcccaggagttcgaggttacagtgagctgtggttgtaccactgcactccagcctgggcaacagagcaagaccctgtctcttaaaaaaaaaagatatgggttagtaatcaaaatcagttaaaaactgcataaagcataatttatgtttcattaccttaaataaataacatatacgtctgcaaatgaagggttagggaacatagaatgaatttttagttgggagattcttttacagaggtagaaatagatgtcactcacttgattttgaaattactctcagccttttaaatgtggcatatacaaatgctgagaagaataaatatggttgaagaatacaggcagtaagaataataaattagtgtaatgaattttaattgggtaataattaatagtacaatctcctgttatagaggcttctgttgtcagaagcttgcagccaaaagragaaaagatcagtgcaaaagccaaaaagcaacacatttggtgacttttggctgaagccaatattagcatgacctctttggttgaaagacttttcatccccctattaccgggtcattccttcctttggttcgaataatctctgagaatctgtaaaaaccacatcattgtcaagaagttaaaagcaattgataagttgttctggtaacacctgtcagtgaattaactcagagcacaaaacccaggcatttaaggagttgacaagtattattaaacctgttttgcaagagaagaagctggttcaaagagggaaaagctgtcaaaagtaatacaatcagtaagtggctcaggcctcctgcctggcacacccaggctctaaccacgtggcctctcatggcagggaagactggggccatgtatgaacatttatcactgttcctttcagtccaacctgaagacattgtggcattttaaaagctatgaatttgttttaaattcaaatatatttcttaggcatggttttctctgttcaggttttctccctcattcagaaatttacactatttttacctttaaatggtagtaacaatgtatttctactaatactgtttccttttctttttaatttgagcaatttaatttttctgtctttgacactctgttaaacctctttttttttttttaattagaacaaatcatagtaatgctttcatcccaggagacggtgctttgtgcagatgctttcttgaacctgaacataatttcatgatttcaataaggaagaaagataggaaagtctcattcaaattaaattaggatttataattcagaaatgcttctgcctgtttgtaactaacttcctagttgctctctccactcttcagtttatttactttataaaaaattaaatccgccataaactgtcttagtctgggtttaacagaaaccagagcctaagacagaggcttaagtgcacatagtcagttagcactataacccccgagtcaagagcaggggacagggaagaaggaagagcgtatacaaaggtatttgacatttgcaagttgaccactggctgctcagtccttcaggacagtctgaagagacagaagcccaggggtggaatgagagcagcattcagtaaggctctgttaggtgacacctgcgagaagccagctggtgcccaccaagaactggtggctagtgaatgaggcagaggccacgtgaatctgatgtagtgacaagtggtatcgtataatacactaaaatattcttgtcgtatgtatttatgtgcataagaatataaaataacacacaaacttttagtccccacctttctttgtgaatacctgtcatttaacttttcactttttatgcatgtacatatcatgggagaacatatacctatatctttttccttttaaataacataaatcagccaggcacggtggctcacgcatgcaatccctacactttgggaggccgaggcaggaggatcgcctgagtccaaaagtttgagaccagcctgagcaacatggcaaaaccccgtctctataaaaaaatacaaaaaattaaccaggagtggtggtgtgcacctgtggtcccagctctctgggaggctaaggtgggaggatcatctgagcccaggaagttgaggctccagtgagccatttttgtgttccactccagcctcagcaactgagcagactctgtctcaaaaaaaaaaaaaaaaaaaaaatcaggccaggcgccatggatcacacctgtaatcccagctctttgggaggctgaagcagggggatcaggagttcaagaccagcttggacaataaaatgaaaccctatctctactaaaaatacaaaaaaaattagctgggcatggtggtgcatgcctgtaatttcagctactcgggaggctgaggcaggggaatcatttgaacccaggaggcagaggtaacagtgagccgagataacaccactgcattccagcctgggagacaaagtgagactccaccccccccccaaaaagaaatggaacatactaatctccttattccgtgaattattttcttcactcgtgtattacttgcatcagggttaggtttaatgccattgtcaacaagttgattttgccttgtaggagatacatcaggacacagtgatgaacatttgttgaattagtgcatgaatgaaggaatatatgacttctagttacagttcttgcttgtggaagaggaatgctgctgatactgggagtgcagtgggcaagatctggtaaaatatggagttgttattgtcggacagttgcccagtcatccctgccagtctccccctgcttccctaatcaacacctccacatcctcatttcagaacaggaatagatgctatacgggggagacacagaaaagagacaaagggaggctgggcgcggtggctcatgcctgtaaccccagcactttgggaggctaaggcaggcggatcacttaaggccaaaagttcgagaccagcctggccaacatgatgaaaccccctctctaccaaaaatacaaaaattagccttgcctggtggcgcacccctgtaatcccagctacttgggaggctgaggcaggagaatcacttgaatcaaggaggtggaggttgcagtgagccgagatcgtgccactgtactccagccttggtgacagagagagactctgtttaaaaaaaaaaaagagagaaagagagacagagacagagacaaagggagactcttacaaaaatctgttcaatcagcaaatatctgttaacctcgtgtcaagtgacagacacattgcataaaatggagaacatgacagacttggtccctgtcctcatgcagggaaagtctacagttaagggaagaaagagacaagagtaggggaaggatgcagaagaaaaagaggagaaattagtaaaataccaaaagagtgaagaatttcagtgatcactgaattaatacaatgcttgtgttaatagaagttgtttagaaatgagtttaaatcccagccatctgctcccacatcaaacacacctactgtacccatgattttgcccttcccccacatatatatatacatcccagtaataatctggtgatttttaaatgaattctcacagttagtaataaaaattacacttgattcaaaccagtgaattgtaacccagatctaagtatagatgtagtggaaatcataagtttctttagtgacagtcttactaatcaagttatttggcctgtttttagccacatggtatattttttctttttcaggttgctctgagtgttgtttgtagcagcatcagtaagccaagaattcacatagttactcaatcacacagattactcatcattgcctgttcataacagaatcctaagatgtttaagatttctaatgcaaatcaaaatctcatcatcacttgtcattgctaaattaaatgacaggataataacattacattaaaaccatttttctcttgattgagtacctttttcagaagtgaaccttctagatgtatattttttttcatcagtactataaatgcatttagaatccaagataaaaatagaatttaaaggggaggagtgggatgttttcaaattattgatgaggctcttttgaatctcaaccatatttgacagtgtactgcaagggaatggagtagttcagctcaatttattgacacttttagagctatataaaggaggttaacaggttgagcttggtctttattgaagcaatcgtgtgttcttagcatcagttatatgtcatcccgttgcaaactggctgttaggacttgtcattgctctgttctaatataagatactgacttcagatagatcacaacctatgtggaaaattaatataaatttctaacctgtaaaagcagtgtaggttctcagtggccttaccattgtgaacttacctctttacctttctttcctatctaaagctagttaaccttttttggtcacacctaccctctttttatctgctccctctggcccttggcccacttctctgtggccagctagccagtgttygtgccacctgagcccatcttcttcacttgccctagaactccccagaatgcctctttcattttaaagtcaatcatttccttccatccttcaaatattttatttcctcacaccttccatctttaataatatgaaatataaaaatcttaccctggatcaaaccttttattctttttgcctcacttaatactatcatcattaggcaataatagcattatggtaaaaattcttacctcttagagaagctgatgaaggtattgactcaaacaagattggctatgaaacaataagtattaaattattaaatctggatgataggtgaatgagggaaagggaagccagtatgctgttttctctacttttataggtttgtaatcttccataataaaaatttaaaaataacttagctctttagtgttccttttttaaaatagacaccctttttgagtgagcacgtgaaatgatgtggtatgcaggatggactaagactaaaacctgatcctgctctctgaacaccccactcttactctaccccttagtaaacaaaaaagattctttagcacctggaattgtaacttccctcttctccttaggtcctgtacttgattatcagaatcctggtctggtttaacacttcctgcttcttggtttaacacttcctgcttcttgttaaagtgaccagataaacccatatagaaatatacattaatttcatcccatttattaaatcccactgtgaataaagttctgtgctggcattaagaaagagaatatgaaggaaaagtattcatgaataaccctgatgcagtacaacactagccacagtagtggtctctaggagagagagaggaattctgtcaaggagamtcattcttgataatgatgcaaactactaaatgtcatcctaaaggaagagataatcttcgttgcttctgcttatagttctaattgttaagactatttagagctctaccatatagccttccctctcttctaaagaacttaaattgattacagttaccaatatgcttttttcttctctttttaaattacaatagtcttacttctcgtttgccaaaaactggagaaaccatccatggacataagttttttattggctttggagggaaaggtgccaaccagtgtgtccaagctgctcggcttggagcaatgacgtccatggtgtgtaaggtaagtacaaagtatagtggagaggactctagaggtaagaatctggttttaagactggagttcattgtttttaattttttcaaccattttagagtgaacagttcagtggcatgtaatacatagagtggcatttaatacattcaaccaccacttctgtcttgttccagaactttaccatcattccaaaacaaaatcccttaccccttaagcagttcctcctcattctgtcttccctttaaagccctgggaaccaccagtcttcattctatctctatggatttatctattcgggacatttcatataaatggaatatatattatgtgacattttgtacctggcttctttcacttagcatactgtttttgaggtacaacattgtagcatatatcagtatttccttcctttttgtggttgaataatattccattgtatggatataccacaatttttttattcatcaatgaatggattgatggacacttgggctgtttccaccttttggctgttatgaatagcagtgctactaacatgcatatacatctacttgagtacctgctttcaattcttgtggaagtttattgtttttaaagatctaaataacagagaatagtctcccttgtcctttatactaatttctacctcattgaatcctctgggaagtagcagttctcaaataacttaatgctgcattccctgaatgtaatgagtttgtaactggggtgtgagaagtgagggaaattagcgtactccaatgggtttctgtcatccagcttctaaacaacagcatgagtcaccttgtttttagcaggtttcaccgcagcaacacagcttttggaaacttcttgtaataaccggtgatttactcatctctaagtcattttcttctaatgctgtatcttagatctgaaaagaatctgggccttaatgagctacatataactgagcttttggcatagttttgttttcatgtatgtagagatatgatattgtaacatacagtattcctatttttatccatgctaccgaaataatttgaaaataaatgggctgccaaaagttttcacttttcatttttcatgaaattttaaggtgctagcattatagcattagtataacaggaaaggtagatgattgtgtttctttgatttttagggaaagccagcctgtgtctgcacattattaaagggcaagaaaaatacaaggaacttaaaagaatgagctttctcctgtgaactatgtagattttaccaaaaattctcgaaatgtcatttttcattgcagtcagcacttttctctccacaggagttttaaatgatgtataaactatacaattatcactccatctgctagtaaactgtaattttatttctaacctatgattaacataattttcacatggctatttggtcaaaaacatcacgtgaagcatcagattcaaagcaagaaaccctcttttgctaagattgagctcttgatagatttaaaatatcagtgtaattaatcagcaattaattatgttccaggaattaygggtctgtgagaggtggctgattaaaaacttaggcctgacccatctcatacctgattagctatggagcgtttggagagtaatcagatggtgctgacttaattaagaggacctgggaactggaaagaggatgatataatttcctgtgtaggaaaacttggacatagaattggcgttggaagctatgcacccaaaatggcttcgctgggaagaggggagttcctagagctggagacattaaaggagagattagagaacccctctcttggatgttttatggaagctatttatgtagccattaaagtcaagattggatgtcccctgggatctcttccaaccctaagattatgaaattgattttattttaggtctgttgaatttgaggcaaagaaagaaatgacaaagagaaatatttgagttatggaactgaacktgggaaatgaatcctaaaaccatatgagtggataggagaggaatagaagcagggggctgtattttgggaaatgttccagttaggaggttgattaaagcaaaggtaccatttgtgtgtgatggtttatgttagcatctgtacaattttgaaagttctatacatctaccatgcccctgatttagtcacctaatgcttagcaccacagtggattttagcctgtgtgtctgcctagcagaggatcaaaaaacatgactgcagctaaaacctatccagggtaactttggttagataacttggaacctttagacatggaattatttaaaagcttaagcaaattgcataatattcttagacttcttaaaaagaaaatcatatatttttgtaaaagaagttattatctgtccattaatcatattttatccattgtgagatacatttttattaagcaaattagccaaacttgctttatagcagttttttaaagatgacaagttctaagtagaaaccaaaaccatgaaatttatcaagataaaaatgaacagaaggagcaaaagaaaaacaggtaaaaattttctatggctttctcagcaagatttatttacctcttgctacctataacaaactaaaattcaaactcttatgaagtaagattgatggcccaaacaaacttatattgagctagggagaaatatttgttaagatattgtgacaaagaatattaaatgagttacctcattatttatacagtgatacatgtataatgaaacacttcaagtacttaagagttagtcagtatttagctgagtcatggaccaaagctacagtctagtgataactggagatggtattttcagatttaaaatcctggcagatattgtataaaatgaaagtcttcctcccagggcaaagagcctattaggacatctttcttaaatcttcacctgagttaagtgtttcctgctccattccattgaagccaaatgttaagaagaggaagttattcctaaacatcaaaagttggcagttcaggagaggaccatggtcaagtaaggaactcaagatgcactggcccagtatgagcacagaaaccatgagcaggtatgaacccaaatgacccaggtcaggaatcagcaaactggaaacaccttcaagaaattaccctgtcttgcttccttcaaatgtgagactatcaaactatccttcaaatatgagactatccttcatatatgagactatcaaactctctaatacaggtagctatctgttttcccttcagaaccatcaagcatgaagttttgtgacagaggtgatactgatgcaggctgccctgaggggcttagccaaggagggttcttggctttgcccaggcaagaatttaagagtgagccaaggataagaaaaagcaacttgtgtggtgggggggcggggggtagtaagaacacttaacttgagatctaccttcttaagagcattttaagcatacaataaagtattatgaactataggcacgatgtggtacagcagatctctggatcttattttatcttgccaaatgggcaggaggaaacttggagnnnnnnnnnnnnnnnnnnnnnnnnnnnnnnnnnnnnnnnnnnnnnnnnnnnnnnnnnnnnnnnnnnnnnnnnatgcatgtattcaaacccatcaaaatgtatacattaaatatatgcagggtttttattataattatatctcagtaaagctgttaaatattaaaaaaaaaaaaaaagaaaaagcaactttgattgaaccagtgctgcagggctaactgataggctatgtgcccagagggtagtgtatgggctgttagcaactatatttacatgtactttaaattatatgctaattaagaggcaggttattcagaactttttggaaaaagggtggggaatttccagaactataaaaggtaacttctgggccattgccatggcatttgtaaactatcttgggtccagtaggagtgtcttgtgctaatgagcagtgagagcaactagaggtcactttcctcttttcagccagcgtcttcattgcaccatgttttgaccagatcctgcttccaccagcagggtccaactggaaaataagacctgctggcctcctaactcggtacattaaggtggtgctgttcaaagtccagtcctcaggctggtgccaggctgcatgcagattgtcaccggtccaaacagcacaggaattgagagtaagcagttaggatcatttatagcaatttgacagaataactttacaaccgttgaatataatagtaataataaattaggccttgtagtttgtatgactcttttttgttttcatctccttgttattgtattttataaaattgttagtccacaatggattgaaaacaagaaaaggaaaacaaggccagtgcttctccacggatagcttgaaaagcagtgcattagagtatccatcaccttaaccaaaaagtaccttctgtgctagattactgtgggagaatcatctgatcatgcattgagattttcattttcagagatcaaaaattagtcaccaggtctttccaggtaatatataatgaggtgaaatctgtcctttcctgaactctgttgaaagacagctagatataattagttggctatgttgattggaatgcttacccatatgttcaaacaaatgatcctataaccaagcaaataatataaaccttgtataggaagaaatggtagaaatgagagaaaataactggattatctcaaacctatcaccactctcagataatcaggcctaataatggtgattgcagcattaactttgtatattaaaggtctttatttttttctgagacaggatctcactctgttgcccaggctagagtgcagtggtgcaatctgggctcactgcagcctcaacctccccgggctcaggtgatcttcctgcctcagcctcccaagtagctgtgactacaggcatattccaccatacccagctaatttttgtattttttgtagacaaggttttgccatgttgcccaggctggtctcaaactcctgagctcaagcaatctgcctgccttggcctcccaaagtgctgggattacaggtgtgcaccaccagcccraaggcctttttttttttttttttttttcagagacaggttgcctgggctgtagtactacggtgctacagctcactgcagcctcaaactcctgggctcaagcaatcctcccacctcagcctccagagtagctgagactacaggcatgcagcaccacacccagctaattttttaattttttgtagagatggggtcttgctgtgttgctgaggctggtctcgaactcctgtcctcgagcagtcttaccacctcagcctcccaaaatgctaggattacggcataagccaccatgcctagcctaaaggccattattaaggtaaacacccctttatctaggatttaaacaaccagcaagctttaataactgagattttatatattcttcttatgtattttgttataaggccacaaatgacaagttaaaagttaatatgaaggatttattcaaaaaagcaacagctgggttttgtatgacaacaaatgcaacttagtctcctcaaccagctgttcactataaccctcaggcactgaaaagtgacaaaatgtcttcagttgcaaggattaaattatattcatcttagttttagtgttaaacatattttctgtattctaatgctttgaaatcggtaacctgttttaatatatgtgataacttcttgagcagaatattcaatttcatgtggccttgggtaggatgttttgatatcctgtgttttatttaccccaaatgtatgttgaggagtagaattactagatggtttctgccatttgaggattccaagcagcctaaacaaccattcctcagtcattttgcaaaatagaagttatgatgctgactgaagttgccctccttagcttcaggtcatagttctggactctggaagccctcccaaagctcttcttcaatgcagaaagatccctcccagtgataagagtgaaggaagcacctcagyccccttagctgaagaaatgctcttgttcmtcatacacccagcccttttgctttccatgacccttgctgcattgtcaaatacagaagccactagccacatgtggatatttagatttaaatgtaatcaaagttaaaaaattgaattcctgtcacacagtctgtatttcgagtgtctgtattgggcagaacaaatagaaaacattttctgtattggacagcacagatatagaacatttcatcattgcagaaagttctattggatggcactactctacaatattcagggcggaactgagcctgggatttccaaagagcatgttgagttctgagagttcccttttggcttatgtgcaggtgcttgtccatagttgctcttgacctggcttccttcacgtggaacaagttaacacagacaggttatctcagactatgcgggtttccaagaatctttctacccaaaagtatttcactgctrtagtcaaaagagtgtgagggtgccttcaaggaggctgttggaaacaaaaccttgtatggaaccattctagaatagtttgggtgcttgtagtcatgttccttcaagaatggaacatgacagccrggtgtggtggctcacgcctgtaatcccagcactttgggaggctgagatgggcagatcacctgaggtcaggagttcgagaccaccctggctaacatggtgaaaccccatttctactaaaagtacaaaaattagccaggtgtgatggtgcacacctgtaatcccagctactcgggaggctgaggcaggagaatcacctgaacccaagaggcagaggttgcagtgagcggagatcgcaccattgcactccagcttgggcaacaagagcgaaactccgtctcaaaaataaaaaaataaaaaatttaaaaaaaaaagaatggaacatgactacaagatgggtccaaggaaaatgaacagaaggacaactaatgtgatcaaatcctaaagaatctccagtaagcttttaagaagactagactaacaaatatgaaatcgccaacaatataagatggtattgaactatgggcttgattaggaatgtcataggaggtgtggagatgagaggattaacaagggccagagtagggaaggtagaccttaagctgatacttgaaaaacaggtgaggtttgatttagtggaggagagagggcaaaggacttctaagttctcagaaatgatggtaaggaaacagacaggtttctttctattgatatatccagaaaggaacaattttctgtggaagaatagaacacaccaggagtgactgaaacctggattgagacatagtccattgaagtaatgctcacctgcaggacagaaaaatagaagttcagttcagaagtatagttcagaggtagcaagactaaagrcctacaggagccaagcaggtaacagaaattgcagtaggctaggtgaagccaagagtctatgagcactttaaggcactcacctctcagttccaggtggtttgccttgcaggaatgtggacccagtgttaccagaacctctgaattttcagaaccccctggacatctgtctgtttttgtgaagtcttctaatatttaagtattgagaactgataaaaatagcagggcatttacaccaaaacctgcacacagatatttatagcagctttattcataatttcccaaacttggaagacatcctttagtagataaatggataaataaactctggtacatcgagacaatggaatatcattcagccctaaaaagaaattagctatcaaggcataaaaagacacagaggaactttagttgcatattactaagtaaaagaagtcaatctgaaaaggctgcatactgtgtaattacaactgtatgatattctggaaaaggcaaaactatggagacaaaagattagtggttgccagaggctagtggggagagaaggatgaatatacaaagcatagaggatttttagggtagtgaaactattgtgtatagtactataatggtgggtatatgacattttacatttgttaaaccctatagaatatccgacaccaagggtgaaccctaatgtaaactatggagtttgagtgataatgatatgtcatgtaggtttatcagttgtaacaaagtaccacttagttgcaggatgttaatagtgggggatactagttgccggaggagacagagagtatatgggaactctgtactttctactctcttaggctgagaacctaaaastgtttttaaaataaagtctagtttttagaaaacagtagtagggcaaacaaaacatatctagcagtcagattsaactttcagcccaccaatttacaacctctgctgtagattcaastgtagagttcaagccaaggtccagccaaggtagcagtcagacaaatggttagcattagaggggtatgggagaagataacaagggtgtcctgactagcacagtgattgcagcaccacggaggccagaaacggacagtagggagatgtcgataagatgccagcattagtatcaaaggccttgcaatcatagttttctggttttgagccacagacctaaaggcctggcccctgcaartggctggccaggcagagaagagtgcctgttctgaaagagctagagggctaaccagatgattaggatacacactcatgctgacaaaaacaggggagatccagttaccaaagtggaccacaaagcaagaatgtggtcacaggatccagtcacagacaaagctacttaaattatagttcagtggttcagggttacactaggcactaggctaactagctttttcttttcttttttttctttttttctttttcctttttttttttttttttttttttttttgagacagagtcttgctctgtcgcccaggctggagtgcagtggcacaatctcagcttactgcaacctccgcctcctgggtttaagcagttctacctcagcctctcaagtaactgggactacaggcgtgcgccaccacacccggctgatttttgtattttcagtagagatggggttttaccatgttgaccaggctggcctcgaactcctgacctcaggtgatccatccgccttgacctcccaaagtgttgggattacaggcatgagccaccgcacccagcctgaagctagtcaggactttgttaataacagacaatagacacccaattcaaaatagcttaagcaaaaaaaaataaaataaaatttttaaaaagaatgtattgcctcatgtaactgaaaagcccagtggtagagctggcttcagatgacttagggttccattaggctattaggagtctgtgtctgtttgtgtctgtcaccctcctgctttctgttatgtttctctcttttctttctagctgtctccacatggtgagccccagtggctgcaggcttacattctcttatagccagcaatcttactgggaagaaaacttgtcttccctggtagtttcagtaaaagtcccaggactgagtcttattggactagtttaggtcacatgctcattcatgaacccatcactgtgactaggatggtggaacacactttttttttttttttttttgagacagtctcactctgtcacccagactatagtgcagtggtgtgacctcggctcactgcaacctccacctccgggttcaagcaattctcctgcttcagcctcccgagtagctgggactacaaggaacatgctttttaatcaggcctgggtcccttggccaacctaatcttgttgtctatagaatgggacagaaataggtgtccaaaggaaaaactgaaatacctttaacagaatagatgctaggatgcaaaaacacaattccattataccaagttacccaagttagctagggcctttaaaatttccttctctttgcctctatgtgtcagtgtcaagggagaagataaaaagattctggaacatcaggcaagtcatgacaaagatacccatatttacagtgaagtacaaacagctgagattcttcataaatattgaggattgatgatggtagataactctatctcagtgggaattatcacatgaacagctcaaaatgagaatgacttaatgagtgaygttcattaaatacttcacattttaagtaggatataagtgaaacattatataacaattctttgggctgcaatcaagtctagcatcttatattaagaagattaattagttaatgtttataaagtactgtgcagatatgcccttttaaaatgctaagtattctaaaaactacattgtagcattttactaactctaaaagatctaatattcattatttctttggtacaggttggcaaagattcttttggcaatgattatatagaaaacttaaaacagaatgatatttctacaggtaaaattcccaccttttttaaagttagtgtttatagcttttttctgtgattttgttatgagaaaaattgaatctagaggaggattattagaccttcccctggtggccagagaatttctatgcacagctttgtccattcttgcttaaatgtccttgggttgattcttccctgtacattcctccagatgggaataaaatgataggaggttacaaaccttcatctcatgaacatgtgacaaatgacaaggagaaaaaggtgctgcattcacaaaagatgttttaagaatgttatagctggcaacaatcattagaagccatacaggctgaaaccattatttcacagaagagaaaaccgaaggtcagagatgttctgtgatttctgcaagagcacacagttggttggagctagagccaggactagaatgaagatcttctgattccagttcagggctctttgctgctaccaaaggctgcctggtcaacatttctgtttatatgccagaccttggttcttggtgaaataacaagcttatgagaatgaaaataatcaaacaagttcattttatagatttgacctttactttttatctcaactctgacattcctttcaatgaagaacataagtgtgttggtctagaaaaatgcatatgtatacaattatgaataattggggggaatcgaaagtaggagcagtttggtgggttgttactaatgcagagaaaaggtgcaactacatgtaaagctgtctatttttcttgttgtatagatgatgggtataaattagcactaattacttatttttttttatcattccagatggttaaaggttwaaaaggttttccaaggattagtgttgtattgaaattgttaaaataaattatccatgccagcctgtatacatgtgattgtaattttcttttttctttcagaatttacatatcagactaaagatgctgctacaggaactgcttctataattgtcaataatgaaggtaagtgttttgcatattggagtgtcatttcataagacagtgtatttccagagttagatcagaagcatcaatttttaccataatcctatggacctcttactatacccatcactccaaggcctaaaacatagtttttccaatccaaatataaatgtgtttccctttatttatacttctcacatggatcgttcagatcaatttttggacaattttcaaaattgtcaatccaatatatatgaagttgcctcaaaataatatgtatatgctgtaatgtccccattacccttcatgtgaacttataattgacatttgtctctaaaagcagtcaagcattcatctgtcatttcagttacactaggtaagtawatgtaaataggtgcaaagaaaagtttgatgagtcatatttatagaatatgttctgagcaaatggcagcaactaattacatccaacttatcgttagtgttcaattttgtctttcaacagcaatcaaatctcaaaagtctatatatacaactaagtctgccacaaggctttgccatagctgatacatttatcttttaaaatagtaattgggcctggcacagtggctcacacctgtaatgccaatgctttcagaggctaaagtgggaggatcacttgaggccaggaattcaaggctgcagtgagccacagtcccaccactgcacttcagcctgcgtgacagagtgagactctgactctaaataaataaatgcatgagtgaatgaatgaatgaatgaatgaattaaaacagaggctgagcgtagtggctcatgcctataatctcagcattttgggaggccaaggcaggtggatcatttgaggtcaggagttcaagaccagcctgaccaacatagtaaaaccccatctctactgaaaatgcaaaaacaattagccaggcctggtggcaaatgcctgtaatctcagctactcaggaggctgaggcaggagaatcgcttgaactcacaaggcggaggttgcagtgagccaagattgggtgactacactccagcctgggcgacgacggagcaagactctgtctcaaaaaaaaaaaaatggtaacaaccttcaagtcaagttttcataatttctgccaactgttttaattataaaaacgcctacataagtttttttaaatcagaatcaatattcagaaggaccaagcatttcctggggcacctaggacagaacctcatgtgttgtggacagcgtgcttgtgttaaatgaggatttgtcacaatgtgtcttttatttataatgcagctttgcagcatcatttctcacagaaaatatggtatttttaactcggctttagtgattccaagtagcaataataacgatatatttcacctaaaggtggtagataaaagtttgcattctaactatagaaagcctgtgttcatttaagctacattttaagtaactattcctgccaacagcagctcattccttgtcttaaacctcttttgttgttgttgttgttgttgttgttgttgttctaggactatcctcaagttctctttcttatctatgaacaaaatctgcattttccatgcaaagatataatgtcatagtgtgtgtcaagtgcctatttggtagaccttgcctggtttacagtgtacggtaatgccctcaagactataggtggtaatagaagaattaggacaaatacacagagatgggacaatcagctcctttaaatgaaggagtgagtttgcaagataaagtaatgagtttagttttgactagttaaatttgaggcatgaataagctagccatatggcattatccatcagacagctatagtcttgggcttgctgcttagcagctaaggccaggccaaaaatttggatctgggagacagcaacatggaagcagcagctgactccaacagagaaaatgaggtcactgaagaaaaggaaggagagatgctgtctttcagcaagtgggaactttgaatttttctaggactgaggttaggtttatgctgaaccatccccactttattaagtcttcctcgtggccaacaaacacatctgtggtaagatgataggatagaatttgttctgtgttgagaggtgattttaggtcatgtctgtacaagatcagcacgagcagcccggagcacagaaaatgcctgctacaactcattcctccagatcagtgttgtccaataaaaataaaatgcaagcctcgtgtggaattttaaattgtctagtagccacattttaaaaagtaaaaaggaacaggtaaatttaacttaggccatatatttaacccaatatgtccaaaatattatcattacagtgtgtaatcaaaaatttatcttggctgggtacggtagcccacacctgtaatccccgcactttgggaggccaaggcgggtagatcacatgaggtcaggagttcgagactagcctggccaacatagtgaaaccccatctctactaaaaatgcaaaaaaaaattagccaggcgtggcggcacacccctgcaataccagctacttgggaggcttaggtgggagagttgattgaacccaggaggtggaggctgcagtgagccaagatcgcacgactgcactccagcctgggcaacagagtgagaccccaaaatktatcttaatttttttttaatttttaaaatggtaagaataaatggatattttaccttatttcctttgtactatctttgaaatccgcttgtattttacttgaagcacacctcagtggactagccacatttctttttttttttttttttkctgagacagagtctcactcactcttgcccaggctggaatgcaatgacacaatctcaggtcactgctacctccgcctcccaggtttaagcgactctcacgcctcaggctcctaagtagctgcgactgcaggcacataccaccacgcccagctaatttttgttattttagtagagatgggttttcaccatttgaccaggctggtcttcaactcctgacctcaagtgatatgcccacctcggcctcccaaagtgctagaaattataggtatgagccactctgcccagccaggactagccacatttcaaatgttcaatggccatgtgtggctcgtgctcatgactaccatgttggacagcacagctcttaagggttcaccttacagatgaaatgcaccaccacccctgcctcattcaggtgggattatagacagcaggtccaagtaataagaatatatcagattccttagttctgtttctgtttgatccattatagtataagccaggtatccctctctcctctatatctgatacaattttctatctgttagatatttaaaatgtgttttgattgacagaatcactttttagaataccatagggtacacacatgaactgcttgcatactacagtgtcatacaagtttattcctatttatattcatctctatggcatctgtcatttaggattcagaacctttaccgcatacatatactagctattttctataaaagaaatgtttaaagtatgttatatgtcatttctcaactaataytctttatatataagaatattgggaaaatctttttaagattttgcttaaggtgatcagaataatgtgcatcttacagagatattataaaagatacatttggaactcaaagttcaagctgaataacctagaaatgctaaaattaatacttaataacacattttgtataatgactttacaagggcgattgtattcataacactgcagaatatcatttgcttggctttgtttagttttaatrtaataggtggaatttctttataggccagaatatcattgtcatagtggctggagcaaatttacttttgaatacggaggatctgagggcagcagccaatgtcattagcagagccaaagtcatggtctgccagctcgaaataactccagcaacttctttggaagccctaacaatggcccgcaggagtggaggtaattatacatatttgtcattctttctataaaagcttttatcgctgtcttaattaaasttaaccttttaagttaagcaaagcaatactctttctgtcgtaaaatattctttcttccatctgtgagattcacagtcttgtggttcttgataatgttagaaaaccttgcaaacagggtaaaaaaaaaaacatgagtagcatttccgatatcccgcaatataaatcttcaatgtagctggcagaaatggtacaagtagaattagaattcctgtaattccagctactcaggaggctgaggcaggagaatcgcttgaaccctagaggtggaggttgcagtgagccgagatcgctctgctgcactctagcctgggtgacaagagtgagactccgtctcaaaaaaaaaaaaaagaattcctgaatcagccccttgtccaaggtacactctaggtggtgaaatgttttctactctgagaagcagaggttaagctgcatgtcatacatacaaatacatgcatacatacaaaagtaacyggggcagcccagttactttttgacaaacatctctaggaattgaagattaggttttttctcctttttgtaaaactttatcatctttcaataaacaacaaaagattatttatatgtaatattttctatgttatcaatgtccattgacattgcctcttttgtttttgattttggaaattttcaaacctacaaaagcagcagaattgtacagtgaaatccatcacccagcttccagttatcaacctgtagctaatcttgattcatcttttctcccactcactcctcttttctcacctccagcaaataacaaactttttaaaaatccagatgatttatttgtttgcttccttttcaccactgactagtggggaaagcatcttctgaattagaatcccatttctgtcccttgtcagcttcgtggtcctagcagaattacctgatttgtctgagccttttcagtaaaatgcatatagaaatactccatctgcagaattgttctcaggatggaataaaataaaataggatgccaagcatggtgtagtacatggtggtaaatcccaattttttcctcttcaatccacttctctctttaaagttaggataatatcctgatcaagcatcatttggtgaaaaaaatcaaaataaatagtagccactctaacatgatgacttcttgatattgtggcaatagttctgtgatttttttaaagaataaaatagagaaccacactgactatttctcaagatacaaaactaaaaagaaaaaagaaaaagaacagtgtgtgtgtgtgtgtgtgtgtgtgtgtgtgtgtgtgtgtgtgtgtttatataagtgatttctcccaaagtgtgtagtgttctacatagaaataaatggaaaataagtcactgaaatgattttgtggagaattttaaaatgttcgtcctgatttaacaaattttcctcttggcaaaacaacatgctgtggtaaattttccctgacatttagtgtatttttaatggacatgaagctgtcagaaagaattctaagccaaaacccatttggttccattttcttggagtgtcacagtaaagtctaatgcttatggttacgcattctctgcaccgtgcccatctcagcagagtgatgtgaatacagggtgccaccctgctcctgctcttgtctttctttgtatagatcaaagcacattctcgtgtaacttctctttttttcctactatcccttactgctcagagatcactgttccctctgtcctagtctagttgcctgttacctaccctgcttgtgaaggagagaaagatacagcagccacagttgaggagctaacctttcacaggtgagaatagagtaatccggatgggcaggcagcctaccctggggctgtcattgggtggggtccagaaaggcttcctccatcaccttccrtgtagctcttccagttgggagctggaggacccaggacagcaggaagcggggtaggtgacagtgggccacagaccacttggcctacttcacacttttattaagagccagcatgccttggtattaattctgcatgaacttccttatataataatagcagaaatagtaataccatgcatttatatgtactttacatcttataaagtactttcgtacacattttaccctcagaaaaaccttatgacaaagatatggcaggcattgttctctcagattaaaggtgagaagactgagactgagaggttaagtcatttgttcaaacagtgtcgcactttaagttgaagaaaccatgatttcagactctaagacccaagttctgtctcctagtttaaaccacactttaaagtgccacaacccattgattccaacaaactgagcctttatgaagagtatctctagaaaagtcaagtccataaattttaacactgtccagcacgtggcctaagctttatgtgtttttgctgctcaagaaacagagaagaggctctacagtgttttcagcactgtaaccccaatagaacttacacacacacacacgaacacacatgcacacaagcacacacactcatgtgtccattactcctccagtccggtggctttctctggccaagtcagctggtccctatttggtagataccggccagatgcagcttagattctattccatgaggagggtgtgtgtgtgtgtgtgtgtgtgtgtgtgcgcgcgtgcgtgtgtgtgtgtgtgtgtgtgtgtgtgtgtgtgtgtgtgtaatgcatcatcattctcatatgcaagaagagtggtatcccagcactttgggaggccgaggtgggtggatcatgaggtcaagagatcgagaccatcctggctaacacggtgaaaccccatctctactcaaaatacaaaaaaattagccgggcatggtggtgggtgcctgtagtcccagctactcgggaggctgaggcaggagaatggtgtgaacccaggaggcggaacttgcagtgagccgagatcgcgccactccactccagcctgggtgacagagcgagactccatctcaaaaaaaaaaaaaaaaagaagaagagtggtataatgaaaggagaccattggtttgggaattgtgaaatatggctttaaattcataatcaatcagcaaatgggggatctcagtcaagtaagtcagttcctcactctggacgtcattttcttcttctgtgaaaccagaattgggctgacagctctcacagttctttcatgtcactttggactgatcccagagcagagtgggcttaatgatctcttgagcactgagcaccctacccactgccccaggaagctgcctatgtgctgaacagcattattccgtcttcaagaacgatgataaagtcttcatcgtcatcatcatctatgggttttcttatcacagttccattatctttactgcttacaggtagtgaattttgaattaagcacattgcataactagattatgctaatatatcagttatgaaaatccagaggaaaagatccctacatctttgaatatactgtctcaaaactctctgtcrctatcaaaatgaaagcattgatttttaaagacatagtagctacaacaccaaaaatcggtagccctgtatagccacccccatccccaccaggccatgaagctatgaggtaggcccactgaagagccagtgctgcagctgcttgtgatgaaattatgcatgttggttctggtctttatatccatttccaagcaaatggaacagtacataaacaattataaataattgagattgtaaaattgccaaagttaaattatcagtatgatacaaagtatcttttaatgccacttcagtccttttgcctttggcaaacaaaacttcttatctggccatccagactttcacaatgacattgtccagcacatagcccaagctttgagtgtttttgctgctcaagtcacagaaaagagcctctagagtaatggacagcaaagccagtattttgagtgtcccaacatgctcacagtgtcttcactcagggtgattttcttccccggtttctctgagctaataattagggccttcctaactgtccagcccctgccctccgtgacaacaccataaagagtttctgcctcattttcctgccttttagcctatacaactgctcctccaggcctcaccagttccttattgacattattgtgctatccattaacatgcagttaagataactaggagtttagttcatctgacactgtaattaataataattactgttgggtgctaccagtcacctctgcaactccaagttactccatggtacagtctgtgttctctagctctgcctggtcccaggatgacatcatggcttccaccttgtctattacagatttgcattcttctttgattaactgcatctactaatttatgtttctttcatcatggtggagtatgctcatttgtggtagcacaagctgagaagaatgctttctttatggcatttacacttttcccctaaatttagttaccagtcagactctaagcctatgtatccagttactattgaagaatgctgtccctcagtaaagtacaggcaaataaggttgatttttatacagtatttacagtaaaattatggaattccttattctagcaattggtacctaaattttaatgtaattttttccttaaaatttgcttttattgtggaaaatttcaaatatatatagacatacagagaatagtatggtaaacctatatatactatcatttagcttcaacagttaccaacatgtggccagtctttttttctacttttaaattccatcttttattttagacacgggggtacatgtgcagacttgtttttgttttgtttttgtttgtttgagatagagtctcattctgcccgcccaggctggagtgcagtggcatgatctcagctcactgcagcctccacctcccakattcaagtgattcttatgcctcagcctcccaagtagctgggattacaggcaggcaccaccacacccagctaatttttgtatttttaatagagatggggcttcaccatgttggccaggcttgtcttgaacttcttacctcaggtgatccacctgcctcarcctcccaaagtactgggattacaggcatgaaccaccgcaccaggccttcatatgcagatttgttacatgggagtattgcgcccaggtagggagcacggtactcaataggtagcttttcaacctgtgcccctccctgctccagtactctgtagtgtctgttgttcccatctttctgtccatgcgtactcaatatttagcccccacttataagtgaatacatgtggtatttggttttctgttcttattttaatttgattaggattatggcctccagctccatctatgttgctgccaaggacatgatttcattcctttttacggctacatagtattccatggtatatatgtaccacattttctttatccagtccaccattgatgggcacctaggttgattccatgtctttgctattgtgactagcatggtgatgaacatacaagtacatgtttcctttaggtataatgatctgttttcctttgggtgtgtaccaggcataggattgctgggtcaaatggtaggtctattttaagttctttgagaatcaatctccaaactgctttctacatgactgaactaagttacattcctgccaacagtgtataagtgtttccttctctctgcagcctcaccagcatctgttgtgttttgactttttgttttttgtttcgttttgttttgttttgttttttgagatggagtctcgctctatcgcccaggctggagtgcagtggcacgatctcggctcactgcaagctccacctcccagattcacgccattctcctgcctcagcctcccgagtagctgggactacaggcacctgccaccatgcccggctaatatttttgtatttttagtagagacagggtttcaccgtgttagccaggatgatctyaatctcccgatcctcgtgatctgccygcctcggccgcccaaagtgctgggattacaggtgtgagccacctcggctggcccttgactttttaataatagctgttttgactggtgtgagatggtatctcattatagtttgatttgcatttctctgatgatgagtgaaacgatgagtagtttttcatatgttttttggcccactcgtgtatcttcttttgagaaatgtctgttcatgtcctttgcccattttttaacagagttgttttttgcttgtcgatttatgtaagttccttatagattctgcatattagacctttgtcagatgcatagtttgcaaatattttctcccattctataggttttctgtttactctattgaccatttcttttgctatgcagaagctatttagtttaattaagtcccacttgtcaatttttgtttttgttacagttgctttgggggacttagccaaaaattctttgccaatgccagtgtcaaaaagggtattttctaagctttcttctaggatttttatagtttgaggtcttacatttaaaatatttaatccatcttgagttaatttttgtatatggtgaaagataagggtctagtttcattcttctgcatatggctagccaggtattccagcatcatttattgaatagggagtcttttccccattgcttgtttttgtcgcacatggccaatcttgttttatctgtatcctgcctcatggctccctaccccgcactgccaccttgaattatgttgaagcaaaacccagatgttatatcatttcgtttatagtatacctgttttttgatgtaagatactattattagtagtagtattttttgagacagaatctcactctgtcaccaggctggagtgcagtggcatgatctcggctcaccrcaccctccgcctcccaggttcaagcgattgtcctgcctcagcctcccaagtagctgggactaacaagcgcatgccaccacgcctggcaaatttttgtatttttagtagagacggggtttcascatgttggccaggatggcctcgatctcttgactttttgatctacccccctcagcctcccaaagtgctaggattacaggcatgagccactgtgcccggccagatactatgtgttttaagagtaatgtctttacctcatacagcacttaacctgtagtcaaatttagtcctatcagctttttataactaatggctcattagtttggtgagaaacctctccgacattttttccttctatgtaagtgtataaatgtaaatacacatatagttatgtgtgcttgttatttgttcttattaaaaaggggaggtaggccgggcacggtggctcacacctgtaatcttagcattttgggaggccaaggtgtgaggatcgcttgagcccaggaattcaagaacagcctaggcaacatggcaaaacctcatctctaccaaaaaaaaaaaaaaaaaattgcccaagcatggtgatrggcccattagtcccagctacttgggaggctgaggtgggaggatcacttgagtctgggaggtggaggttgcagtgagccaagattgcgccactatactccagcctgggtgacagagccatctcagaaaagggggggtggggtgggtgggtagtacaaaacttccttgttcacttataaataaattatagaaatctttcttgataaacagagatctactttactctttttaacagctgtagtgatctacatcagacgtgtcataattcttttttttctttttttttttttgagacagagtttcgctcttgttgcccaggctggagtgcaatgacgcgatctcagctcactgtagcctccacctcccgggttcaagcgattctcctgccccagcctctggagtagctgggattacaggcacgcaccaccatgcctggctaatttttatacttttagtgaagacagagtttcaccatgttggtcaggctggtctcaaactcctgacctcagttgatccacccgcctcagcttcccaaattgctgggattacaggcatgagccaccacgcccagcctatgtcataattttttaaaccaatcccctttagtaaargtttctttttgtgttttctattgcaaacagagctgtacaaacaacattgtatatcatctttgcatgcttatggatttctgtaggatgggtttagaaaaggaattacaggatcatgcatctttgagggaaaaaattgatcttttaagaatggctctaccatgttgttccacacttgtagctttgctctaatctgtgctcaaatgctgatgaatgtagatttgtggattacactaggtgagcagttgtttccatttaatgcttgaggaaaactgggaacagtatattgttctgaaaacctgaaaagtttaagtgagtgtgttagaatactggacaatgagagcctttatgtgtaattgacatctctaagacctctcagaagtgagagaaccaatgagagagactgttgccaggctacaaactccagcagaaggcagaagagatgggtagacaggmgggggtgttgrgctatctgtaaaggacaatataataacagtaataatcctttacatttgtacagcaggttagattttacactgggcttttacatccattttctaatttaagctgcacaataactctatacaaaaatctgagcagccaaaaatataccatagaatttctgtgggtggacattctggattctgaaataacaaaaatgtgggaatagtgttagcctatactggacaagacccagtgactgaatcaaaatgctaggtaagaccaaggaaggtgcagaagtagactagatgtcctcaccaggctgaagcagtagacagtttccattagccacgtgctgattagcatctccccaagaatgtggaatgcattagtgccaagctggctatgtgagagcctcatggagaacttgtgaatatgcagattccctgatcttacccccagagattctgattcagtgggtttgaggtcagtcctagaaattatgcattttaacaagctttcctagtgatgctgataggcaaccaagtttgcaaagcactgttattgaagtctctgagaactgcagctagagatttttacactatgggtctatagtcaaatgagactacttaacacgcaagtcagtggacctgggttgagaaaaagaagactaaccaatctagtactcaagtgaattagtgctttgacaaagaaggagcttcctatgaatgtaatttctaaagacttgaaatatatatatatctacatttacgaagtcccaaaccaaagggtgttttaaaatattgtgaattggcattgaggtatgtgttggtgtggacagagtcctggcctagagaggcccctttttctagagtggaccaaaccgtgaacttaaagccagaggaccctgagtaggggtccatcttaattgtgtcccaatgtatgaactgagacataggacctcatctttctgagcttcactttcctccctctgaaaaatggccatgatattctcatttccctgtgtctgctattcccatctatccttctcttgtagcctctccgtctgagctagcaccagcctctgactgaattcctcctcctttctcaatcttttttttaatattcccagattgctcacagaagccaagaatgtaagcttttgtgtaagtgcatatgtttgcaggagtaattgtgatatatttgggaggcatacataggtgtacaaaatatgcatacgcacatgagcttcccgcttactgttcccaccgggagaattctgaacctttcattgtttattttctatcgtctctttttcttccctggaaaatgggtttatgaactagccttgaaaccaagcacttaaagtaacccacaaaaatgtccaccagcctgttcacattcacacatgccctttcatgccacagcatttttacttttctctaatgttcctgttgcctttgccttaactctataatcacgttgactgttatattgctctttyccctggaagctgaaatgttgtaaagtacaaagtaaagaaaatggaaatagggaattggtacccagctgtcgtgaagattgagatttcagacttttctctacatccgtaactaagtggatatttaaccagatgaagacaaaaacgaactcggggattttccctactgaatgttgtctgtaaatgcaccatgttaaaaatgaaaactaataataacccccttttccattcctttgtagtgaaaaccttgttcaatccagcccctgccattgctgacctggatccccagttctacaccctctcagatgtgttctgctgcaatgaaagtgaggtaagggtgaattgctttgctcattctatgagaaaccaaaagtttgtacaagtggataaagcaaaggggcagaactaaccacatcaatttgatgacgtgaattctcaggcatggtgaaaacagattttttcagtttaccggggtgtggagaaaaggaaattagtaaatcctaggggggaaaaaaggattctctgagtcacttccatattctggcacttatcaaacctcagttaattttagtcccttccttgccctcacactgttggtgttttgttttcttttctaattatttcatgttctgaggactatattaaagttgccaggtttagcaagtaaaaatgcaggatgcccagttaaatttgaatttcagatagataataaataacatacctaacaaatttatactgtaaaattacctgtcatttatcttaaattcaaatttaactgagcttcctgtagtttgtctgccaaacgctaattagtatacaactcctggaagatctgctacattctgtagtgaagaccctgtgtcatgatgtatcatctgaacagactatctatcaactggtacaataagaaaggatattgtaccaccctttcttaaatattgttgggaagaaaatttcaatatttctccctttttataagccagacagcattagaacagagctctcgcccatcaatgggatgcaggtatacacgttagtaaaggcaacatggagagaaagaaattaatgaaccataatagttaaatttctactttttgtttttgagacaggaactcactgtcacccaggttggaatgcagtggtgtcatcatggctcactgcagcctctacctcccaggtttaagcaatcctcccacctcaacctcccaagtagctgggaccaccacgcttggctaatttttttattttgtgtagagacgggatttcgccatgttgcctaggctaatctcgaactcctgggctaaatcaagcctcccaaagtactgggattacaagtgtgagccactgtacccagcctaattttccatttggtttaaagtctatatgaaggcttttaggatttcttgacctgctttcttgataatttcatctctcaaaacatagaggaaacaagaaagaagactgctacaaagaaactaattttaacaaaccacaataggttatgcaatatttttgagcaaccaccatgctaggaagaaggaattgtgggaaatagcgatcatttcacaataagaggttagagtaccctcaactgccaaactggcctaaattttcctgctagatacttgaagagcactctatttattcctcaaatgttcatcacagctcaaattacttattcaattcttctgtcttctccattaaattacaagttccatgaggtcagagacatctgtcttattcactgttgtatccctgatggctatccctgtgtatatagttatctattgctgcataataaaatacctccaaaatgtactggcttacaacagcaataattatttattgtcactctcagtttttgcatgtcaggaattcacacaggggatagcatggtttgactctcccacgcgatgcctggggcttcagttggaagacgcaaaggctgagagctggaacttttcttcattcacctgcttgacagttgatgctggctttcagctgggggcataatgaggttgttggccagaacatgtaaacatggcctctrcgtgtgacttgggcttcctcataatatggtagctgggtttcaagatccagcttcccgtgagaaggagacacagaagccatgttggcttttatgagttagcttcggaagtaacacggcatcacttctgactcattctattgatttaagcaggaaggtccaccctagtaccccaccccttactagaagattgtcattggcacagtgtaaaaccaggatgtgtgatatgatataggttaatacagttatctttggaaaataacatctgctacactgtacctgcacatagctggcacttagtaaatgcttatgaaataaataaatgaaagaactctggtctttaaggaaactggtctcagaaacttaatggaagaaagaaaaacattaaaagcttaatgttctggagccaggcgcggtggctaacgcctgtaatcccagcactttgggaggccaaggtgggcagatcatgaggtcaggagttcaagaccagcctggccaacatggtgaaaccccgtctctactaaaaatacaaaaattagctgggcatggtggcacgtgcctgtaagcccagctactcaggaggctgaggcaggagaattgcttgaaccaggacctgggaggtggaggttgcagtgagccaagatcaggcggctgcactccagcctgggctacagggagactctgtctcaaaaaaaaaaagcttaatgttcttatagatgaactctaatcacagcaataatgtaaattcatgcttatgatactcactctgctccaaacacaaaccactgatatgtaaatactaatggacacaatgaaaagatacttacaagctctaaaacaagataaataactccacagatcagaaatggaacagcctcacagagcattcagcccttgatatgctggctgtacactagccccagaaacaggcagaagtggcaggaagttcacccgctgtgggtcatggatactaaaagtgtgccatttatagcggactggagccgagcccacagatggaaaccatacatgctaggctgtggctcccctgctaacagtgaaagggggaggaacctgctacccctgctgcctgaagcatatttaaggcccccaaactgaggagttagcaggacagagacacagcctctgaccaagaagtaaaccaagccaaccactgacttagtgactggactggcagtagccccagaaacagcagagcaagaactccctattgccaatataatacctggttttggtttagagactcttgtgtacctgggggaagctactgtaaaaccactgagggctgggcgtggtggctcacgcctgtaatcccagcactttgggaggccaaggcaggtggatcacgaggtcaggagatcgagaccatcctggtcaacatggtgaaaacccatctctactaaaaatacaaaaattagccaggtgtggtggcatgcacctgtagtcccagctactcaggaggctgaagcaggagaatcgtgtgaacctgggaggcacaggttgcagtgagccgagatctccccactgcacttcagcctgggtgacagagcaagactcttgtctcaaaaaaaaaaaaaaaaaaaaacactgaaaagcagggatcaaccaggtgggaactgatgtgtgacagctttccaactcacagtaagtaaagtgagcctgcaaatgaaaaacataatgctacaaaattcacccagcacaatcaacaacctacagatgaatttgcccaagatgaaattcatataataaaattcagccaggcgtggtggctcatacctgtaatcccagtgctttgggaggccaaagcagttgaatcacatgaacccaggagtttgagaccagcctgcggaacataatgagacttcatcctgtctctacaaaaataaaagattagctgtgtgtggtggtgcatgcctggagtcccagtatttgggaggctgaggcaaaaggattgcttgagcttaagagtttgaggctgtagtgagctatgatcatgccacagcactccagctggagtaatagagcaagatactatctctaaataaataaacaatgcaaaaaatactttaaatagtataattaagattaacattcattatgaaagaagaaaaaattttgtgaaagaaaaacagaatcaaagcaacaacatgtgaatatgaaaaacaaccaattagaagtcttgaaaacctaaaaagtcatggaaatgtttttaaatcactcagtagaaaaataaacattagaatggaatgaaaaattagtatattgaaagagaaattgggagaaaaatatggatcttgttgaaagccccctgattttacagattgtaattggtgtggggaaggtcacagactgaatgagtaggagaggcctcctgaatgccagggcattgcgttttctgctacctgtcattacctctcctaatctgcttccatcttctctggcaaaaacaaacaaaagaaataagtagtctgcaaacatggaaagcaaaaactggaaatttgagaagaggcattatggcccaagagaggcttggaagaattatgtccttaggtgccaaacttacaggtgcaatttatgctaaaattcttggcagtggccctttcctttctcctttcctgcctcccctccaaccttcctttttcttttttttttggtagacttctctttgttgccccaactctttgttaaaattattatatgtgcagaaaagctgaatgaacactctacatttcacctaaacatttgctaacattttgctgtatttgcttttcctcttccctgtatgtatttagttttgtttttgttgaaaagtaagtggaaaaaaaagtattttgttgttgagaataagttgcagacaacatgatrcctcaccccaaatacttcggcatacatctcctaagaggaaacacaataccattatcacacctaggaagattgtcagtaattccatgctatcatctaatatccaagccacattcaaatttccccagttgtccccagaatgtctttcattgatggtttttgtcatcactgttattgctttatttattttcctgtaccagtatctatcaaggttcccattgcattggttgttataaaaaagaagggagacattttctagaaaaacgcatctggaagtggattcaggttacttattttcaccactgtttctgttgacttttgtgtattctaggctgagattttaactggcctcacggtgggcagcgctgcagatgctggggaggctgcattagtgctcttgaaaaggggctgccaggtggtaatcattaccttaggggctgaaggatgtgtggtgctgtcacagacagaacctgagccaaagcacattcccacagagaaagtcaaggctgtggataccacggtaagttttaaaatttaagaatcatgtttagcctttgaaaattgttacttagtaactaattagatgctgtacctgaatttttggataatgaaacaaagccctagtaagtgatatggtaaaagagaagaacaaccaggcaggggaactgtattttaatccctctctaactctctgtgggactttatgcaagcagcttgacctctctgagacgtagtttcctcattcataaaatcagaatagcagtaaaattatacctgtgttacctgtattcattcatttatccagtcattcatcaacaaatagggatttgtggaatacctatcatgtcccagtcatatgatagttgctggggatatagcaataaataaggcaaagtctctgcccttgtcgggcttagattctaggcagtgaacaagtagctgtgtcttacaagcttctccagtgaaatgaacagcaaggagcactggttagcagagatcattcttttaaccaacaaattctagcagctaacatttactgcatgcttgctgtgtctcttttgcatacatctcatttaatctttttttttcatttaatctttaaacaattctgtgagacaagtattatttccattttacagaagaagaaatttgtacaggatcacattgctggtaggtaacagagctggagattcgaaactaggcatatggactccacacagacattttttatgtaaggtactgtgctgaggacaagtgtgctaagtgaacaagccatggctacagagtaggaatgaaaaggaaacaagttagaaaaaagactcatggttcccctaaagctggggaaacacaaattgtttgtttattgttagaattcagaagagcttgccaggcgccacttcacacttgtagtcccagcactttgggaggctgaggtgggcggatcatgaggtcaagagatcgagaacatcctggccaacatggtgaaaccccattctactaaagatacaaaacttagctgggcatggtggtgcacacctgtagtctcagctacttggggggctgaggcaggaaaatcacttgaacctgggaggcagaggttgcagtgagccaagattgcaccactgcactctagcctggcaatagagcgagagtccgtctcaaaaaaaaaaaaaagaaaagaaaaacagattcaggagagctgactagaaaagtaagtaaactagacttgaggaagaataaacattttagagtttttatttagaagaaacagataattattcataaaatatgttttggtttgtttttatgcttagaagcgactttaaaatgtgggtcattatgaaaaaagaaggctgaggggatctgatgaagttttggatgtgaatatactttgaaaaatattcaagtgcaagaaatggttatgtgacatgaaattaacatcctggttgcctttcaaaatgtgctttaccaggtatttgataaagtgtgcttggtgttgctattctcttcatatttagtcatttctgaaactattagtttattttctgttttgtcaaggacaagaacctgaatttgaggggatccttagttctgaaatcaatccgccttagactaacactannnnnnnnnnnnnnnnnnnnnnnnnnnnnnnnnnnnnnnnnnnnnnnnnnnnnnnnnnnnnnnnnnnnnnnnnnnnnnnnnnnnnnnnnnnnnnnnnnnnnnnnnnnnnnnnnnnnnnnnnnnnnnnnnnnnnnnnnnnnnnnnnnnnnnnnnnnnnnnnnnnnnnnnnnnnnnnnnnnnnnnnnnnnnnnnattgcaaagtgtaaagatatggcagaatgcagaggctgaacagtgtcatccaggcaagtcaggtcacttgctcactggctccctccctgtcagctctgccttcctcatagtgggctatgagctcaggtgggtccactccctacccacgctgtgtctcatgtcatgtccctgtccctggtttcagatacaaatcactcttatcagaggatagggaagtggatgctgacaagaaaacagtagaatgtccagtgtgttttaatatatctagagatttttcattttcttgcagaatttgaagatgaactattaattggtacataggaaactgaggaaaatgtttaagtaaagcaaattttcccttctaggtcatctagaacctaaggggaaaaagtatgattaagtgaatataatctttgtacatgacgtggctataaatgctataaatgcatagtcataacaatgtaaatgctaattctagatttaaccagaaatggagattagaataatattgtgaagatgggaggataaagtgagtgtgcatttgcacatggggggacataagaaaactaaatgcttattttccataattggaactcaagagataatatctaaaattgactttttttttttttgagacaggttctcactctgttgcctaggctggagtgcagtggctccatcttggctcactgcaacctctgcctcccaggctcaggtgatcctcctgcctcagtctcccaagtgtttggaactacaggtacacgccaccatgcctggctaatttttatatttttagtagagacagggttttgccatgttgcccaagatggtctcaaacttctgggctcaagcaatccacccacttcagcctcctagagtgctgggattataggcaatgagccaccatgcccaaccctaaaactggttttctaaaagcagtataagtgtattgccagaaacatcagataattaccagaagaaaccactaaaagaatttaaagtatttgcctcatgaaaatgggaatggagagggattgggcatttatacttaagccttacatgtgtccacaaaaacttgtatgtgaatgttcatagcagcattattcataatagccaaaaattggaaagaacccagtgtttatcagcagatgatggataaacaaattgtggtatatccatacgatggaatattattcagccattaaaaagaatactgatacatacaacaacatggatgaacctccaaagcattatgctaagtgaaagaagccagacacaaagtgttaacatattatatgattccatttaaatgaaatattcagaatagatcaatccatagatacagagcatagatgggtggttgctagggactagggggaggaggaatggggagaaactgcctaatgggtaaggagttttactttagagtaatggaaatgttttgaaactagataagaggtcggtgattgtacaacattgtgacaatactaaatgcactgagttatttatgttaaaataggtgaattattaaataattcttttttaaaaggaatgaagtactgattcatgctatgacatggatgcaccttgaaaacatactactaagtaaaagaagccaggcataagaggtcatatattatgattttatttctatgaaatatccagaataggtattataaatccatagagacaggaagtcaactgatggttgctggaaggggatggagagtgactactaatgagtatggagttcctctttggggtgatgaaaatgttctggaatcagtggtaatggtcggacaagcttgtgggtaatactaaagaacactaaagcatacccctttaaagagtgaattttatgatgcatgaattatatttcaaacaacaacaaaaaagctccacctaagcaattcacttatgaatggatattcgtgataaagactctccactgaattgccctgctgaatatgcgtgaatggactctcagcatcccccaggtggagcagcagtgacactgacaggaaccagggtagtgattttctgggtctagaatcttcctcatcttttttatgctgtcttcgtcctctcatccagcactttcattattaaaattcttacctgttctgcacacagctgtgcagcctcttcataaatctgataaagagaaggtaattcacgtggcgagtgaggagctcccagggaggcattttcttctgaacaaatgggctccttcacttttctgtcaggagggtattacttgctctcagtcggtttgtaaccttctcgcttttctcttcctcctaatcccttattaaaaagtcagggatgacatgggtgctggaaacatctttagttggcatgttgtccactcaaggcagacagcctgcctagaagaagccatttcccgttctacgtcagtgcttctgcagactgctatattcagttttgcctcactgttaatagttgaatatatcacttctatttttacatctgtttttcccgttgtactagagtgagatggtggcagtagctgcagatgtcctcagctcagtttggaagacatgacagatgtgtctcttctcccatttctatatgttatctgaatctyagcctccaaatgacagagagtgcatgtccgccctctcttcttccaacctgaatgttagggggtttgcctgcttgcatttgggattgcactgagtaagcactccatagtcagagacacacacctaagcatggtatattttaggattattgtgctactgtgatatattataacattagttatccctgctttataagcactgaaattcttgacatataaattgcttttctttatgtaaatggttaagtcctggaatctacaataacactctcaagaatttagtccgtaggctaaatctgtcttctcaagaatcactcactctgtaataacgcatgggtatgtaagtaagctgagaacaaacaaaagccaggggcacagggaatttatctttcctattctttattctcctttctttctatccttcacatttgagtcctatagtgttcagagttgctgatgaggcactaggcagcagcagccagctgcatgggtgtcccataactactcagagcttgagagttaactctaaattaggattgcaccagtaagaagtagagataatttctgttaaagtttgcacggaagcactttcttaggatgaggtgattgctggggctggcaggttacttgcaggtttcccaggtggcctcttgtattcctctcatcctggggtctggcccgcggccatcccggctgtctcaaggatggggttaatggacccaccttttaggccctatccagactgacagttcaatctttgaaaacctagcatctgaggggccatcattcccaacttggtgtgacctttcctccaccctacattctcctctccccacccttgtcactgccaccagtagaaagtcaaactaatattgcaaaatgtactcagaactaatgaattgaggtgatctcaagaggtgtttctcaacccaggcaacatgaggccctgttccctgcttagccatagtcctgctgggaagactgaatactcagcagttcttgcatgggtactgccagtactagtctccgtgactttccttgaactgtgtttccccagcagactcttcttcttcttctcatctccttctttctgatcaacatatactttctttgcatgtagtaattagttgagtttctgaggggatttatggctcaaaagccattttgtccttgaatagagcctttgcacatttctgtccagaagcttctgttatagccaagatgtttcggtgtcccttactgtttactggcaacacttgagaaagggctgggtgggtaaaataatatggtttaaaaaatggtcgaatcttgggtgctgaagaggtaaagtaataaggctaattttgaactgcactgtcaatttttcttatccaagaagtgactgttgtttccttcaaaccctgactttaggagacttactctattgacacagctactactcaaagtgcctttggaaatcctctgttagaattgccttgagagccttcattatcacctttattccactaatcactttattggggcttttcctacttgtgaaattaatacatactttagtgttcaaggagggaaggagagcagcaacacagaaaggtataaagaagaaagtcaagtatccatgacccatccacttaaaagtaattgttaaccttttggtgtaaatctttccagatttttttctatgcatagtcatacacttttgaatatctacttacagctaatttgaatatttgcaatattataggattaatatgtgtaattgcacatattacaacaaaaaattacaactaaaaaatagtgtaattacaactaaaaaaatcaagtatttccctagaataatataaataggcaagtcactgaataagaaatacgaaaaaaataaagaaatgagacaatgcttaacctcattagaagtcaggattatacacattaaaataacagtgaggtcctctttattacccataagtttggccaaaattaaaatttgagaatgtttaagtccaaatagatcacaaaacaaatattatacaatcatgtaattctggtgggaatgtaaatttgtacagtgtttccagaggggaaatttgacagtactaatctttttttttttttttttttttgagatggagttttgctctgggtgcctaggctggagtgcagtggcgcagtctcggctcaccgcaacctctgcctccccggttcaagcgattctcctgcctcagcctcccaagtagctgggattacaggcatgcgccaccactcccagctaattttttgtatttaatagagacagggtttcaccatgttggtcaggctggtcttgaactgacctcagatgatccacccgccttggcctcccaaagtgctggaattataggcgtgagccaccatgcccagctgacagtactaatctttaaaatatactttccctttgaaaatagtaaatcttggctgatcatgctggctcacacctgtaatccaagcactttgggaggccgaggcaggaggattgcttgaggcccagagttcaagagcagcctgggcaacatagcaagaccctgtctcaagaaaaagaaagaaagagagagagagagagagagaatagtaaatctccttctaagagtctatcctacaaaaatgctcacatacacaaatatttgtacaagaatgtttaattcaactttgtttgcaataaccaaaaattgagaaggtgtgtcctcctaatcatcaataggagaagggcaaatatgaataataatgtagtgccatttacttgaaagtaactctctagctatctctaagtaaatgcatattttaaaatctggaaaaaacctcaccagctgttatgatcattattcctgggaaggggtataggctggggagaaggtgttataaagggggacttctgtctactccatactctactgaattatttgagtttttccataagcctgtatttttcatgtattactttgtaatttgaaataaatgtgactttgggcatgaccaaaagctatttggagccacatctagcaaataagatcggtgatatcatttctctgagggtgtactgggcattatcctcacaaagaacctctcaagcagttcataatcttcatgtaactgggccgaggagccccttgacgtaggataaactctgaatggatggactcctagtgccaaaaacttagatctccattaccttcctattgagggcacttgaggctccttctgtctggtagtttgttatatactttgacaggtttttttccttaatctttttaaagaaaccattcctcagaaaacatgttattttatacagttcttcttggaaataccagaataaatgtcaaagcatcactgtttctgttcgtcattcaaatgtacagcagatcttcagacaaattttcctcacgttcaggttttctgaatgaatgaatctgcttatagatttccatttaactcttcaaccctcagtctcacaattaatcatagcttgagtgatattaactctggcttttgccacattgcttggtcttcagttgatggattatctggagttgtaaaagggatcggccaataggtgatgcctcatgtttaggtatttggtagttcacgtacttcatctcccatttgaaacagtcctggatggaatggttcatgaaagatggaggaacatgtaacaccatgctgtggactgaattgcgttcccaccaaaattcatatgttgaagccttaacccccaatgtgactgtatttggagataggaaaagaaagtaattatggttaaatgaggtcataaggggtagggtcctggttcgatgggagagagctctctcgctctctccctttttctctctctctctgtgtgcacacaaagagtcatgtgagcacacagcaagatggtggccacctacaagccaagagaagaggcctcagaatgaaacctactttgccartaccttgatcttggacttcccagcctccagaactgtgagaaataaatttctattatttaagctattcagtccatggtattttgtcacagcagccctagcagcctaatacacacaaggaatcaagtgaatgtgcttcagaagtgacctgaagtgaatgctagaaaattggctgttctgtaaggagaaagtaatccaaagcaaactaagaggactggcctaaatcatctttttggtgaaatatctcaggggtttttgcatatggtttagctgtagtcatcagtcccagtggcctgagttctaaccctgatttagccattaactagcggtgctgctttgggcaaatgatgtcttatgtttggggctcaggttgttcatctaagcatgatgtgtctggtgtggctgatctctgaggcacctctgacctctgaaattccttggttcattagcctctgaaattagattctttgggggcatgaggattctttaggctaataataaaagctgggcaccacactgtgccaggcatcatgctggactctatgcattacttcacattctcagaacaacctgcaggatgggtttttgactgtttgagggaggaggcaactatggttctcaaaggttacatgacctgcccaggggcctacagctggtaagttggcagagccaggattgatttttaagttggtcggtctgcctatctgtctgtctgtctgtctccaacacccatgtacttgctacctcagtcaccaccctgcctcttgatttggtgacagtctgcctagccttcactctctcttatttgacattccagcactgactttccttgtcacttgtcatgatacaggctccttgtctrtagatcttcagaagcggccagatcttgaaaaggccttgcttactttgtacagtacactgcagcctcgtttaaatgaaataatccacgtataccctgagaacagtgcctggcacatgtaagcccttagtatgtgttagttcttactagtacatccctatatacctgattgttcactttaccactttatggatcatttaggtaccaggtagcgtagaccaggagcttgtatcacccaccattaagcagaatggatattctcttggctctgtatattagtataatgcaccatgatgcaactccagcttcttcctaccatggtaaggagcaggaccacgtggtgatatagtttggctctgtgtccccacccaaatctcatctcgaattgtaatccccaggtgttgagggagggacctggtgggaggtgattagattatgggggcacttttcgccatgctattcttgtgatagtgagttctcacgagatctgatgattttataaggggctcttctcccttcccttcacatgctctatctcacctgcagccatggaagatgggcctacttgtgacttgtcatgatacaggcgtctataattactccttttctgtagaccttcagaagctgccagatcttgaaaaggccttgcttaccttgtacagtatactgcagcctcakttaaatgaaataatccatgtataccctgggacagtgcttccttccaccatgattgtaagtttcctgaggcctccacagccatgcggaactgtgagtcagttaaacctcctttctttataaattacccagtcttgggtatttctttatagcagtgtgaaaatggactaatacacatggacagtgatgttgcaggatcatgcccattccagacagcaaaggttctggaacaactcatgttcattcattcttatcagtgaatgatcaaacctggaggagaggtgcaccactctcagacactataaccaaatcatttttttattacatttctttaagtagaagctaaactataaactgctaaactataaaggtagtgaaaatgtgattcttcttttttaacattcacaaaccagctttttagttgaggcaaactcctgcccatccttaaggtccatctcagaggttctcttggggcaaccccactgcttaatacaatgcttggcatataataacaggccctctgcaaataataaaagagttctggttccttctgggaaagtaactagtttgagtgttaagagtcgcttaccctccctaagccttagttttctcaggggactaggggatcaactggatttcttacattccttaagttctacatttaagatgcccagggaaacaataaatcttagatataaatgctccttataaatgatttgaaaacagaataattgcccagttttccattttaaaacatatccttaggccgggcgcggtggctcacgcctgttatcccagcactttgggaggccaaggcgggtggatcacgaggtcaggagatcgagaccatcctggctaacatrgtgaaaccctgtctctactaaaaatacaaaaaattagctgggcgtggtggcaggcacctgtagtcccagctactcgggaggctgaggcaggagaatggctgaacccaggaggcggagcttgcagtgagccgagaccagcctgggtgacagagggagactcctcaaaaacaaaaaaacaaaaaaacaaaaaaamacatatccttagattgttttacctacagtcatacaaagaccaggccaaaaaaaactaagttacagagagtgcacaacatctctgaaatcagcatcatagaataaagaaaacccaaatgaggttccgaaacagccctcttaaccttagaaatgatgttagtaaaactctgcasactctggtggctggaaaaaatgaagaagacaaaaagttgttcactgactgtaaggaaaggacagaggacaaggtaattgcagaagagatggatagacaaggcacaagacatctgtcatgcccagggggccatattagctctattacattacttccacatcaacagatcacctcatttattagctaatcaggcagaattcaatattttaaattatctttcttaatcctgcgtgtgatcagttgaatacccagggctctagaaatctaattgtaactgcttaccagaaatgtcatcttcactttgaggaattgaaccagggccaaatctaaggctgttttttccattttcccaaggtactgtcccacagacctggacatgcgtgtacatgtgactaccgcctgacagcttaggggctccctgaggggatctgggcccctggccctgcttcagaactcaaatacggccagggactgaaagaggaatatggtagtagaagtgggrtatggaagtggatgtacagtacagaaaaggaaccattgtttcagccttggaaaaagtcaagagagaaagaactaaatctagatttagaatgttctgtggacctagacatgaaatagtccctctgcccagtgagagggcattgtataaggttatgggagcttgcttacccatctacgattaggatttcgcttcctcttagcttcctacgtctaagccccacctgtccaccctccttaagcttctaagacattgatgtgataatatggcagtgagcctgtggtctactcctcgcccatcttcctagggtgttgtaatggtgttctcaggagcaaaactgccaggacaacacaaaagattttcttagtggtttccattgagtgacaatgtttctagggtagacctgaaattatgaggaggtgaaagaaaaccacctagagctaggcgcaatggtgcaagcctgtaatcccagcactttgggaggcagatgtgggcagattgagctcaggagtacaagaccagcctgggcaacatggcgaaaccccatttcgacaaaaaaagttagccagcatggtggcacacgtctgtagtccccactacttcggaggctgaggcaagaggatcacttgagcctgggagaccaaggctgcagtgagctgagatcatgccactatattccagcctgggcaacagagtgagaccctgtctcaaaaagagggggraaaaaaaaccacctagagccaaaccatagagcccatggcagtgggagccatgcccactgccctcaatgcccattgctgctgatggagttggacaaggaaatagaaaaagaggtgtgtggttcatagcttgctgaactctgccctttgtataaaagtgtgtgcatgtgtgtttgtgttgtaggttaatggtgtgtatactttgcatgtctatgttgatggcatgtactgtgaataaacagttaattgcatgaatgtcatgtgcttatgtgtacgtgtgtgtgtgaacagaatgtactgcagtgggacagagttcagctataaagcaattcattcttgctttcctcttcctatttcagttcctttaagaacaaatacagaagtgttctatactgtggtacaacctctgaaaaagctatggatttggagatcaaagggatccagaggttaggtgaagtacatctcccctaagagatgctctaaaaactgaaaatgttacattgttttctttccttggtcaagcaaacaaaaattagaaaaagattatagtgacatctgctaggtgccttccgcatgactgtcctgttcccaattaggaaaatctttttccttcatttagtattctctttaacttttagttttaatatgtaggaatctaattgtttagatcaagttgtatgtgactataatttgcattaaatacatacatttatttcgcccctcactagtccaaggcaaatcagattgcctctctttccttccttcctttcctccttttatcctttcttccttcaaatgaaatatttcaaccacactaaacagtatagagaataatatcatgaacatccattgactcaccacctagctttattgatttttaacattttgctatttttgcttctgatagttttaagaaataaaatattacaaacacactatgactcctgtgtttaagatgcttaatgttatgaagaggttagctttttttcttttaagagatcgggtctcactctgccacccatgctggagtgcagtggcaccatcatagttcactgtagcctcaaactcctgggctcaagccatcctcccaccttagcctcctgagtagctgggaccacaggcatacaccattatgcccagctgatttttttttttctagagctggcgtctcactttgttgcacagccttgtcttatactccttcctggcttcaagcaatcctcccacctcagcctcccaaagtgctggaattataggcatgagccaccacactgaaccagaacttagctattaataatacatttgaagacagtattagcttattaaaatgtctcgttctttgtcattctgcagttttactacagggaatctagatctgaatttatttatactgctcgtgactcttcttcctgaatctcagtatttatgtttttcatcaattctgaaaaactcacaaccattttctcttattgttgcctttcccctattttctctgggaaccctattagatattcgctctctctctctctccatacatatatatatatagatatatagatatagatctatgtagaccttctctttctattcttcatgtcttttaaattttgtctctttcataatttctatatcctggactctcagtactatattctgggttatttcttcaggtcttttgcccagttcattaattgtcttcttagccatgcctaatttgtttagaaacctgtttttgtgtttagaaaccgtatttttcatttctaaaatttccatttgattctatctcaaacctgtccattctttcatatggtagattcttattttaaaatttcttattttgtctttaatcattttaaacatgtgtctgtagtttcttttagctgactctattatctgaaattgctgaggactaatttcatgtctaactgcttactcttcatggtagattgttttgtcacatgttttataattgcgggctgtgagcttatcttcagtggtacttgatctgtgagaatcctatgtagtctaggttgaaggtatttcttgccagagaaatttgcctttgcttctgcctgctgccccaggagtatccctagctgaggaatacttttattttgatctcttggcttgtgaatttctggccacacaggtagtataaatttcttttttttttttaatggcttctttttgtctgtttatttctgctttatattatgaaacctttgttaaaatgtactacagcatataaaactacatattttagatgatctgttcttcaggtctatctctataccttaatcctaactttaacccttttttttttctaagcacttttctaagtactttattttttattttattatactttaagttctaggttacatgtgcacaatgtgcaggtttgttacgtatgtatacatgtgccatgttggtgtgctgcacccattaactcatcatttacattagatatatctcctaatgctgtccctccccgcttcccccaccccacaacaggccctggtgtgtgatgttccccttcctgtgtccaagtgttctcattgttcaattcccacctatgaatgagaacatgcggtgtttggttttttgtccttgcgatagtttgctgagaatgatggtttccagcttcatccatgtccctacaaaagacatgaactcatccttttatggctgcatagtattccatggtatatatgtgccacattttcttaatccagtttatcattgatggacatttgggttggttccaagtctttgctgttgtgaatagtaccacaataaacatacgtgtgcatgtgtctttatagcagcatgatttataatcctttgggtatgtacccagtaatgggatggctgggtcaaatggtatttctagttctagatccttgaggaatcgccacactgtcttccacaatggttgaactagtttacagtcccaccaacagtgtaaaagtgttcctatttctccacatcctctccagcacctgttgtttcctgactttttaactggtgtgagatggtatctcattatggttttgatttgcatttctctggtggccagtgatgatgagcattttttcctgtgtctgttggctgcataaatttcttacaaatttacaagaaaaaaacagccccatcaaaaagtgggcaaaggatatgaacaaacacttctcaaaaggtagtataaatttcacaacccaaactgcttaggaagaggatcacattacaaagtctcagtgacaggatttgttgctgtttctctgagccagtggtggaatttttttttcctggttcatcttttctgtaggagtcttagttccagcactccactttgcttgaaacccaccttttgtccaaacatggccattaaaacccaagccccaagattacccggaccagcaaactgcttggatggccatagtttatgctcttgccgtgctagtttttagaactctctttgtttttggactctgggaaaatcttatttctattttttagatatattaatagtaataaggcttctgttttatcccagagttctgagtatcttgtagaaggagagttttcagatctctaggctacaacattgctacaaagagaagcytaaattgggtttcttcacaggcagtgatcacagtcaaggtcctcaggctgcctttcatcttattctcagagcatcrtgggagttccaagactartgatacaaaagcagcctctagaactgaaaacagttccttaagaaataggaaatattctattggaaagaatggcaaaatggaatgaggcacatcccactgtacactttcttattcagcacactctgaattttccacatgccacacagtggatatacactggtatgccagggacacactggcataataagacagtccctggccacaaagagcttggaatctagaagagtgcatagtccatacagctagaatgagaagtcccatggtgatgcagtggagggggcccacctagcctgaggagcccagggaagctgtttgagagggtaagggaaggagctgagctgaaggataaggcagaggcagcttggtaaagtggcactcaggcagaggcagcagctcatgaagcagctaaagggagcatggcatatttgtgctgcttcaaatagttccatttggaaagacctgagtacaaaggagagttaaggatgaagtggagaggtggcagggttgggttgtaaagggcttcctttgccacttctgagaattcacacttctgagggcaatggggagccatttaagcaagggatacatttgatcagatttatactttataaaaagattaatatggctgctgtgtgaagaataaattggagtttacaagactggagtcagggagaacagtccagagactgtcgtattgatctgggtgagagatggtggcagcctggactagggaagtggaaatggggatgctgagaagtgggtttgagagctcatgggaattcagatgacataaagatagttcatttccttaaaaaaagtgggggcagkggggcgataactaagatggttatttcatagttgaaacaaacagatcattctgtcagtctgagtggttttcagcatattttttactccgactcacataaaggctaaaacctactcccactagaaagagttcctgtcatcagtgattctctgcagatagcacagaaagatgcctgtataacttacaaaaaataaaattaaaatctcaggtgatccataaatgcccttccatccggtaaatgcccttccatccagtatgcctgccttctagggaatgaatgatctgtgtaacaggcaagcatttggagcagaaatcaatccttcatttaaagtaactgacatttgaaggtaactcttttgcaacataatgctagttcagatacttgccctaccacctgtgccttagacactagcttattcctggtagaaacacagccttcacgtaactatgcatccttccctgataaagtgacaaatcagccagtatatgacgaatttgggttgtgtagacaaatataccaggtgcaccagccaagacatacacagttggttgtgaatcatccacaccagctttcaatgcagttagattcacagaacaattgctcagttccttccttcattttcacagtgtagacctggctcaagacccaagagtgaagcagcaagtgtgaagaagcagaaacattataaataacccagagaatccttttataacagcaactgcctactgattttgtggcctaacagctcgagcaaaaatgaatataaatacaacattgtgcaatgactaattactcaaaattttgtgcatcagcagaagtggaacctgtggttggtgctaatattatgaaatgcctttgctgtttaataatctggtagctctgtattatttagcatgcatttttcttggagaacaatgattttatttcaagtacctctcactgaaataaaaaagcagctgttagaagatgaacatttagcagaaaatattttagcgagtcttttgtaagatactaagtcctattggattaactgttttctgtctagaatagtggggtcacaaaaaaaaggggattgctgaccacaaaaggcaaaaggccaacctttagaactcagtgaatcactaacagacattttagttttaattgcgatttactcaccaatatatatacaaagctctcattaatattgcctgaagaatgggccctttttaattccatttttagctcgctctcaggattccacttctctttcattaacatggaattctttaaattatagaataaattaacccaccgcaaacattttgggcagaatggggttttcagcaattttcagcctccacaggccattcttctcagcagcttgccagccagcagagcggtgagggccatggctgggagsagcacctgcccctgaacttgaagagaggctagagcagcccaatgggctcctggcccaagcccactctcagggtgacagtgtccttcacatgttcctcaggctggccaaacaaggggtgtgccagtgcgtaagccacatcaccataaggctgctgggcacagccagtttcagccaaagaacattatggttgagctgcattaatgtgcccatattgactcagggacaatttttacattattataagcaaaacagaaaatgttctcttttaaattatcaagaaatgtgaaaaaacaaagagtttcattttatctccagttcccattcctggggtgaagtgggtgataggtaaagattaaaaatggaagagttttcagagatggctgaagattacctagagggtgaggctcaggcttgggccgagggtggaatgaggtatagaaaagggaaaggatcaggcatgtctgttctgtatattatttggcaatacaagacagtatatctacattttttacaaatgttatctcaaaacaccttcgtcaaaatgctccacttcagtcctggtctgaccagccagcccagagcccatcacaaactaacaaagctgagaatggaccctgagacacggtcaggccccagatggagccagccagtggcctctgtcaatatgaactaatggctgacttggactgggagccatttgtcaacaatagtggggccagatctgtccatggcaccaacctgtgaggtaggttgagcaccacaaccaagcacctcaacctgtgtgaagactgagatggctgagacacactgcatcaggcaggggatttcttttgtctttgactcaattttagatggaatcccaagtgatgcagttactatgattatctgtactctttcttaaaaatggttactaaatacttgtagggtaccaataaaggannnnnnnnnnnnnnnnnnnnttctgggatgaaagttaatagagtttttcttgttttatagtagttgaaatataatcaatgtattgaaattcagaagatcagtgtcattcgtaataccacttatggtcactttgggcagtgaagtgctgccctgagcatatcttagccccaccttactttgattttgcactcaaccgcttattgatccttctctgttctcacctatcttaatgaaagaaggctttagcctcataaacctcattccagatagaaatacataattcaagagaaacactgatgtcaaagaagagaaggcataccaatttgtgtcagcatttgctgtaaattagagaggagtacagggagagtttaatgtaatgtagaattggaattaaaatagaaccaatatttaggcagtcctccacctctttttttccctgctgtgacatgaaggattgactttctcccagcttaagtacctaatgtagttcattttttttcctttctgctgggattcccccccacaaaatactacatatttatttctggcatccaaaattaaatattttcaccttttccattccaatcacaaccaaaaactcagggtatgaagagttggagtttccccctcatcttccacacctttgcagcatagaaaggacctctggtggccgggcacagtacctcattcctggaatcccagtactttgtgaggccaagacaagaggatcgcttgagcccaggagttgctgggcaacaatagagagaccycatctctacaaaaaaattttttatagccaggcgtggtggcaaatgcctgtagtcccagctactcaggaggctgagttgggaggatcgtttgagtccggggaggtcaaagctgcagtgagccgtgattgcaccactgcactccagcctgggtgacagagcaagaccctgtctcaaaaaaagaaaaaaaagacctctgccatgccagtgtaatcagttcagctgttgtaaatcactattaatccctccttaatacagtactaatgtgggtgttacctccatggtttcttttttcctaagctgagaataaaaggttgatagtgaacatctcacaatgtaaatttgtgcaaggtgttcctgtacacttgtgagaattctttagcacacatgcaagagtgttcttccttttaaagtggtcacattgggaagcttcacattcagaccacatgttgttttcagaacctttttggagctctttatttgaatttctgccagagccgatcttgttctttacagttgcccattggttttggccaatggtggagttccctagcttgatccctcaccttaatcattagacttggctttaaacaattcactctttccagaaataaattccttaggatatggttctcaaaatatggccctaaagccagcagtatcggcatcacctgggaagtcatttgaaacacaaatcccaggccccaccttagatttaatggatcagaaactttggggatggagcccagcagtcggtgttttaacaaaccctccaggcgattccagtgcaygctcaagtttaagaatcactgactgagatgaaatgtgcctccattgaggatattcaaagatatgctacagattttgaaggtactgaaagagaagtttcaaaatatttttgagcaaagttagaatacatttatggcctccccagaggactgctttaatggggactgggatttaaccaaggtgttccagttctatcacctagccatttgaccttgagcaagttcttacacttggtttctcatccggaaaatcaaagacccaccctacctacctcacggcattgcaatgaaattcaaatttaatcacatctgcaaacatgccctgtaaaccagaaagtgctgtggaaaactgaaagtcatgtcacactctgcaggcagaattctggtagcctgaacattatgtcagggaaatgagtggggcaaaggcttatatttatcatttccctggccagatatacctttttgtctatataatggccttatggatgtgtctcagattctgccatttcagcctaccaattcatctggtattaagagaggaaaaccattgcctgactagtagctacaaaatgctagaaaaatattaatatatccattttcaggtcggtcctggtggctcacgcctttaatcccagcactttgggaggccgaggcgggcgaatcgtttgagcccagatgtttgagaccagcgtgggcaacgtggcaaaaccctgactctacaaaaaaataccaaaaaaattaaccacccacctgtagtcccagctacctgggaggctgagataggaggatcacttgagcccaggaggttgagcctacagtgagctgagatcatgccattgcactccagcctgggaaacagagtgaaaccctgtctcaaaaaaaaaagaaaagaaaaatatatccattttttggccgggcaaggtggctcatgcctgtaatcccagcactttgagaggccagtgtgggtggattacttgaggtcaggagtttgagactagcctgacctgtatggtgaaaccccgtctctactaaaaatacaaaaatttcccaggcatggtggtgcacgcttgtaatcccagctactcgggaggctgaggcaggagaatcgcttgaacccggaaggtagaggttgcagtgagctgagatcgcgccactgcactccagcctgggcgacagagtgagactcagtctcaaaaaaatgaaaataaaaaatacaaaagaaaaatatatcagttttcaaacttgctgtttcctacaaggacccgggaaagctgggaaatgagccatcagggccaactatgttgtgtggatactgaagctcttatgcctggaacatggcacacaccagcagtgcaagggtctgtcctaaaaatatcattttatgcctgtgcaggggtgtctggaccttcaaggaggaagctcagtgctcattgccacacattaatcactgcagagagaccraaaagaaaagccctcaagaaaatcaggtctatggaaaccaagatttacagaccaaaccagttaatgcaagtttgtccaacacaaatttgtaaactttcttaaaacattatgagaatttttctgcgattttttaaacctcatcagctatcgttagtgtattttatggcccaagacaattcttccagtgtggcccagggaagccaaaagattagacacccctgaatgtatctgtgtttgagaagaatgtggatggatttttaccttagagattagcctttacaaacaacatcataggatttttttttttttttaagacaaggtctcactgtcacccaggctagagtgcacagctcactgcagcctcgacttcctgggcttcaacaatcctcccacctcaacctccagagtacctgggaccacaggtgtgcaccaccacacctggctaaagttttgcatttttttgtagagacgaggttttgccatcttcctgagctcaagcaatccgccggccttggcctcccaaagtgctgagtttacaggcttgagccaccgtgcctggccaggaattcttaaacagcaagctcctggtacatttataatttaatttgaaaactttacaaactctttaatgaacacttctggccaggaaggaagctaaacctgttgcctcagtgcttattgggaatgaagtttcaataacacagaaccacctggccaacaccaacttcacttttcgcacaaagtgccagctaaaatcgagattaggtgtgaatatattaataattggtttattatggttacattattggataattatggaacaataagctattgtttaattatagaattagaatatgaaatgattttgctcaaaaatgtggccccacttaacaaatctctagagacaaagcagataagtggttcctaggcctgtggatggttgggaggaatggggagtgactgttaatgagtatgaggtttctttcaagggagatgaagatttctaaaattagattgtggtgatggttgctcaactctgtaactatactgaagaacattggattgtacactttaaatgggtgtattatatgtatattaattatatctcaaagttgtttttttaaatccaatagctaatgaattgtagagccaagacaaaaaaattgtacctatttaaaagacagaagcaaaaataatatcaaaactttgctgcatgcagtttcagacttgattcatatgaaagtggtcatttgaaatacattaagccagaaaatatttgctcttttgagagtattgctctgtcgcccaggctgaagtgcagtggtgtgatctcagcttacaacaacctccacctcccgggttcaagtgcctcagcctcccaagtagctgggattacaggtgcgcaccaccatgcccagctaatttttgtactttttttatgtgtagatggggttttgccatgtcagtcaggctggtctcaaactcctgacctcaagtgatctgcccaccttggcttcccaaagtgctgggattacaggcgtgagtcaccgcacctggcccctgctctgtcttttaattgcagagtaattaaaaaatggattatctcagactttttttttttttgagacagagtcttgctctgtcacccaggatggagtggcacaatccaacaggggcacaatcttgtctcactgtgacttccaccccctgactcaataaatcctcccacctctgcctcccaagcaggcgggactataagtacatgccaccaaacccagctaatttttgtattttctgtagacacagggtctcaccatgttgcccaggcttgtcttggcctcaactgatccttccgcctcagcctcccaaagcgctgggattacaggcatgagccaccacacctggctaataattgaaatttaaatgtcaaaaatcaaggtggctggtagtagaaggcaaagtcatggacatttgcgacataatggtttgtcatgttccctacagatttctttagaaaaaaagtcagcacttacacaataatgataagaaaactgaactctcactgtccatcatgatgctcataaactgacctggttagggaaggctgcaaggttgaggttcaggaaaggatgtgatctcatccttatgatagaaatatgcactgataagagaagttagaaaaattcagattttggccaggtacagtggcacgtgcttgtaatgccaacactctgggaggccaaggcaggaggatcacttgaggccaggagtttgagaccagcctgggcaacaaagagagactctgtctctataaaaatattttttaaagagaaaagaaagaaaaagaaaaattcagatttgagctgtggaactaggctcttgtgtaagcggcactgtgcctaatggcatgttcacaaacagaccgctcagtcctgtctgcataggggagaacctttccactttcccactttgggaaagataggccatgccacgcgggttctcatcttcttgttaaattcctcactccaggggttgagtgtccctaggactcactggtggccatggagactgtaaatggaggtaaacaggagaggaactggctgacagagstagggatttctggctcagtgaggaaagcagggaggtattagcgtgcattgaacttagagttgctgcgcagggcttcttaactcactagaagtccctgactgggccactggtagttctttgggacaagaggtcctgcttcattttttctcaaactttgtttttcatcatcatcccatgccaaggaaacttttttgagactttttttcctaatcaccctccctcttcccccgtgaaatttttataccacgtacacacatacacacacacacacacamaaacatatgttccttgacctacaatgggattacattcagataaaccaaccgtaaactgaaaatataattaatagaaaatgcatttaatacagctaacctactgctatacttgagatgctgtccctgctaaatctcatgttgaattgtaatccccagtgttggagctggggtcttgtgggaggtgactggatcatgggggtggatttctcatgaatggtgtagcaccatccccgtgccgctctcctcaaaatagtgagtgagttctctcaagatctggttgtttaaaagtatggtggtggggcacagtggctcacgcctataatcccaacactttgggaggcaaaggcaggtggattgcctgagttcaggagttcaagaccagcatgggcaacatagcaagactctctctytaaaaaaaaaaaaaaaaaaaaaaaaaatatatatatatatatatatatatattttttttttttttttycccagctactcgggaaactgagacaggaggctggcttgtgctccaraggttggggctgcagtaagccatgggtgacagagtgagaccctgtgtcaaaaacaaaagtgcgtggcatcttccccgtcactctcttttgctcctgctctccccatgtgccatgcctgctcctgcttcrtcctccaccatgagtgaaagctccctgaggcctccccagaaaccacgcaggtgccagcaccatgcttgtacacctgcaaaaccatgagccagttaaatctcttttctttataaattagccagcctcaggtatttctttatagcaatgcaagaactgcctaacacacctaccaaacattatattacagtttgtactgaatatgtatcactttcacactgtcataaacttgaaaaattataagtcgaaccatcataagttgggaccgcttgtgtgtgtgtgtgtgtgtgtgtgtgtgtgtgtgtgtgtgtgtgtgtactgwggccctttggagagcatttgtgtaatatctaagatttttttcacgcactgccaccaagaatggattttgacccctttcggggagatatagccccagttgggaatgcatgccctggatgaaatgaaggctgtaggcagggcccttctgttcactctgagtggcgaggttgatgacatggagtaagtaggtcaggtggccctatatccatcattaatcaggataggccctgacctcaggttccagcactgccctgctagagacgtcctccaaaatcacactgttcctgcaccatctgttcagactgcctgccccgtcctccagcctctgctacatctcctctccatgggtggcagccctctgcccagtggccggctagctgtggtagacagtggaatgctccatcaagttggcattactgaggaagtgcaggctgtccctgccagcagtaaccctgttcccatcctgtcctgcagccttacccgccccagctctaggcctctgtccagacgcctctctcagtgttctccytctgcacgtcctccccaaatgaaagcatggggaatggatttcagagaccccagcacacaatgttgaccatggctggaactctctggagcctggcatccctcataaacaagggccacaggacactggccttcacctcttcctggctccaagtgcattcctggatgcctttatccttctactgtgagctggaaacataaagccagtcacagcataaaccccttgtctcacaatcctatggattgtgccctaggatggtgacctactttgtttcttagaagccttgtctggccccctctgacctargtcatgggctttctctgccaaaaacttgagcaacttaaggggccactgagataataccatctttgtctgcctcacctttgttgaacacctgctctgtgccaagcactgtgctaagccttttcacatacattacttaattcagtcttcacaatggccctatgaggtaagttcccattgtacagataaataaacccacagaaaagctgagtracttgccagaggtcacacagctagtaagtggtgaaattaggacttaaacccaggtctgtctgaaatccaaaccatttactgcattgtcccagttgaaaaaaacattttccagttgtatgaatagaaataaaaatgacacaagacctttattgccagtgaaaaggcagtgaatttaccattcttaaaagatgacagagctggccaggagtggtggcttgcacctgtagtcccagctactcaggaggctgaagtgggaggattgcttgggcccaggaggttgaggctgcagtgagccgtgatcgcgccactgtaacccaacctgggtgacagagcaagagccgatctcaaaaaaaaaaaaaaaaaaaagacacctaacaacaaggggcagaggcaggacttaaaaccaggtacatatgacacccatatctcctgcctgtcagtgattaacccttggaggacaaagaatgacttttacgttcccaggcccagtcagctagatactcacgcctcagcctcctgcaggcaagaacaaggcagaagccccatttttagaacttggaagagagcgcagagcaagcctggcccctgggccagcctaagtatgagcyatctcagcagctggcgcagccctccttgaaacactctcccttgaagaaattctgacctaaacccagtgtagccagcaaggctgaccctgttggtggaatctggtggccccagtatggtggtgggaggtaacagagaccctggtggtttacatttgccctctctccctttcctgaacccctggcaatattcttttttaagaaataatgcattgacttatgatttagtcatgtttcatcccatttgcttttccctggcttctaaaaccacaagcatggctgaggaattcatgtccacagtgtaggctctgaatagctttgtgtagggagaggttttgaaaagagaagaaagtggcatctacttgtgagatggaatgcatgaagacatcggggaggaatgcacgcgctgtaactgttagggtccctcggcagtttgggtagtgactcattcagcgtgggtacggattcctaacaagtgaagcttggtagtgacgtcattcttgcaagattgtctggaatctgttagagctgcctgacaagatcttaccttggagactttcatcacttgggggtttttcccagctacacttcatacccatcatttcctccaacttgtccccttttctatcaactggaatttggcaaaccagaactttcatgcatctgttccattgtcatcctcctacagggcgttcctgggacagtgtgtgctcctcacctcatcgctcagcacccatcctcctgacagttcttggttcggtcagtgcctacctcagctatggtccaggccttgcactaggtctcaggacagggaggtgatgaagacaggcgtsctaccctcaaggggagggcagggggcagccagagggcctgagactggtggtttccgggacagcacagtgctttgaacatagtgctaggcaataaatatgtgatggccaagttaatacccaagctgagtctccaaaaatgagtataggagttagtctagggaaaagtccaagccgaggtgtctccatgtactgagacccgtaagtgaataggaagaagtaagttccttaagtgaataggaggaagtaagagatgaaactggaaaagtggtttagggaacctcgtgtgccatgttaagaagttgatgccacgggggccacgtggacagatttgcagtagtgtagaggatgggctggaagggtccagaccggaggcagggagactggcttggaagttaatgtgaccctgtgaggtgatgtgaacattactggggcagtgggggtaggagtggagacaagaggacagatttgagaaacatttaggatttaaactcgacaactggtgattgatgaagtatatgggaaggagatgcccaggagacccccaggttttcagtgtggaggtgccacaagctgaaaagataagaagaggtccatgttaaggcagagttttgagttcatttcggccgtgttgagttagagttgcctgcaagagacatgagccaggttaagcaggctcacgggtggttagatacacaaatccaaagacagaggagagtctgggctaaagatactgatttaggacccattatattcatagcagctgaaactgtatggctacataccccccaacttcctttcctgmtccatgtctgtttatctaggacttgggcgcctacatgaccatttttctctctgtcccaatgctgtcatgatgtgggwtgacttcagtgccatgaggatgaaccattaccaagtctcatagctcctagatgccctctattctggtgactcttcacctccactccactgcagcctcccactcccatgacaacctccaggacattgctagtacctccttggaaccacttcagttctccggtaaaacctcacatcctcctctctgagcagcccctggctttcaactcttctacgccgttcccagttgtcttagttccctgtactttctccttgcctgttgaccccctcctgacctctcttctttcctgatccaggtcagactctccgactgttcatctgaaatattctttcctgaaacctttgattcctttgtacccctgctcctctcccacacctgcccaggacaacgctagttcatgttctctgctcctgccacaagcacacagaggaaaatggaccccccatgcagtggagcctcactggagcttcatggccttccctcttccatccctgtatttcttcatcactatggaaaacataagccttcccatggggaaatgggaaaatgtgggcagtctctttcccccaaaatagcttctccatctgctctgctgctgaattcctgcacagatgaccttggtacaaatctcaactgccatttaccaccttttctttacactgggcaagagatttaacctccttgaatcccagtttcctcagcgtaaaataaagatggcccagggttgctgctggcgtctgtgacaccctgtgcaaattattatagaagaagctgcccctcttgctaggcacacagcttggtgagctggccrtggcccacagcccactctcagccctcagctgggcacccttgcgcaatgccactttgcctaatcgcacaccgcagccccaaataagcctacctcccctgggttctgatgaaaacaaaggccataacctggaaagcactcagcagagagcctgactctgagcagagcctcaaaacaaaagctatcgcagaccrgcagactcagattaacatggaagtgtgctctgctggggatgtcacacatttatgccagctccacagcgtttattagagagcagagccttaagaagcagggacatgagtcrggtaccttcagtgaaggaactaacccatggccatagtcaagggcccaggcaggcaagggacaatgggagggagagaggagtgaggcagctatggacagacaggattgtctgaaacggaggggaagggaaataagaaaccagcctccctatggcaacattgcctcgagccctagcagcagaggctgcccacccagacccatacccagctccaggcgctgcctcaggggctcctgcctctcagattctccccttggggtcatctcgccagctgctcatgagtgtcatctctcaccagccctgctaaatcctcaaccctccccaccggcacccctcccacccccattagaaggctcaggtattccatggggccagttttcctgtccttgcgcttccctgattccccagcttcctcaatgggcaccactagaactcagaacccagaagtgtcaaggacctcaggaaggcaggggtttcagatgccacacccaytctataagagcagctcttccttaagaggaaatcactgtgagaaggcaaagggtagtagccacatgggtattatattgaaggaagatgaattatgccatcaccccttttggcacaaaaataattttcagtaaaaggttaaaaccatcatgttgtatcaatgagaactatttcattattccaagaatgattgaytggaaagtacttgacttacaggaaaatcacagtgatacaatacagctcctacttttaaagcactttccrtttaaaaaaaaaatcataccagtgtataaaaatagttataccgaagatgtgaatcaacagccaagtaatttattggcacttgaaagctttgtggtataaatagattcaacaatgagaatgtcaagtaactctgggccatggcaacctaaccttcattttcactaacacaaaagaaagtcacgtgtagttcagcaagggccatctggtcaccttagaagagatcatgggaagagaagaacatgatagaaccaggaccaataagtcaggtcaactcaaagcaagggacaaggcagcaggagaaacagaggggacagaaaagtagtccctgccctaaagagagttcagattgtcccagagcgaaggcttgtacagaaaacgttcagcacaatgaactcagagtcctaagagaaatacaaagggattacaggatgtcaaaagggagggagactcttttcagcttgatttccttcctttttccctccctctttgcctgcttgccccaaaccttcactgggtggtgaaacaggatgggagcggaatcactgggtctgggtacaaagtgcagctctgccatttaccagctctgtgactctggacaaatgactggatgtttctgagactcaattccctcaagtttcagtggcgggggagtgcagggtcagtgtgaagatgaaatgaggtcaatgttgtgtgtgtgtgtatataaatacccggctttgctgcctcttgatgaggagcaaacagtaaaagttcactctcttccttacccttccactcctctgtaaagagtacaaggccttttctgccccttttatgtttaaatttcaaagagtttttccactgttggatgtaatgtgacttttcagatcagccttcttgtctttgacccgaaggcccctgtcagccaggagcctccctgcttctttgtggtttggggctcagtagtccaactgctgccctctttgtgcagaaaamcacagaacccctgcatctcacatctggtgagaaggtggagactggggcaactgagagacggtccatcagcaagcattaattgaacacacaggacttttaagggatkgtaaaactctaaggagtcagcagggaaagacatggacgagatttccgacctctcgtaagagtttaacacatggagattgcctctgtcatggttcttggttgaaaacagaagaaaccagtggtggtcttggcacagggcgctggataccatcacaacaggactgccactaacatcccagtcctcaattttttgtttttgggcaatcaatgtcacagctaaaaagtgttcctcctgggctgggcatagtggctcacacctgtaatcccagcactttgggaggccgaggcaggcggatcacccaaggtcaggagtttgagaccagcctggccaacatgttgaaaccctgtctctactaaaaatacaaaaattagccgggcgtggtgacacacgcttgtaatcccagctacttgggaggctgaggcaggagaattgcttgaacccgggaggcagaggttgcagtgagccgagatcgtgctattgcactccagcctgggcaacaagagcgaaaactccagctcaaaaaaaaaaaaaaagaaaaaaaaacgaaagtgttcctcccagtcctctcattgtttcatgggggtgtcattgtctagttcatggttacaacggaaactgcctcaatgaggtgggtattcccaagtgtgggaaagagcttcacttcagtctaccccgatttgtagcagatgtccacttaattaaaaagaaagagagaaatcattcaggggtagaaattggcccatttgcaaattcacaaagagtgactgatattgatttctttctcacacttgggatttttaaaatttctttattattattattattattattattattattattattattattttgtgggggggatggagtttcgctcttgttgcccaggctggagtgcagtggcacaatctcagctcaccacaacctccacctcccaggttcaagcgattctcctgcctcggcctcccaagtagctgttattacaggcatgcaccaccacgcccggctaattttgtatttggtagagatggggtttctccatgttagtcaggatggtcttgaactcccaacctcaggtgatccgccagccttggcctcccaaagtgctgggattacaggcatgagccaccgcgcccagcccccaaaacttctttaataaaattttttatttttaaaaagtaaaacttacagaaaatttgcagtagccccatatactcttcacctagtttccccaatattagcattttgccacatttgttttattgctttctctcaaaatacatcaatatcatccttttttctatttgagagtaagtcacagacatcatgattctacctcttaatacttcaggatatgtctcctgaaaaaaaggacataacaaaaatacaatataattatcaaattcaagaagttttacatggagataatcttatatgtacagtcctgtaatgtcccaatagtggttttttatcatttttggttcaggatccaatccaagactacgtgttactttagtctccttgaatatggaacaggttcttaaactatgttgtctttcatgacactgatattttttgaacagcacaagctcattgttttgtagaatgtatgtcaatttaggtctgtcttacgcatttgaggcaggaatactacatccgtgaccttgtgtccttctccaggccccacatcagggagcagtggtgtcagtttgtcttcttattggtgatgctactgttggtcacttggttaaggtggtgcctagcaggtttctcaagtgtacagttactctttttgcctctgtaattaatacataatctgtggggggattatttataacttgtaaatatcctaccctcatcctacctttacccagcagtgttaatgcctccattgatgattccttcctgaatcagacagcactatgattgttgcagaatagtgactttttaaaggtttttactagctggcattctactgtaaggaagaatttttctttctccagtatatttatttattttatatcagtatagacttgtggattcttaataacatttaatgtgactgttaacagtttatctattttcagaatcctttaagtaaattgcttttgcattttgtggatgagtcaacctaattgcagccagagctctttcctgatgtgggtttggccatttaatctatgctccactctatagcaaggccaacaggaaatagaatgctgaccttttataggaattgttgggttaagcacataggttgttgaagtgttttgagtaactctggcaaaatgaggtactctgggaagatatcataaaggagcagggccttaaagacagcaaagggttttgaatgaaggcccaaaaaggtaaagaagactggcaggatcaatggcttccaaactagacacagagaaagggggacttggcagggcaagaaggagtgggagaaggtcagagtgtgaaccagcagtgaagtgaacrtgcccagtctgcgtggagggtgtgcaaaagagcaagggaggtcaagggaggaagtggaaaaataaatgaagaaacgacatgtgttaagagttctgttcattgattttaggtaaaaagattgagcaccaagggatgatagattcagtggaagcaaagccatcaacttttaattagggaaaagactagaaatgcttttggtcagaaaggaaagaactaacagttgcttagcttttattttttaatttctctcttctattgaaagttgagctgttttttaatgttcacaaaatccttatgagagagatgttaataacttcattttatatataagaaaacaaagtcacagagaatttacattaatttccccaatgtcataaagctagtaagtggtgaggccaagattcacatacaggtctatcttactccaaagcccacgctgccagaagaaagaaatctttagactggaagagcagaggtggaattggagctctcaatataaggacaagtaacttcccatatgccaatcaaaacacttaagcatggcccacagtaaatctcagtaattatctcaaccacacgctttggagtaaatcaatagtaaacccaggaagtaactgtcaaggttttcaaacctgacattcctgtataactcaatacacatacccacccctctgccttcttaaaaaataagttgtattagatataatttttatacaataagattttacccattttcagtacatgattcaatgagttttgatgaatgtatacagtcatttaatcaccactataatcataacctagagtattttcatcaccccagaaagttgctgtgcagttcctttgcagtcagtactccccagcccctggcctgctttctgttgccacatttttaccttttctaggatttcatataaatgaattgatattagttggggttcaccagagaaatcagaccaagaagagagatgtatacgtatatgtatatgtatatgtatatgtatatgtatatgtatatgtatatttagtgtgtgtgtgtgtgtgtgtgtgtgtgtgtagatttattatgggaattgacacatgcagttatggaagccatgaaggcccacgatctgcaagatggagaactaggaaagccaggggtacaatttagtctgaggtcaaaggcctgagatcccagttagtgtgctgagggagaggggagaacatagatgtgctagctcaaggagagagagaaagaatttgcccttctgccttttagttccatccacgccctcaacagattagaagatgcctgcccacattggtgaggatcaatcttctttactcagtctacaaattaaaatgacagtctcttccagaaacactgtcacagacacagaaacattatttctattaaacagaaataatgtttaaccagctatgtgggcatcattcaacctagtcaagttaacacgtaaaattcaccatcacaaaactcatacaatatgatatgtagtcttttgtgcctggcttctcccacttagcataattcttttgagattcatccatgctgttttatcagcagttccttccattttattgctaagtagtattgccttgtctggatgtgccacagtttgtttatccattcttcagttctacaacatctggattgtttccaatttggagtgattataaataatgctgctgtaaacattcacatgtaggtctttatgtggacatatactttcatttcttttggataaatagctaggaatagaattgctgggttttataaatatatgtttaacattattaggaaactgccaaactattttccaaagtgtctgtatcattttgcattcccacaagcaatgaataagacttctcgtatctccacatttacaccaaccattggtactttcagctttaaacattttagtctttgtactaggtatataatgccatctcactgtgttttgaatttgcatttccctagtgtctgatgatattgagcatcttttcatatacttatttggcatatgcatgatgaagcttctttgatgaagcttctgttcaaatctcttgcccatttttattgtgttgttggtcttattggattgtattattgagttataacagtactttactagatacatgttttgcaaatattttatcccagtccatggcttatcttttgatattcttttgaagggcagaggctttaaatttggataaatttcagtttatcaggttttttaatctttgtgcttttggtgtcctaagaartctgcctagcacaaggttacagcttttctcctgtcttcttctagaagtttgttgtttcaactcttacatttaggtttgtgacccattttgagttaattgttgtctatggtgtgaggtaagggtttgtgttcttacatatggatatccatttgtcccagaaccatttgtttaaaagactgccctttcctccattgaattactgggtacaggttgcgtttccctaatccaaaatctgcaatccaaaatgcttcaaaatcatgggccaggtgcagtgtcatccctgtaatcacacttgtaatctcagcacttcaagaggccaaggcaggtagatcccttgagcctaggagttcaagaccagcctgggcaacatggtgaaaccacatctctctctctctctctctctctctctctctacatatatatatacatatatatatatatatatatatatacacatatacatatatatatatacacacacaaacacacacacacacactctatacacacacacacacacacacacacacatcagctggccaggcatggkggttcacgcctgtaatcccagcactttgggagggcgtggcgggtggatcacgaggtcaggagctcgagatcaggctggccaatatggtgaaatctcatctctactaaaaatacaaaaattagccaggcgtggtggcagatgcctgtaatcccagctacttgggaggctaaggcaggagaattgcttgaacctaggaggcggaagttacagtgagtcaagacagcaccattgcactccaaactgggctacagagtgagactctgactcaaaaaaaattttttaaaaaggccaggtgtggtggcacacatctatactcccagctacttgggaggctgaagtgggaggattgcttgaacccaggaggcggaggttacagtgagccaagatcatgccaccacactccagcctgggcaacagagtgagacctatctcaaaaaaaaaaaaaaaaagcttcaaaatctgaaatttttttagtgccgacctgatcctcaaaagaaatgttcattggagtatattggatttcaaatttgtggataagagatattcaaccagtgagtataatgcaaatattccaaaaatccaaaaaaaaagatctgaaatccaaaacatctctggtcccatgtatttcagataagggatactcaacctatacctttgttggaaataagttgaccatatatttgtgggtctgtatctggactcttctatcaagttatcaagtgagctacgtgtctatccttatgtcagtatctctctgtctaattactgtagcttatggtaagcctggaaactttgttctttttcaaaactgttttggctattctaggtcatttccatttacatatacattttaaaatcagtttattaatttacaatagttggcagctgggatttttattggaattgcattaatctatagatcaatttggggagaatttatatcttaagaatattgagttttccagtccttgaaactctcaccatttgtttttctttaatttttcttttactttccatagcaagagtggatagatcttacacatattcagttaaatttagccttaaatacttcatttttaaaatgctgttgcaaatgttttgataactttgagttcttgttcattgctaacatatagaaatagaattggtttttttcgctctgttacccaggctggagtgcagtgatgcgatcttggctcactgcaagcttcacctcccaggttcacaccattcacctgcctcagcctcccgagtagctgggactacaggtgcctgccaccatgcccagctaatttttcttgtatttttagtagagacggggtttcaccatgttagccaggatggtctcgatctcctgaccttgttatccacccgtctcggcctccgaaagtgctgggattacaggcgtgagccaccgcgcctggctgcagttggttttttatagtgaccttgtgtcccgttaccttgctaaacctactatttctagtagctttttggctggacttcttaggattttctacgtaggtcattatgtcatctacaaagaaaaagtgttttacttcttccttttcaatctgtatgccttttctttcttttttttcccctgtccttttgcactggctaggcaatccagtacaatgttgagtagaagtagtgagaacagacatctttgattgttcccaatattagggaggaagcattcagtctttctggttgagtatgatgttagctgtagatttttcataaatgctctttatcaagaagatcaagttacaccttatttctaaatttgctgaacttttatcatgaatgaatgtagaattttgtcatatgctttttcagctcctgttgatataatcataaggtttttaatattactgaattacactgattttttaaaatgttaaaccaatcttgcattcctgggataaattctacttggtcatgatgcattatcagatattttatatatatatatacacacacatatatttatttaatttgctttaaaaagttaaggtttttacatctatattcacaaagggtattgatcttgttttcttgcaatgtcattgtctggttttggtatcatggtgacactagcattatagtgtttccttggctctgctattttcttaaagaatttgtgtagaattaggattacttctcacttaaatgtttgcaaggattatccagcgaagcnnnnnnnnnnnnnnnnnnnnnnnnnnnnnnnnnnnnnnnnnnnnnnnnnnnnnnnnnnnnnnnnnnnnnnnnnnnnnnnnnnnnnnnnnnnnnnnnnnnnnnnnnnnnnnnnnnnnnnnnnnnnnnnnnnnnnnnnnnnnnnnnnnnnnnnnnnnnnnnnnnnnnnnnnnnnnnnnnnnnnnnnnnnnnnnnnnnnnnnnnnnnnnnnnnnnnnnnnnnnnnnnnnnntacaaaatataaaaagattagctgggtgtggtggtgcacacctgtggtcccagctactcaggaggctgaggtggaaggattgcttgagtctgggagacaaaggcatcagtgagctatgattatactactgcgctccatcctgggtgacagagcaagaccgtatctcaaaagaaagaaagaaaaaagcaacacatgttgtagccctgagaatgaagggtaatcaagttgtgagaatcgttgctgcctaaataatgcttccagcacacacagttccaccaagccctgtgtttccctggccttggctgtagtggaagggaatttaagtgattttaagagtgttttcaggtgtgggtacaatattttttaaactttctttctttttttttttttttttgagacagtctcactctgtcgcccaggcgagagtgcagtggcacggtcttggctcactgcaacctccacctcccgggttcaagcagttctctgcctcagcctcccgagtagctgggattacaggcacccaccaccacgcccggctaattttttgtatttttcgtagagacggggtttcaccctcttggccaggctggtcttgaactcctgaactcatgatgtacctgcctcggcctcccaaagtgctggtattataggcatgagccaccgcgcccagccatatttttaaaactttctaaaaaaccttgtctgcagccaaaaaataccctgctagctaacagagggttaggtagacctgatttctatcggcaatgccagaatgtctcctttccaccttgtgcctccactctggtcagggtgcaaggtagggaggcacagaggcgtggctaacctattcatactcttattatctgaaacttttttggaaaaatattataagcttatagcaaatcaaacaatataaaagtatataaagaagaaaagaccactgtccctgtaccttgcacataagaaaaccaaatattcacaatttgatacatatccttcatttttctctatattctttaaaaaaatacacatatgctcatatagataggtatttgtctttctcattcttttatttcttttcccccaaatgggatcatggatgctgaaacctcattttttcacttaactaatggacatttctccaagtatgtgcttctgttgctagacttttctcattaatagctgcatacttttccataataagaatgtaccagtttattcatcctatttgatagacaatcagatggtttccagcgttttgcctttgaaaataatgcagcaataagcatctttgtacctatattcctatattacaggagcttttccttctgtaggagattcccaggagcaggattgaaattgttgaatcaaagagcgttacacattttctttctttcttttttttttttttgagatggagtctcgctctgtcacccaggctgaagtgcagtggtgtgatctcggctcactgcaacctccatctcccaggtttaagcagttctctgcctcagcctcccaagtggctgggattacaggcacctgccactacgcccggctagtttttgtatttttagtagagacagggtttcaccatcttggccaggctggtcttgaactcctgacctcgtgatccacctgcctcagcctcccaaagtgctgggattacaagcatgagccatcgcacccatccgagcgttacacattttctagtcattaccatcttttcgtgtgtttattacctaccatatacatttccttttctgaaattgcaggcctatatctttattcatttttatcctacatttgtctttttcctagcagtctgaagatattctttgaatactgaggatatgttacatgtattgcaaggattttcaccaaatctgtactttttcacttggctttatttatagtatctttggacatataatttttaaaatatgtttataaaattaaaaacctgttatttttttcatgtctttttgtgtttactgacttgcttatgttttccgtctggggttatacaaaaatattcatcaaaattttcatcttattattttactgttttgttttttacattcaagactttagctagaatttaattttgtatgtaatgtaaggaggagtcaagacttggcatctgggagtttgccgtaactcttcatatcttgtggcattttccatgttttcataataaccctccagtcagctcatagttcctcaggtttcaggcctttcccatgttggctgctgtgctgcaaactgagagtgggaaggaaccatgtctgtctctttctccattgcatccttcaggaaggaccagtaaatgttgcaaagcacctagcatagggcctaacacattttaggcactcagacaacattcatggggggaatgaaagttgcattcacaccgcattactatcaccccttggcaagtttaatattgatggctttgtctgtgtaaacaaggggaaatgtcattctccttaacgccactcatggtctcatgagctcactctggtccttcctccttctgtgtctttattctttgaggtctgccttctctttataaatctggctcattctataaggactcccttctggcagaggcaaggtggggggcgctttcttcaaaccccttcttaaaatctaacagtacttataaattctgcaatactatttagcatttaatccacaatggattttagtccttttctagcacccatcactgtgctgggcacatagcccattaaatacatcaactgtgactgaaacaatcttgcatgccaaggttctttaaaaagcctgaggtatagcctcaagatttgttatgaaagcccttaggtctaaggaacaacaaactgggaagaggtagaaaatgaccctgagannnnnnnnnnnnnnnnnnnnnnnnnnnnnnnnnnnnnnnnnnnnnnnnnnnnnnnnnnnnnnnnnnnnnnnnnnnnnnnnnnnnnnnnnnnnnnnnnnnnnnnnnnnnnnnnnnnnnnnnnnnnnnnnnnnnnnnnnnnnnnnnnnnnnnnnnnnnnnnnnnnnnnnnnnnnnnnnnnnnnnnnnnnnnnnnnnnnnnnnnnnnnnnnnnnnnnnnnnnnnnnnnnnnnnnnnnnnnnnnnnnnnnnnnnnnnnnnnnnnnnnnnnnnnnnnnnnnnnnnnnnnnnnnnnnnnnnnnnnnnnnnnnnnnnnnnnnnnnnnnnnnnnnnnnnnnnnnnnnnnnnnnnnnnnnnnnnnnnnnnnnnnnnnnnnnntgcagtggcacaatctcagctcactgcaagctccacctcccgggttcaggccattctcctgcctcagcctcccaagtagctgggactacaggcgtccaccacctcgcccggctaattttttgtatttttagtagagacggggtttcaccgtgttagccgggatggtctcgatctcctgacctcgtgatccgcccgcctcggcctcccgaagtgctgggattacaggcgtgagccactgcgcccggcctaagaatggtttttcaagtgagactgtgtagtcacatttaaattgtcctgaacacaattgttagacaaacacgagcaggtattgctctgtccaaaggcacaggtccacagactttctcaggacgttttctgtttccatggccttcaccagcttggatctttggagcttcagagaaaatggaaagaaacttgatgtgtccctatatttggtttagaaataatatcaaatggctctcagctctttctgcgtgcatttttaatgaagaaacggctaattctagggctagggcagggactatacaagatgaccctggagcatcttgggggattttgtttgttttgtttttgtagaggcgaggttttgccatgttgcccagtctggtctcaaactcctgggctcaagccatctgcccacctcatcctcccaaagtgctgggattacaggtgtgagccaccacgcccggccccctggggcatcttgtaatgccagaaagtactcaaaaccaaaaggatgggcgtatgtcaaagggacacaggagccaactggaaaagctcccaatggccaaagctggaacaattcgaacaacaaaataatatagcattgaattatagcccaaagaataaaacaaccatgagttcatactgatataaatgactgaataaataaatggaagagaccaatctcccatgcagaagaactcccaataatttatgtagaaactccacccttaaggagatagagcatagaaaccccacccttaaggagatagagcataacttcagggaataattccccaacccttaagagtggaatacatgtaatgccttgctttccaacatgaaaaaaaaaattaaaattaaagaaacaaagagtacaacatgaaaaaagggagcaaagtaactttacagtggagaaacttggcaaagactaccttagccaggtgaccagggttaacaccatcagtaagaagtcatgttgatcatatgtgcccttaatatgatgtgatgaaaatgacatttcacctctgtggtcttccaaaaaccataaccacagcctgtaagaaaaacggacatatcccaattaaggtatgtgctacaaaatacataaccagttctcctcaaaactatcaaagtcatcaacaacagccaagtgcagtggctcacacctgtaatcccaccatttgggatgctgaggcaggaggattgcttgaggccagcagttcaagaccaggcaggccaacataatgagacccttttttttttaattaaaatttttaaaaattagctaagtgttgcacatgcctgtagtcctggctacttgggatgctgaagcaggaggattgcttgtgcccagccaggggttcactcaggagttgagcccaggctgcagtgagctatgattgtgccactgcacttcagcccaggcaacagagcgagaccatgtctctttaaaaaaaagaaaaaaaaaatcatcaaaaacaaagaatgtctaagaaactatcacagcctacaggagtctatggaaatatgacgattaaatgtaatatggtatgatggatgggatcctggaacagaaaaaggacattaagcaaaactagtaaactctgaaaaaagtatgaagttcacttaataatatattatttctttagtggtgataaatgtaccacagtaaggtgttaacagaactgggtctgagtacgtggaaactctgtattatccttgtaccttttctgtaaatctaaaactaaaattaagtttacttaaatatctttaaaatatgcagtttgggcaacagattgactacatgcttatcttcaaaactgtgctttcaattacagggtgctggtgacagctttgtgggagctctggccttctacctggcttactatccaaatctgtccttggaagacatgctcaacagatccaatttcattgcagcagtcagtgtccaggctgcaggaacacagtcatcttacccttacaaaaaagaccttccgcttactctgttttgattgctattagtcccaaaataaatatacctgggaataaaatgtacttgggggtggctgctcctggctaatgcttattagaaaatgtcctcgtcccctttctttgcaaatattagttcttttacgaagtcatcctcaagcttcaatttatttataacgatgattcttttgctttccatgcatttgcacaaaacaaccagaattaaagattccacaaccaagatctgtacaaacataaagacaagtaacctcaattgtcaacagattgttaatgccccatgtgcaccatatggcaggggttgtggacaacagtgtctagagtcagagcagactcttcttaaataagggaaagggcactttctaagaggggcagctgatactcaacttcagcttagtgttgtcaacgcctctggttttgtaagggaaggcagaagtttggatatttattgaaacccttcaatgtttatgtatcagcaactaatttttttttaaatgtaaacaccacaggggcatggtggctcacgcctgtaatcccaccactttgggaagcaaggcagaagaattgcttgagcccaacatggcaaaacctcatctctactaaaaatacaaaaaattagccaggtgtggtggcacacacctgtagtcccagctactcaggaggctgaggtgggaggataacatgagcctgggagttcaaggctgcagtgagctatgatcacaccactacaccccagcctgggtgacaaagcagaccctatatcaaaaaaaaaaaaaaaaaaaagaagtaaccaccacctatgggccacattcaacccatgggctgaataagtaagtcatttgttaaaccaggtaagttttttttttttttaagcaattcatgcatgtcacagaccctttacatcagcttagctaggatcaggtgaaagatttttcttgtaactcaacactatatacagtttcagcctaaaaagagccaagatctcacctattattactttgaaccagagctttatcaaaagatgccataaaatagctgattgaccatgaggccacaagccctaagactcatcaactatctgcctctaattccactgccagagagctgctcttacatttccctcagagccaggtttgggccatggagaaggaacttcttattttgtagtcagggtgggcactgtatcattctcccacacaaatgctttaaatggggtaggatgtgaaccaacagatcttaaaatgagcagatccttttcaaccgggaacttgacaaaggagaaaactggacaattttcaaaacttgtgggaaaaaacagcctgagtgagaaagtgtatggctctgggcaggagagaggtccgtatctgaacattagggattgctcccagaattccatgctagttagctgtgtggtaccaccatgccccagaagtcttagcagtggctttattgaaacactataccttcttttattttaaaaggaaagaaaaatctagggaataaaggaatccaaagctgtcccagaaaatcctagatactgctttggtgatctgggtttgaaaatataggcctgtggcatttttcctaattatataagcacaaatcagaaatagaggttctcttggtttgtgttacaaggctcctctttttgtcattcctggtcccccttgccatctctgttattacatgggagtttcttcaagatcactctggaatgttactctgccttttctctgagtacagagggagcaggctggaaactcttacataagtgttgttatggaaacatttattacatggaacaatggttattttttagtaatgtggttgatttttaaaacatcaaatagtggggaaaaacatcaytaagacacaatagcacaggctattttaatattttttattaagggctataaaaatacccagaaagataaataaatgtgatgcaatgatatctgtcctaatatgaagaactttctttcactgcattgttttccttcacaatggccttcaaatcacaggaggcagtgattccatgccatttcctcttcttttattacacgctacaggatttctgaatcagtatccccgccctcagtcttctctttataaatcaaagtcattttcaatccaccgtttaaagggagcgtatttttttcttttccacgaagaggactctttgtttcactatggagggagaaaaaaaaattgtggcagaaaattattaagtatcatcgccatttttataaaaaatacatatcagaccataagccctcacctttctcttattttactattccttgatatgaagatggagctgatttgcaaactcagttcctccatcccaggagccagggcagactggagaaaatggctatagggccactagctaatcagcagcatccttggtatgccacaagtcatattcaaccaatgaagaaatattcacattaagaaagaaaactagggacaaaaatggaaaacaatgttttcacccaattaatgtccactcttgtaggaggtaagcaaggacagactgggagctggactccagaaagagagcagcaagaaccaagtggaccacgctgtctggaagagtaatagacactaaacctctacttcccagagatgggttaatacacccaaatacggagtttttagtttggtactataattaatatcataaccaaaatctcattattgtaaatattagagtacagttctctgaaacaaagtgctaccggcctggatgaaacactgaaggctagctgggcgcagtgactcacacctgtaatcccagcactttgggagaccgaggtggtcatatcacctgaggctgggagttcaagaccagcctggctaacatggagaaaccccatctccactagaaatacaaaattagccaggcatggtggtgcatgcctgtaatcccagctacgcgggaggctggcgcaggagaatcacttgaacccgggaggcagaggttgcagtgagccgagatcgcaccattgcactccagcctgggcaacaagagtgaaactccgtctcaaaaaaaaaaaaagaaaagattgaagactagatgctgagcagtaaggctttcatatttctataatgccttatggcactcgattaacttccatctctctcacacacacacccacacacccacacacacacacacccctacctatttcctctttgctaaaacaaaaacaagaaaacaccagaaatggaataatcacccaaggaagatccaggaacttaaacaactatgacctaacaattcctcacttgtccctatcatacagacattttagcttttttcttctacagtcaatatggatactctgcatatgagattcccaagctatctacgactaagaatgagcttatctaagtaagtccattctcacctccactcctaccttaattctggtttagtagggctagagttggactgaagtctacattttttaaaactactcaattgatgggcagctgaatttaagaatcattaacctgtcaacagaatttatctatgatattaatacactgtacataagggatctttttaacatacttcaaatcatgtgaaatgtaagtaggattgatcctcctaaaactccaaggaggactacaatgcattaatgcattacaagatggtagtaaagaaccaaaacagtttctcatctatattacgacaagaaatatttcccccatggttttctacagggaactaaaaacttggtttaaaaaaaggcgsggggtaggggggttgtctcactgaaaagcaatctggagactatttaaatgaccctgactaggagtaactgattaaggttagtagagcaaggctatattgagtagaattctttgattcattcactgcacctattcctttaactcaaagaataaaatatttaagtccatagaactgtgctaggcaatgtagagtttacaaaagtgtaagaagactccctgatttaatacatcagtacatcatgaggtgcccacacaaatgtccagtaaaccccagaggaacctaaaggtcagaaagggacaggaatggtgacagaagtcctcatggaaagtgtcaagtttggtccctgaagacagatcagcatttggattaaatgaaccaggaatgggcatctggtttagtagagggattggtgataggagtctcagtggggatccatggcctgaccacagggatgggtcttgattaaaaaaaaaaaaaaaaaaaagttttagattaatttggctccatgtaagagacagaacagggacttggccaggaatggtggctcatgcccataatcccagcacttgggagactgaggtaggaggattagtagaggccaggagttccagaccagcctgggcaacacagaagacactgtacaaaaaaaaccaaaaacctatttttaaattagaagggctaagcacaatggctcaggcctgtaatcccaacactctgggcagccaaggtgggcggactgcttgagctcaggagttcgagaccagtctgcacaacacagaccccatctctattttaaaaaattaaataaataaatacatagaagaacagggacttgagtgagaaagactcggttccaactctggctccaccatttatcagctatgaatccctgggaaaatttctcaaagtactctatcctgctttcttccctgtgggagagataactatctccctcacaaggttgttgctggacacatagtgcgcactcaacactgagttgaaatgacacactgctacccacaattgtaaacatgaattaattttctgtcaaaatatttgctgcttaattcatagaagaatgaatctgtcaagttctctccctacatctaaccaaaatcgattctgcttcaattacagtctatattgtcttgtttagtcatccaaggaattaaaactgacaagttttcattctctttatgataaaccttcaatatatttaagaaagtttaataagctcatgcctcagcctttaatccttcctcttcggaaattagcatctagttttatacgtggaaaaggaattcgaaaggataggcacatgcagctgcttcttgccacagactatattatgaaatgctcaaataattgggaattttttcacgtttccttacctatttccttcataaagcagaccaacaatcatcgtcctcaaacttaacaatttactcatcacagtaaaacatgctgggagaactgccaagctatttggtaccctgggcaatgggggcaggccccgaggcaaacatcttcatcacgaacacgtgcagggcattcagcaggtgggcagaaagccaggcagtctgctatcccagaacattctcttcttcagaaaagacaaagttgtgctgtcaaagctaagaccgttccttatcagaaaaattctaagcgtctgtttgaaatttatacgtgaatcttttctcccactttgaactatgatcagaactgtttatggctgtatcctttcccaatctcaaaacttaaaatcaaactgacaattattaagttcctaatacctccatactaaagatgaaaagcccaatacattttttcatacttaaaatatcacagaatgttactcagtcacccctttgacttttcaccagctgacacaaagaaatcagagggagaaaaacataccaatccaattctaaaccttatcaatccaacagcaaacctcatcatttttccaccatatgaggaatcatcctgaaattcagactccttaccatcagatacagacctagaattcccttttcactctgataatgaataaacagaaatttgaacaccataaaaacagcaaggaattttatttctgttaaaggatggaacacaagaaactttaagctgacaactgtgcttcttggagcctttaaaaaatgtctgctcatgttattatagccattatcttgttaagaagcaatggccgggtgcggtggctcacacctgtaatcccagcactttgggaggctgaggtgggtggatcacctgaggtcaggagttcaagaccagcgtggctaacatggtgaaaccctatctctactaaaaatataaaagttagccgggtgtggtggcacacacctgtagtcccagctacttgggaggctgaagcaggagaatcacttgaacccaggaggcagaggttgcagtgagccgaaattgtaccactgcactccagcctgggcgacaaagtgagactccatctcaaaaaaaaaaaaaaaaaaaattaattataaagagcacaaaatgaacagccagagctctaaaattaaaaaacacgtttgctatttttacataaatctgcacataaaatccagaaacaggataggcatccaccaacagcaatcaggtgctgactctatttttgtttgtgagcagataatatggccttaggaacacttgtctcttctagataaatacttccatctaatgagaccatttaaagttaccatatagtacagcattttagtggatggcacaaaatggaaaaatcaaatttcctacccccactgcactaatatatagaaaccatattcctttaacttctatcaggaaccaaatactagccactgtcg

SEQ ID NO: 96391 - DNA, 19785 bp, Homo sapiens
ctcctaataaggccgggtgtggtggctcatacctgtaatcccagcactttgggaggcgaggcgggcggatcatgaggtcgagatcaagaccatcctggccagtgtggtgaaaccctgtctctactaaaaatagaaaaattagctgggcatggtggcatgcacctgtagtcccagctacttgggaggctgaggcaggagaatcacttgaacctgggagatggaggttgcagtgagccgaaatcatgccactgcactccagcctggcgacagagcgaggttccatctcaaaaaaaaaaaaaaagattcctcctaatacttcagaaaccacacacagcttagcataacacaataacacagagcacagactaagtgctcaagaagttcttgctgctgggtgataaataggaaagaatcaaataaccttctggctttcttagctagatctccactatttctggtgcatatcatttaaatgactttcaagaagctaaaattttaacttagccatgctgaaaatatatacggccaccaaggaaatgaaatctcataaaacttgagctctggtatcttatcacaaaaaaggctaaacaagaaattatcattgttacacaacacatttttagattgtggaccccacttctaccttataaaatgtatgtaagcaattttatttacagcagtcttatcacagtgccaaattatcccagaaccatggttttcaaggctttcttttaatagtagaatttttttttatttcttcttcttctttttttttttaaacaaacaaaaggctaggtggaattctaccatacagaaaaaaggagagctgatcttgctaacgtggagggaggggcttgtagttctgcctgccctgtccccagtccctaattgcagtgaccccttaaggcatctctgagcaccatcagcaatgagaagcactcagaataatcagcaaactgccatgaatagaaaaatacttcattaattattttttaatttcaatatcattataatataaaattaaaacttacccatttctactgaacactcttagccatgctttgaggtttggtcctaacaaacataagcaaggcacagtagtaaaagtagacaaaataactgcaaataaaaatgtttccaacgccaacctagaaaaaaaaaaagattactttttaaaaaagtgttaaaggtaaacatacacatacataatctttattatataaataaaatgtgaaatatcttcctatgctttactttgaaaggtaacatgaatgccaccaaaatgatgactataaataattttaccaccaacatgtagctttaaaaaacaatctagcaagtattttgctttaatgatagatttcagaagtgttaaagaccctaggatccatgctgagactttcactgcaaacacaaacaaacaaacaaaatccatttctagatagttagctttctgctcaatagtctctctggaactttctctacaactagtggttcaatacactattgaaccactattgaaccactattgaatactagttgtagtggttctctacaactagtggttaacatatattggaaacacctggagagctggataaactaaagattggtgggggctctacccctagagtttctgactgaagcttgagtatttgcattttgataaaatgctgatgctgctggtttgaaaaccacattttgagaaccactgtgccagacacattcattctgctttaaaatggattagacaggaaccaccattttccattacaaaggtcttgttctctcccatctagaaaagaataacctgtcagtttagtgtgtgtacgtaaaactatgtataaatatatatatatatataaaatggtatacttagcaacacaaatatatgtgtgtgtatatgtatatgtatctcatcactcatttcaccatgatcattaatcactgctaaactgaagcttctcaaactatgataaacattatgtaagaaacattcatgaattttgtttctaagaatttgaaatttgtcagttcagaaaaagtgttaaattttacctttaaactataaacaccagcttattcagtatttgaatacaggaatctattgacttttgttaagaaaaactccattcaagtactttagaatcacatttataagaactgatatgctaattataacttacacatataatcatagtaagttctttcagaggttctaagggccaaatacttattggtatagtatagtttctctactctcccttctctcaacatgcaattggatactagaaggctaggtaacaagagtatttaataaattaagttattctgctgttttttttaaaaaagaataacactgctaatgatgttggtgtccttacttgatctattaatgatgcacatcatggtttttctctagttgctaagaattagcacacagtttggtaaatgaatgttttaaaatataaatttagggtaaaaatttcaaacttactctatcagtggtgctccatacagaacaaaaattacatgaaaggagaaacaagacataagaaagtagatacagcatttcaaaaatccagttacctaaaagagaaatgaataacctgaagattcaagataatgcttaaaggacaataaattcttccatttcatctacaaacacaacttgttcccataatgtgtaaaacagttcaaatgttcttgggtatactcaaatcagatcacatgtcctgtaccgtcacatacacagccttcgatacagactaaaaaagcctaaaaggcaaataccaccttccgcccatattctacccatccgacctacatgagtcgaaaagaggttctgtttccatggtaatatagagctatgtcattaatcaatatttatcaaatactgattgacatcagagagctaggatacaaaaaatacagtattatgcgatgatagaggaaatatctgcagaaaataacaatttttttcattttaaaacaaaattcctgggaaaactgcactgaaaaagcaaaatactaaataattcttgaaatcacactcatattacacaacccgtatgaaaaaagacctgaacatctacaaagaaacatgagatcttcttgatttggagcttaagaatatataaacataacacatacattcagcttttccaatcataggcagtaaatgacctaacagagcttatacatggtagaaaataatgttaagtgtggacattattagtaatagccaagtgaatatctactgcagtgaatattctggaaaattgattctaatatctgaaaattgtttagtcaaggaaggccatgttggaaacaagcattaccacaggcttatattgcaatttctgaaaatcccactaagtggctttcagaaatgcaaaaataataaaaataaactgcaatgtcttattgagtaaggtttaaagatagactgtcacacgtatttattttcaatggtgacataaaacaatgactatataggctcacaatattataatatgctctgaagaagtcataattccataattaatgcaaggcaaggatcaatcaaacattgtgggcagccttccaccaagtaacagcctaccaatttggggggaaaaatatcaggttccctttgctcactataaataagctaataaagacttgatgaatactttattcttccattaaaagaaacactagctccatccaaaaatcagttattgagacataagccttaccttgtgtgataatgaacttcttttagaggatgtatttggtttcactactaaatatagtactagattgacagcagttacaaaaccagaacagatgcacaaccatgtcaagtgtgtttccaatattgagaagttctccaagaagagtgatggaatgaagacacttaggataattgaaaatatgcataaaagatgggtatacagtagtctcttgatatcgttatctttcatggtgttttcttggatggctagctaacaaaaaacaagaaaagaagagcatatgcaataacgactttttccattgtcttaaatgttttgacccctaaaaataggtcataaagtcaattttctatgagcaatgtatttgtttcaaaacacaaaagatgcagacgtgtagatgcacatacagacttagctttctattctacctttgattttcttaatatggtacaaacatctctcagagcctaaaaagaacaaatttactaatttcttaaatattgtgactggtttctgcaaaagggtcatgtcctaggaccaataaagcaattcatttaaacttttttggccaatatcaaagagatgaaatcaactgtgtggattaaattatctactgcctgttgcaattataaccaaagtttatttatgcggtttctagaatgcataggttataattccaacaactccacaaatatacttaggctgaattgttggtatttttttttactcttgtctaacattacagtagttcacatcttctagcaaatgccaaatgacaccaagtgcacattccaatactcaaatggtggccagtggaatcaagagttcaaagagcaccacactaaaccaagggatcccaatgcttcagaaataccaagatgacaacgtctgttacaggtgttaaattccaaccaaaagtagagcacgaacggaaggaggaaaaaaaaattaccgtctctaaaatacacgtatttaaattacctgagagctgactaattgtactgctaaacaaggactttattaatttaaagtaacagtcaatatgttacattatggagaatattccagaaaatagaaatatctcagaaaaaaaaatactatacacacacacgcacacgcgcgcgcgcgcgtgggcggaggggcgcccactagtgagaaaagcagaaaggcgaacctgggccttatcctaatagctctcatttaattcacccaatgcttttcaaaggcagatattttactgataaggaaacacggcaaacaggtgaggtggtccaaggtcccatgcgctacagccatctctctggtataaggaaatacactaggcatgaaaagcaaacggatggcaagaagggacaaagggaaagtttcccatagattctatcttaagctgattgagggagggcaaggggatcaggaatccattctctcaacagatagcccttcagcgatttttctgagccaccctcggaatcgcagctgccagcagcagatgtggatgtaatacagtgagcaggacccaaactcaaatgtttgctgaatgaatgaaggaaccagagtaagcaaagagggaaccagcaccggttaggccctggcgtgcccccaggacgcctgcagaagtgccacgggcatgacccggcccacctcgctacgcaccgcagcggagagaaggctcttccgagcggcacccagaggagccttcgcgggcatcgccgcaccttcaccggcagccccaccccaacccgggtccctcgggattctgcccgagcctacgccggcgcaagcgtgggcagcgaggaaccagctgagaggcaggatcaaagagcatgggagttgaagacaagggaaaactgggggacagaggcgaaaactcggatccgaaagggggtctgtccatcagggcacgccggaagagtggcgctgagctgacggcgagcgccggcgggtcggggcgccaaggctcagggctgcttcggcaattcgcgggggtagcttgcacctcgtgaggcgagagcgccgagggcgtccagcggggcttacctaactctccctcccgcggaagggaagcggggaactactgcctcctaccatcaggtacgacgggcggcccaggcccacgcgcaggcgcagggctgtggggcggagacccacggcctaacagccagtcgcagaaagggaggggcgggcaaaaggggcagcggctttccaggtttggggtaggcgggagtatgggcttagaagccggaagtgggttgacgtagcccggaaggggaatacttccaagttgtagtgttgttgttttcagcctgctgctgctgctgctgttgcggctaggggaaccgtcgtggggaaggatggtgtgcgaaaaatgtgagttaaggggccgcttctgcgggaggaggaggctgggagaacctaactgagctctcccgggaactttgctttctcgttgttttttcttcgcccacaggtctcagattctatccgctgtctttctaccctaccctttgaccatttttgcacctcccaacgaccatacagtcctatatattttgtactcagaatggtctcagttctgcacctccttgtstatttctgttgccttcccccagccccagatctcatcagctctcctcccatataaaaatgtgcagttaaaccccaacgacacctttctgtcttggcaattcttgatctttcctttctattcatgtaagaagtattgttctcctgccaaatgctagacactagaaccaaagactaaggactttgccttattcattctcattagtcattatgccaggatatggcttagagtaagcccagaagatgcttgaattgaaaatcaacgtaagtgcaaattattatttccctaacttaaaacctttaataaattctcagtgtgcagagaataatttggggattctatatttggaacctggcgttcaggaccctccacactaaggccccaacttatttttccagcttcatcttcactgagscttatcctcttcacattttgaccaaacaaaatactctttgtgcccatgtgtactctaagctttctatgcctttcctcagaatgtgtcctttatctagtttgccttcatcctctttactcctttttgttcacagtcctattgccacatatccaaatcctctgtcttgccttctccccaaactttcttttcttggatttccttagctagggttatttcttcctgcatggaatttcttctagtactttagctgtcgattattatactttttattttttaagcttacattttggttgaatggttctttttggggggaaggtctctgatccctctgataatctgatgaaaactatagactcttgccaggaaaaaaaaatgaatatataaaaggtttgtgtacaactccaccttgttcgcatatctcttaagatccacctgtggaacccaggttacagattgctgttaaagaaattagtgtactgtaatccctttaaaattgtgtctgattcrtcacttcatttttctcagcactttgtatagtttatacatgatagatgcttagtatrtatttatggaacaaatagacttaccagatttgtttaaaatataaaccaacagtgaaagcttattataagtcatcttattatcctacgcattttactgagggtcagtcattcattggccacagttaatatgagtctcagttgattggctgctctcccagcattaacaggctcctacggtaataccattgatagtcgataccattgtgaaccttaggcrcaatgtaatgcacttattaaataataaagtttaattttccttttactatcttgttctaacaggtgaaaagaaacttggtactgttatcactccagatacatggaaagatggtgctaggaataccacaggtatttcttcttttagaaaataggaatttaaccgaatacttactgtgaataataccttagtttttacattatttgtacaatgaaatgttatgtgttcaaagtattttatctattaaacattaaagaatactgggtcctcaagtgatttaatatcttctatttagttctcagttacttgtacgggttcctaatatcaggagatagcaaaattattaaatgattgtcaagtgatggcaatatcacagtatttgattatcagagtatttgatttgattcagcttatttagagtctgtatttaatttctgcactcttctgaggagaaatttttttaatcttctgatttttatattcttgaataaatgctttaacccattttaccttcattatcattaattacttatgatgaagtatttaccttcattattattaaatacatatagtaaagtatgttttcaatgggtagaaaaataaacattttcattatattcaaggtctatgacactgatatagtggcttctagattttatgctatatagagtaaatatagacccattcctaaagtactcccttgagtctgagaaataaaatgattgtattttatacaaatttttactrtttccctaataaatattttctttttaagcagtatcttaataacctattaaatgaggatttaaaaattagatatagactactattttggtagaaagtcaaggaatgaacttcttaatattatatgttaaatgtatagaaataacccactaaaatatcttttattctgatacagaaagtggtggaagaaagctgaatgaaaataaagctttgacttcaaaaaaagcaaggtgggtaagaggatccatcgatgggtcacataaatttccttcttttagtattaagtctgctggagtgaatttgatgtgcatcattccatttgcaataaaacagagttaggtggttcctagcactcagaaccaagctatctgttataatcctgctggttttaccttattcctcctcactgtatcaatatatgaagatattagtgttattctcttacagtttcaccagaaaacatgacttttattttatctccttcttaattatcttatgaatcagagacagcaggcaaatgtggaaagatcataagctttggagtcagacctaaatttgaatctagactcactgtctagccttatgaccttaagcaagttaagcatgtttcgtgacctttctaaactttactttttcctgagaattgcgtaaaaagtgtcccatcttaaaaacaagtgtttgataccacactttattatatccagcttaaaaattcggctgggtaaggtgactcacacctgtaatcctagcactttgggaagccaaggcagacagattatctgagcccaggagtttgagagcagcctgggcaacatgtgaaaccctgtcctacaaaggacagaaaaattaactgggtgtggcagcacgcgcctgtagtcccagctactcaggaggcagacgtgggaggatcacttgatcccagggaggtcaaggctgcagtgagccaggatcgcactactgatctccagcctgggttgacagagtgagagtctctttcagaaaaaaaatttcgtgaaccctttcatctgccatctgatttctttgctccccttcacatcagaagttttccaaagtcttacctagacactttttcagtgtccttaagttcctttccctccttcagccactctagtcatgtgttatccccacaacagccctgaaactgttcttgtcgagatcacaagtgaccttttagagtgacttcaatctactggctttaaattcaagctatatgttatatatatatatawgtaataatattattatatatatattataatattattatatatatataactcccaaatttatacctctggcctgacttctctgagctctaaacgtatatctagcagtttatctgacatacctcatttaatgtctaacaggccacttctttttccttccgtcttctcatcatagtagcaccactctctaatccacttgttcaagcctaaaagctagaattcctcactgagtcctccctttcccctacttcccctatccatcagcaagttctttggatctacctccaaaacgtaaaatgtaacctgaaaccacctgcttctgtacatctcactgctattacccttttccaaaccactgttatttcttacttggaactgtaataactattgaactatcttcctgcttctctagtttcccgcagttgtctcatagtaacgagagtgatcctttacaaagttcctttgcttaaaatccgccactggttttctttttcacatagaataaaatttaagccccctaccatgttcttacaaggtcctccttaatatgacccctcccacctctccggcttcgtattgtaccacactgctcctcattcatcatatgctgtctttattagttctgccaagcccactcccatccaaagagatttgtacttgctgctgtctcctaggagtcttccgttagagcttacgtatctgcctccttcttgctgtttgggtctcagcttcagagaagtttccctaatcagcatctaaactaatctcttctttccttttcctcatctctgccttagtatcctgttagaattttctctataatactactatttgaaaaccttgcttgttttattagattgtctgtttccttacttactgtttacctcttctcactacaatattatctgatgagggcaagggctttgcctatcatgttcatctttggtatttagaacagtaaataccatgtaatattaagcactcagtatatatttgctgaatgaataaatacctgttttctgatgtcatcccaaggattagaaataacaacaataaagccttaactacatacagtgcctagcacataatagcatctttaatgcagattcacactatatattattgactgacttattgaggtctttgagaaccattctgtttttattgactgagctattatttgtacagattttatgcttttatatacttccagttcctttatgctctcaaacttactctgatatcattaaaaagtagctgtaactcttgggtactctcttactttggaaaatgtactacagtattgcttggaatctatggtactgttatttataagatgcattgttactttaagaaaaaactctgccagttttaagatttccaaggttaggccgggtgcggtggctcacgcctgtaatcccagcactttgggaggccgaggcaggcggatcacaaggtcaggagatcgagaccatcctggctaacatggtgaaaccctgtctctactaaaaatacaaaaaaattagccgggcgtggtggcggtcacctgtaatcccagctactcgggaggctgaggcaggagaatggcatgaacctacgaggcagagcttgcagtgagccgagattgcgccactgcattccagcctgggcgacagagygagactccgtctcaaaaaaaaaaaaaaaagatttccaaggttacaatgtgtatttttgaataataaaatatggttttaagaaaaaatagcctctggaaatacatgtccaaacaaattgaacttattgaaaggaagaagagtacctatcttttgtggggagtaaagtgatattctcagctgggcgcagtggttcacgcctgtgatcccagcactttgggaggccaacgcaggcgratctcctgaggttgggagttcgagaccagcctgaccaacatggagaaaccccatctctactaaaaatacaaaattagccgggcgtggtagcgcatgcctgtaatcccagctacttgtgaggctgagacaggagaattgcttgaacctgggaggcagaggttgcagtaagccaagattgcgccattgcactctagcctgggcgatagagtgagattcagtctcaaaaaaaaaaaagtgatattctctgtgtttggaaaaattaacctttgtaaatgggctgttgtactatacccaagagaagacaccagttctaggacggtgtttcgtatctagtatatgaggatcattacaaaaactcattttgtaaaaatgttagggaagcacatttaaatcagagtattattgccattttaggggaaartatttctttttttcactcctgtcactataagatggcatttttatatagtggaagcccttttatctaaaaggattgagtcagttaattaaaaatgtcagctaatgtaagcagtcattaaaagatacacatactttattttaaattaaagcgcataactgtagatgcattaatcatttggtattgaaacaaagccttttgagcataaatcgactgataagtgctttacatgattgtcgtcacaaaaatcacaatcagaatatgttcagtttctttaaagtagagcaaaaattgatgcttgaggtgtggagttactttcctagtgattttcccccagttttcaacagttgtcttacccatacctaattcaatagcaattcatatgattcctagtcatcctaaaatagtcacttaggttatatgraatcagtcactctttttgcacccacatttcatcagtttccataatatttatgtcacacaaatagaatgacagatacgactgatatgaacacgtcaagaataaatactgtacaactgattctttataagtatatatctcacatggatggagcagagcagagatgtacaggcatatcagacagtagccatctggaataggctaaacccatcaattgtagaggttgatggagggatggagagcatggattaatcctgtgtgttgcgtaagtggggttatttaagagtgtttctagtgtaatatacaattttctctctttaaaaaaaatttctagatttgatccatatggaaagaataagttctccacttgtagaatttgtaaaagttctgtgcaccaaccaggttctcattactgccagggctgtgcctacaaaaaaggtaagtttcttttaatacyrttttctattcataaaaccgacttcatttgctgctaatttggttaacagaaaagatgtagcctgtcataaattctgttagccaaacactctctttatcctaaggcaaaatagaacctaaaacctgtttataattaaaattatatatatatatatatwttttttttcttttcttttctttcctgatgctgttaaattatgttttaagcttcaggattgacttaaaccaaacagttggtattatgatttgattgatcacatatcttcttttgtttcaggcatctgtgcgatgtgtggaaaaaaggttttggataccaaaaactacaagcaaacatctgtctagatgtattgatggaatttctggctttctaaatgattttactttctgccttgaattttcaaggcatagatgtcaacttacagaataacatgttttaagataattaagtttaaaccagagaatttgattgttactcattttgctctcatgttctaaacagcaacagtgtaactagtcttttgttgtaaatggttattttccttataagaattttaagaactaagtggcaaattccatgaaaatatttctcagttctgtatgcacttttatttaacattattcatataattctccccccaccactttatttatagatactgcaaaagtgagaaggagataatagatactttgctctgaatttggcatccagagttaacatttctcccctcactcccttgctggtgtcatagttattagaatcagcagcctcttaactaattgcggtttcataggatatataaatgtttcaagccattattgctgaatggttctttagttattaayctagacccaaatcaaagaccagttggatttatgatattttttatttgttcttgcagccaaagtgccagtttctttaatatgtgaccaagaacacaaggagcatccatatggccaaataaatacactgaattttagaaaaacatattactttgaattcaaattgtcrtgaaaaccagaacagtgtttgtccatgttgcatgtaatgaaaataaatccctgctctgagaaaagctctttgaagcaaaaaccaaacttttttttttttttttttacctcctgtcttgccccctaaaagaaataaatagagcaaacatcttgactctccctttttaaaatttgtttgttttttttttttttttttggatacaagagctcactctgttgcccagggtggagtgcagaggtatcatcaggctctctgcagcctccatctgctgggctcaagcaattcttccccctcagcctcctaagtagctggggactacaggcgtgtgccactgtgctcagctagtttttatttttagtagagatgaggactcactatgttgcccaagctgttctcgaacttctgatctcaagcaatcctctggcctcagccttccgaagtgctgggatacaggtgtgagccacagaacttggcctctctcttttttttttttttttttttttttttttaacactacaggtttcaaatgaatacttttcttatgttgccttcagaggttcaggacttctgcttttaaaacctgcagcctaccgtgggaaaccaaaaaagcattccctatttccaactgcagtatgtataaatacatatcactacaaaatgtatagaaagtgtgatgagatacatgaatggcatttttattggtcataacattttgatgaaaagcatttaaagttttaactttataaggcttttcaaaatgtgtttttctgagatacattgttatttattcatatccagaaaaattacaaggataatacagaatataataaataatttatctgagagcaggaagtatcctctcatgcttaatcagtttggggtttttaattataacacaggaaactcataacaggacctggtcagagagcatcccagatccattaaagattggattcattgacttggagaaaagtacatttctcagggatcagctagaatctggacttgcctaactcacatttcattttttttgttgttgttgttgtttttataatttcaacttttattttagatgtaggggtacatgtgcaggtgagttatatgggtatattttgtgatgctgaggtttggggtacaaatgatcctgtcacccaggtagtgagcatagagtccaacaggtggtttttcaccccttccctcccctcttccctccagtagtcccctatgtctgttctcatttttatgtccatgtgtacccattgcttagttcccactgataagtgagaacatgcggtctttggttttctgttcctgtgtatattcactataatgacctccagctgcatccatgttgctgcaaaagacatgattttcattcttttttatggctgcatagtattctgtggtgtatatgtaccaattttctttatccagtccactattaatgagcatctaggttgattctgtgtctttgctgttgtgaatagtgctgtgatgaatatgtgagtgtatgtgtctttttggtagaacaatttattttcatttggatttatatccagtcatgggattgctggttcaaatggtagttctgttttaacttctttgagaaatctccaaactgctttcacagtggctgaactaatttgcatttccatcagtgtaggcgcattctacactgcactggcttctacagtgttgaagcattccgtttttcccacagcctcaccagcatctgttatttttttgactttttgataatagccattctgactggtgtgagattgtaactcattgtggttttgatttgcatttatctgattagtaatgttgagcattttttcatgtttgttaaccgcttgtatgttgtcttttgagaagtgtctgttcaagtcttttggcatttttttaatgggtttttgtttgtgtgtgtgtatttttgtttttgtttttgttttgagatggagtttcactgttgtcacccaggctagagtgcaatggcaccatctcagctcactgcaacctccacctcccgggttcaagcgattctcctgccccagcctcctgagttgctgggattacaggtgcctgccaccaagcgtggctaattttggtacttttagtagagacagggtttcaccatgttggccagcctggtctcgaattcctgacctcaggtgatccacccatctcagcctcccaaagtgctgggattacaggagtgagccaccacacctggccacgagttacttggttttcgttttctgaattgttttagttccttatagattttggacattagacctttttcagatgcacagtttgtgaatattctctcccattctgtaggttgtctgtttactgtattgatagttccttttgcggtgcagaagctctttagtttgattaggttccacttgtcaatttttgtttttgttgcaattgcttttgaggacttagccgtaagttctttcccatagctgatgtccagatgttatttcgtaggttttcttctaggactcttatagcttgaagtcttacatttaaatctttttttttttttttccccaaagacagagtctccttctgttgcccaggctggagtacagtggtacaatcttggctcaccacaacctccacctcccaggctcaagcgattctcatgcctcagcctcccaacctaactgggattacaggcacatgccaccacgcctggctaatttttctatttttagtaggaatggggttttaccatgttggccaggctggtcttgaattccgagcctcaagtgatccacccacctcagtctcccaaagtgctgggattacaggcatgagccactgcacccggccccttatatttaaatctttaatctatcttgaggtaattttatatatatggtgaaaggggtccagtttgagtcttctgcatatggctagacagctgttccagcaccatttattgaattagggaatcctttctctgttgcttatttttgttaactttgtcaaaggtcagatggctgtaggtgtgtagctttatttctgtctgttccattccattggtctatgggtctgtttttatatctgtaccatgctgttttggttactgtagcttccttatagtatagtttaactcaggtaatgtgatacctcagctttgttttatttgcttaggattgattttttggttccatatgaattttagaatggattttttctttttttttttttttgagacggagtcttgctgtgtctcccaggctctgagtgcagctgtgcaatctcagctcactgcaacctctgcctcctgagttcaagcaattctcctgcctcagcctcccaaatagctgggattacaggagcccgccaaccatgcccagctaatttatgtaattttagtagagatggggtttcatcatcttagccaggctggtcttgaactcctgacgttgtgatccacccgcctcagcctcccaaagtgctgggattacaggcgtgagccactggacccggcaggatttttctaattctgtgaaaaatgatgtttgtagtttgataggaatagcattgaatctgtggattgctttgggcagtatggccattttaatgatattgattcttctagctcatgagcttggaatgtttttccatttgtttgtgtcatctctgatttctttcagcgtgttttgtagttcttgtccagctcacattttatcttcatactttgagtagcctccttccatgaatggatcatccagtggccgcacttaggttctcctatgaagatttttgttgtattgtacctcagaaccatctccatattctctaaataataataatgatggtcataaattgaatagaagtatttactagatgaggaggaaaaccctaaaacaaaacatgaacataaaatatttttaaaaggaagacatacaaacagacactataaccaaataagatgacagaattaaggccttatgccacagccagagttgaaaaatgcagaaaaaaagtttaaaaacaaggaattaaagccaaacctaacttttatcaaaataaatgtaaaagtgatgaaagaatctgttaagatatcagattgtaatataaaagatactagaaacaaatgccaatagaacacttaagtacattttatatattcatccattagaatatatagctgtcagaatgatagaagaattacatatgtgtgcaaaagtttttgtatccatgtggaaaacacaggaagctaatagtactgtttttctctggagtgggtgtaagggtagagacttaactctttacatccttatggcagccttcgaataccttttaactcccagttcccttaactgggggtgtgtatcctagaatcctcgacccattagaaagtatattgtagacatcatactctttaccctttaacactacacatgcacttcataagaacaagcatgctgtcttacccaagtacagctatcaagttcagaaatttaacattgccataatactttacagtccatatttcaatttcatttgctgttttattggtaatttttttcagctccacgatccagcctaggatcatatgttgtattgccataaccctctaatctggagcagttcctcagcttttctttgttttttataatagtaatatatttgaaaaatacaggacagctaaaggatagagtatccttctatttgggtttttctgatgtttcctcatggttagattggggtagtgcagtgagggttgaaatgctgtaagtgatatgtattgcaggtatacatccagatgcacagaatgtccatttgtcccttattggtgatgctaattttgatcacttgggtaagatgtccagtttctccagtgtatcgttattgtttttccttttgcaattagtgggtaatttgtgaggagaaactttgagaccttgttgacaattctgttcctcatcaaatctacccctcctaggtttagcatcctttgacgattcttgtctgaataaatttttactaggatgtttccaaaattgtgattgttctaactctattattatttctgtattaattagtcatcattctactgtaaggaagaggtttccctttatcatcaacttcgagtaagtacttttttctgagccatttgaatattccttactagatgtggtgcctctttaccccaattacttaagtttgtatttccaaagaacaagggtgttttcctgcatagccatagcacaattaccaaaatcagaaaattaacattaatactttactattatcaaatctttttcatattttgctaattgtttcagtaatatgcaaaaaaaaaaaaaagtctgatctggatccactctggagtaacattacatttagttgtcatgtctgtagtctcatttattctggagcagttcttcagccagtctttcaaaatgccaaggttatgggccagttgtatttttttttttaatttcaacttttattttagactcagggagtatatgtgcaagtttgttacatgggtatattgcgtgatgctgaggtttggggcaccattgatcccgacacccaggtagtgagcatagtacccaataggtagttttccaacccttgcaccttccctccctccctcctctagtagtcctcagtgtctattgttcccaacccgtagactttttatagagtaactcttaatctgggtttttctggtatttcttgatgattagactgagcttatacatttttggcggggataccacagaaatggcattgttcttttcagtgcaccgtatcatggtgtcagttgtcccattacaaggatgttaattttgatcacttgtattaggtgatatctgctatattactctactgtaaagtttctaattttttacgttaagttagtaagcattttgtggggaaatactttcagatgataactattttgtttctcaacaaactttcacacactcattttagcatccagtgatatttcttggtggaattaattgttactctggtgttgccaagtggggattcttccaattgtattattatttctgtgtttattctgtggcattctact

SEQ ID NO: 96392 - DNA, 54656 bp, Homo sapiens
agagtttgagggtaagttagcaatgcgtaatagaagacaaagagagtgagattggagatttttagctattagctctaggtggaaagaaaagttacacaaaaagaaaatatatttttattttaccttatgactcatctgagaatgttatttacaaagtcacatcaatgtaaaagcttaatactgatctaaagcagaattatagatagattatgaaaggaacaagaaaatatgtggggtaggttgggatgggataggacatgggtaaaaaaagaactggatccttgtggtcctcatatttcataatggaaactaaacagttaaacatttaaacaaataagatgttttacaataaaaacatcttattgtaaaagatgaaggtgaatactgaaagaaactgctaaaagatttatgtacatatatatctttcattgaaaaaaataaagtttaagatgaaaaggggatagaaatgcagtacagttacaaaaattaaaacaatagatactgaaactattatagatttgaaagatacatcaccagaacagaagggagtccagaaatagattcaccagagatcccatttatcagaatatattttaaacttctaatcacaaaaagtgagcacacttttctcttcctgcattgttcacaatcatttggaaaaaatctcaaatctataaataagacgatggggtaaaggtcaaataagtttcggtacatatatgcaatgatgtttttcatgaagccaaaataatgatgttgacttacatttattgttttttgtggagcaatgcccatgttatattgtgcagaaaaaaaccatttctgatcatcaaagatggtatgatgctatctatctgtctaatcatctatgcacacacactcatacatgcatgcatctgttatgtgtgtatctgtgtttggtgtgtgcttgtacatacttgtatgcataaaaagatatctggaagaatttctgccaaattttggtaacttttatttccagccatttgtcctctgtgtgaccagaactccctgcatatactaaaatgtctattgatggtctttgagggcagagactgcctagttcatcttaatgtccccagtgctttactcggtacttggcataaagttctacctcaatacatcttgttgaatagtcttctcaaagtcacacaggtagtttataacttgtcagcccccacgtaaggaataaaagtggaaaacgcccattctttccatgggtcagagcagtgcctttcaacagaaatataatatgggccactaatgtgagccacataggtaattttaaattttctagtcacataaaaaagtggaaaaaaaacaggtgaaatttatgctaattgtatattttattcaacccaacatatccaaaatattgccatcacaacatgtaatcaaaaatatcctgagatttttacattatctactaaatattcagaatctgaggtgcatttacatttacagcacatgttagctcaaatcagccttatgtcaacgtctgttctcaagagccactagtggctactatgttggacaacacagaattagaatatcaggttcatgaattctctagtctgaatctcagttgtctctacaattctagtcttataaaaacatgagcccagcttctccattggaatgtgtccttacactgtactcagaaactttgcaaaacttcagttttgcaggatgtcagtttggatgcaagaaagacctttggggaatcaaacaaatcattttgatgtcagaagtcatagagctacactggcctgtatcagaagtggttaaaatgctttacatcatacattttatttgattcaccagtgtgagttgacaaaagtgaaataactaagattgtttagtgtaacaaaatacagtatgatattaaaaatggtcatattagctaagcttcctgaggacctcttcccaaaacaagttttcttccagttgatctgtaagaaccatttatgatttttttctgtgaacaattcttaggaaaagttgaagcagcacatcttccaacttattttgaaaacaggctctcagttaattttggtccatttcaaaattgcatgaaagagatgcccatatattagaaatgctactgtttgagaaaaaaaaaggtagaaaaattggcctctagtttttttgtccaaaaactcttttttatatagttactctaaatgtactctacatgtgcccttaggaaattatttcaatgaaaagattctttgaatttggtgctgcccccgtgcctataatttttggcaattatacactcattttaaaatgtaggtcctggaatattttaatactatattctgaaagtgtaaaatacataggatcataattaggtatagtttgccatatatttattcaataattaaatatcagtttcttatcgtaagaaaatatcagaacagtttcatcatgttggtttaggatcccacctcatatttccaactaagggtttgatttattaaatatttcttatgcatgcaaaatctctccataatcaaggcacaaaaggatgttagaggaaatacaaaattaagaatttggttgttttcaaacacacttggagagaaatttacatatacatgtgtaccatcataaaatgagcactgtgtccacttggatttgctctaaatttacagatcaagtaaatgatctcacctgcatgtgagacggcaggtgaaagtaactcagtgaacctctaaacccatttccaatttctttcacactgggttcaattaaatgcccaattaatttaaatagcagactgtaaataaagcaatgcacatgattatcatctaattagcactggccagcattataatgtgctcattagcgagttgtatggtatcctgaggctcataatgagtaatcagggtactcgtgattggcatgtggctatccgaatgcaactactcaacccaataaattggagttaggacagaatgtgttatgtaaaaagaaaaaatacagagccagctggtgaattggcaatttcctccttcctgtaattcaggtacagctcctgctctcaaatacaaaataaatgtgagaacaggagagctggagatagcagaagagctggagatagaaatggaaatgttcgctaagggtgacagagaacaagtgcctatgattattatacaagattaccaaaaaagataaaacctttgtggtatttggtttctttttcatatctcaagtatagaatcaaagtaagaaatgagcagagtttcaataacatttcttggaaggtgaaaatttaatcattgaaatatacttcctgataatgttcataaagcattttgccttcatggttttagcatgttactgcaaaatagtttggcaggctgcagggagagatgcagctgagtgttgcattcattgttatgtaggtgataagtcactatggcaggtgttgtctctcttgacacccaatccgacacgcttttcttttgctttcctctattacagaggctggaaagcaaaatatttaccttcctagactcccttgcagctagatgaaggccaggtgacattgtcttgtcaatgaaatataggcacaaggccctatgcaggctgtccctttctgaataaagcctgggtaaaagaaaacctgagtctcttccccctttcttctttcctgaatgcacagcagccatgctgtgatcacttggacaaaagccacacaccacagatggcagagcaggaagatattcagcctgattcctgaacatcctttgtgcagctacttcagcctgggttgcctgccttcacccatcttgttacagaagaaaaagacacctctcacttgtttaagccactgaagtagtttttttgtaattgtgtttgttgttgttgttgttgctgttaactaaaaattaatacaatcttactcaatagatctttattaataaaaatcctgaaatgtaagtataaagaaaataacacaatattgaagtattaatgcattcttaaatgatcttcagatatgatcattatatctagagatattccaaaaatattcagtgaaaggaggaatcggtcttttttacctagtatcactgccatggaaagacgatatcactggatgggtgtcctggcagctctttctttcctggaacattgcacatgccctgctttaaatgaaggaagcttttactttaggcacttagtgttttttgaatatgctttctcatcctttcacgtgataaaattgatgttagactgggaacaatctagatccctttgacaggatatgccagaggtgggaagaaaaagtggttcaagaaaggatgaatttgaaaaaggatgggttagaagaaatggggagtaaagttcccagttaatttatagctggaaatagtcacaaaccaattcttcaagtccacaggccagaggtatccctggagtccacccagatctgttgcaagtgagcccagaatcaatggaggcctccccccagggaagagcctatattgaactcacccttgcatctccagcagctgaaggcatttaatacattctggtctggtgggtgggtgagttaaaagacaagcatggacagaaagggccctagttaagtccgtggagattttagaagctttttggatctggatttctaattttgttcatcctcaaaaagcctggcatcatgtaacttggtgtcagagttgtgtttcattcaggaagcacatttcaacagccataaaaaattaaaaagtaaattttatctttatgtctttgagaaatccgtaattactccacaataaacttactaaaatgctgtgtcaaaactctagtcactttcctcattcagctccgtcatgtaagctctccaaccttacctcccacaaagccaagtttccctctccttcctttcttctcattcagcctattattatgtgatctgcttagtatctcttccagcaagaatttcttctttaggatgttgagaaaggggaactggagttggaatttaattataggatttctgttgcaagatagcatagcaggaagtctatggctattctcacgttaataattttgccccataacatcagttaaattatctctccatgtacttttttattgctataaaattcagattctaattagaatcgaatgttttaaagactggtccaaaattgtttaataaagtagcacatttcaaaacagagtgctttgtagaagttatagccttgttcattgcatgtaactaaaattaaaacagtatcaaaacacattagccagggtcttatcaccttcttgctccacttcacaaaaaaattaacaatacatctgaaagccttctgtgaagatagtgcttcacaaagagcaaacaaaatagaggagctggttggagagacaaagcacaatatgttggactgaatgagaccctcagagttgaagaatatcacaccgtgaatgaaccttccattttaaccccatactaaactcctcagttgagaactgggtaaactgaggccaccaacactaaatggccttctggagttttagtggttagatgcagggccaggctagaatgtagttctgatgactccagtccaggatgctggttgctaaactccacgaaggcctttgtacatcgatctgcctttgaatttcctggcacctgcctacctgcattctgacttcctctgggatccacatgtggacctgtggcgcaacctcttgcttggccagggtgagcagggcatcagcattccaaagctaagagaataagatacacacacacacgcacacacacacacacacacacacatctccaaaactcagacaggaacatttatttttattttgttaagtcaatgcagttttcatctagaaatatagcaagagctctaccatttttttatttgaacaattgcttaaaaaaaaaaagaaaggaatgattatgtagaaatgtttttgatgcagaattactgagcctggaggcaagggggcggggcggggcggggcgggtggaagatagtgcccatcttctattagcagcaggatgtatgagcacagatgacaatccggtccatgctgttcatcagacaaagcctgaatcctggaaaaagccaactctttgaacaggaattagagtgtgatcggstcagttgacgtacaggggtaggtgagtgcgagagtaaagaagctcttctttgtcttcggtagtgctgggtttcttttccaggcacacagatggcctgctccccctgcagcgcacccagatcctcccagggaggccgcttcagtttccacttggccagcgccagaaacgggctgctgtgctgccagcgcctacgttcctccccgcgctgcgccaggagtcccgttcggcgggaccgcagctgctgccttcactcattacctgcccctgtcctggcagctccttcagaacatattgttctttggggaaatatcatggtttttgaactgaggacagattctcttcagaaatcacatggcaaaacattagaaaaaaagaaaaactaagaaatttaaaaattcagaacagaagacaatcggttttatgctaacttttataaccttaatcgttgaagcttttcccctcctttagagcaattacttctatgctgccaaaagaaatgagaagtgatttcatctgagtcattactgtgctctccctcaaaggatagcagacagtaattagtactccacaccagacctgcctcaaatttggcataaactgcattcgtcctttacagagccgaaaatgaagcacttctaagtcttagaatcttctcgtgaatttctgtcatttggcagaartttctggagtcgttgcttcktatagatcttttctactgttaactttaaaaaaatagacttttaacaattggcaaatggcaccacattaccttcagagtgaaatcaccatctgaaagcattcgaagtaaggggaggggaaaagttagacccccattttagtttcctggcaatattgagatctagaaattcatcctagaagctgtttgccatttccaaagtgcctaggacagcccatcaatgagggcaaaatcctcaggggcaactggacacgagcggtcctttttggaagactttatgaatagccacagaagtacaggtgttgggcattgatgtgtgctagacccagagaagcagggaggcttcgtcagaaagccaaccagccatccagaatgtggtcatggactgggtaaagctccccgctagtattgtgtaccttagagggtttccagaacatggtgcagggagggtgaacccagactctctgattccaggcaacagagctgagagtccagggacaccaaggcggctattgctcacaggacagaatgagagagaagggagctgcagagagagaatccaggtctgcagagggtccctttggaaaatgcagcaatatctgttaacttcttagagccgttaacgctgattcatgttgtctcacaggaacatggcaaaagtgacaatatacaaaatacttgggttttattttcaaggaaaatcactgtgagacttgatttgtgctgtccaattcagtagccactagacacacatggctattgaaatgtaaattaaaagtaaatgaaggttaaaaatgcatttccggcagggcttggtggctcacgcctgtaatcccagcactytgggaggctgaggcgggcgggtcacgaggtcaggagatcgagaccatcctggctaacacggagaaaccctgtctctattaaaaatacaaaaaaattagccaggtgtggtggcaggtgcctatagtcccagctactccggaggctgaggcaggagaatggcatgaacccaggaggcagagcttgcagtgaaccgagatcgcgccactgcactccagcctgggcaacagagcgagactccgtctcaaaaaaaaaaaaaatgcacttcctcagttgcatcagctacatttcaagagctcaataaacatctgtggccagtggctactatattggacagcacagatagagaacatctccatcactgtaaaagttcaattgaagagtgctggaatatacagttttaaaatacttaagaaaagaatctcatttttagaaccaagtcacttgactttttcttaaaccaagatttttgtatgtatgtaccaatttgatcttgaatttatttaaaaattttgaaaaaatgtaaagcatttcaacatttgacttttagtttcaaggacatcttataacaattcttttaatcaccatctgttttataatgaaatatgtctaaagaaggcaccaacttaaccttcttaggcagatgtccaatcaataggttgtcaaaggaaaggaactaatattcttcctgatagctagtttcagcaataataaattattttgtattttttttccaaatgtaggtttgattggacagtttcttgagtcagattttctcttgagtcagattttcttgtctagattttctcatcctaaaagctcatggtattgacatttttctcctgaatatgtagataggtagacattttgaatatatggttatagtaacagtatttaatgagctcaattccacttacttctgacaaataaattggaaacagaagagtcttttccatcattattaagggcaggcattttctccaaggctgtgaaaaacgattcctcttgctgcctaaggcgtttcaattgcaaaaacaatttaccaccatatggatccctccaggagacttcaactagaataaagagggaaatctactcccatggggactctggggtttttatggaagataggggcagagttcttggggattaattatagaaaacaagcccacacttcatcccagtcccctctgagggtaatgtgttgcccaacagacagcaccatggggtggctgaagatagctttctccatggaaacggagaacggatttatggtagagtcaatcattgctgcagaattccctggctattaatgccggtttcctcaggccttgctgaaagcaggctgagattgtactaggatgaaggggatgtaccagaatccttcaagactaacattatcttatgtgaaatttggcaaagggcttttagacaggaatgagatctctgatgtgtggaagatgtaatgacacaaatgtatcatgaaatgtgaaggcatctaaaggtacagcatggtgggacatagggtgggactgaaccaatgagcaacggtcatcacctgaagaatcattcttctctacttctttcatcccaawtgtcccagcaacatgagacaaatttcattcttaagctattctttcttaatccctcagctttttgctttggaatcaccgaaccactaatatcaagttcagtttatttaccttttagaaagttcagttgccttttagaaagaaagctattragtgcgttttataaaagcaatgacacatgctctatacatatacttggaaaggagtaattaatactttgattttttgaggtttgttatcctcagctactatcatgttaaacaacactcacttcaactgtattgttttcattaatattcatagattatttaatatgtcatctaaaataattaatgtattgatattctgagaagagttacataaaacattgtgggggattactaagatatctagcaaaatctgcctcaaaatccttgtacttgattgaaatgacacagttatcaacttaaagcccagcattcctagattcaatgaggaaaaaacacacttactgagaaattgttaatataatattaatagtccatcaacaataattttctaaaacaaagctatagattttcatcacagttcagtatacatagagactaatccagctaacagatgcaagcatttaatagttggcctgggttggagcatgaccttgaggaaggcacctgatttctctggttttgaaagtctgtctcctaaaaataaagtatggagatgtcatagtgaagagataagtctttgggggttgaataatgttctattagagtaagttcagtagaatttattgaaatattggtgagcactactgtaaaacagagaccagaagtgaagcagaggttcaagtccatactgtagcctggcctgttctgttgyccctggacccgtgtgtatatacatctgragccactgttggtcccacctagaccctgcatgtatgtgtggggtataagtcaaagaggatgcagtatttcaatgtcatttctgaaaaggtagctgatttatatggcagtcatcatagaatctaaatgaaagcattcattcttactgatttttacctcttgtaaatgaagaaacaaaagacagtgtaggccaactattaatacaatggctcaagcctgcaatcccagcactgtgggaggctgacatgggtggaacatcctcaagggaactccttgaggccaggagttcaagaccagcctgggcaaatatagtaagaagctggctctaaaaaawattcaaaaattagccaggcatggtggtgcacacctgtagtcttagctaatgggaggctgaggagggaggatcatttgagccaggagtttgaggctgcagtgagccgctatccaccactgcactccagcctgggcaacagagcaagtccctggttctaaaaaggaaacatacaaacaaaaagcatgtgcatgtgtgcacactcaaacacacagtgtaatggggatatgtgtcagaagccttgggttctaattcctgctctgaaggtggcgtgactccaggcaagttcttttacctaaataggcttccatttcctcatctgaaaactgaaactggatatggctgtggtccccactaaaatgtcaacaggaatcagatgcagcctggccttaagaagataaaggaatcatagtggggctcctgctgggatgytgaagactgtgagaaaatggagtccttgcctcctamtggggaytgttagtatgcagctctggtcagttgtctccagctggggatgcaggctctgtgttgtcatactatcagatttttcaagaaatacagaacttccgatttttatgtcaaatattcttgtatctaaatattggtaactgaaggattaaaaaaaaagaccagtgcgaaggccaaactaaacatctytatggggaatggggcctgtgccgctattctgtgaagtcggattagaagcctctggtctgtgcctactctgtggctctactggtggatggagaagggtgatctgtgayacagagcactaactctaggcaccactctactgactcttctttccgctttgtttcattaacatatgaacasagtagrgaatgaaagcaaccacagttaggggaatggatgcacttttacaaaaagrcagcacataaaataaatgctcttcgtgagtcgggatctggaggaaatggtagagctgcagtattgtcaatgaggtcaaggcacagagcaaccggaagctcagtgtgtagttatttccccctcggcagctcaggaggaacatctctgagttgattgcaaagcccaagccaaagaggaccccaaggtttctcacgagtccagcaaaaggygtggtgtcaatgtggatccagtcggggttagcacaccactttttggctatgggcacggaccacagcaggtcaatgttgagcaccctaagaagcaggtaaaagccaastgcaaacaggaagagaaagaggttggtyttcaggkatgtgcccagactggccgtttggatgcctggagtgtgttcaaaggcctctgccaccagcatgcctgaggattggaaagagacactgacaatgactgtgtgcccttgagcccctcgaggatcattcctctctgcattaaagatttgccacagttttcaatgacaaagggcattagacacagaggttctatccattttccaaagccttttttaggcagtaactaaaaatgcargtttgcccacggtgttttcattattcatactagtccagaaggatcgttctggagttggtggcactgactgacaacccgctttttagacagagcactgatctaggtrcttgcaattaacatttcaattgccatagccaattagcctttgaaaggtaaggtggtgctgaacaatggaaactgagtcatggtgaacactgcttcaggaatacaaagcagctactaaatggagtccgtaatcatgtaatagtcacttcacatgtttcagagagaatggcacagtgtgcagggctcagagtcattaagttccctcacgcaagacacaagcacactgtctgaagtgatggtttggragttagacttagctctawtttcactkcagaaaagcctacctcatgaagcaattgtgcatttacgccactgagattgtgccactttgtacatggaggctatgagaggtgtgttgtaccacgtcagctcccggggtagcatttagtatcagtgacttcacagaattacctctgaaattggaaagttgattaccggggacaatctgatacccttaaacataatgaaacyaaagctttcaaaggacacagctaaaggtaagtgatcatatttaccaccaattactccaagaataacttgatgaggaaaatgtgttgctaygaatactctggagatgcagacactgatttgaatcaaccaaaaaacactccaaagaaatgaccaggtcagtctaygatggaagaatagatacaagyrtaaaaagcaaagaaactggatcactcaaaattagagggggtgacatcagatgatccttctcagaagaatcttctaactgtgacatagcatcatgattctagaatcttttttttcaaaatgttgtttccacataccccataggatttgagaagttttaacagagatttctacatttctcaatgcattaaatttaaccagtgctatatactgagatttaataaatgttaaaaaggaagtcattttgacatccattaaataagaataactgttttaatggagtaggggaaattcaagtttgggggaattactaatatccagaatgatcaagaatgaaccatatatattttcacgccctgccctatgtgcctcctctctcaacctttctttgcttgaggaaaactcagtagaaacgcagctaccatccagatgaaaagcgcatgagcattccatctggggcaaattttttcattgggtttaattgcacagattttcaaaagtccttgtttcttgttttttttttttcttttgttttgggttttgttttgtttgtttttttttttttgagacacagaaaatagagaacaggggaattgacctataggttatacactttggattaaaaacagcaatgcacaaaaaacataaaaaaatattaaaatccaagcaatgcatgtcattgaaaaaaaaaagtgttagcagtattgagttctaggaatccttgaatggtttgttcctgataatcagactgaaatttggttatataaatgctaaggaacacagagaaatgaggctttgaaagaagaagtaagtgggataccaatgtggaagaagaataaacaagaatttggtaatgtaaaggtaagaagcacacactcagtaaaattttatagatgaagaaaatactgcagttataaaaactaaaaaggagttatgagaatttttttcttagaagaaacatattttttcaggtttggtcattggaggcaggaatacagtatagagaaaaggtgaaactgacctagattcctactttgaaaattgtctgtaaatagaaaatgctaacttttttacattatagcacctttttatgttgttgttttgggttgggcaataaatacattaaggcatacaggtcacagtctcattagaataaacttttaagacacccaaattcctttagttgtktgttttttatattatccaatactactctamcaagtggaatatgtgatagatcttgactttttttattttagaaaactttttaataatggcatatgttacagtatttttttaaggttaacttgcaaatctaatttcaagtcacctaatttatggctaaattggtactcaggattgttttaatgacaaagtatttcaggaaagaagagaaggaaacaacccaatttctaagcaactgtgagtaacctttaagttctagatctttctaaacattaagaaacctactaacattaaatctactaacattcaaatttaagtttgcttccagaatgtttttaattaaaaagtttgtgctctctataaagctggaatatatgttactgaaatcaaaagcattggctattcgaagaaggaagcataattttactgaataaactgatgcagtcaaggagaatgatgatkctcaaaacttccagttaattttaaagcaagggaatgtgcatgcaaaaatgtttccttatgctgtataattttagacgacttatttatgagttatcaaaataattattgcattttggaaacccagaggcacatttagcaagtcattaatcagttaaacatttccaacttgaaaagtggaaatagctatgagctaattaggctattatcttaaagcaaaatattagttttctattcattttgttattttgtctatgaaagaatagaataagcacatkttattcattgactaaaactgcactaaaattaatttttagacaagactttctgtattaaaaactgtcatattccagtgctacagaaactgcagcaaagctgacctgtgcagagtgatagagaacttatccatcccacagacagtgtggctcagggcagcggttaccatgacataccagacacaggatgcgcccattgcatggccagatggacttcctgcaacaacaaagtgtccgtccatttgaaaagtggttaactatcaagatcagaaatgaataatagaatagcatattccccatgaaaattatgagtaactcagaaaaaaagacaagacacaggctatatgtaatgtttagaagtggrtagaaataagaaaaattgagttaaattgagcctgagaaacactgtctcaaaaaawttttttcccagattttcaggttcattgaattccagaaatcaatatactcaaggctaattaagaactcaggcagttgcacccaaatctgccacagccctactcattcttcaatatttggttgtttttaattgacaagcaaaagtattaggttaatgcaagagtaattgcggtttttgccattgaaagtartggcaaaaaccgcaattacttttgcaccaccctaatgcttgtattggatcttcagttggcttattttccttgggctgagaagtcaaactctaaaggatatcattgctatgccagtgatttgctgattgacttacaaatgactgctgtgtactagcagctacttctatgcctatcttgtggccactgcagtgagaatctttgttttaaaacagaggatgaggagaagctataaagacggcattaatcctagcagaaaaagcctttctacttccagaatgccttttccatgctactgaattttttattagtttccttaaatgtcctcctcgatttttcacctggtagttcattcaaattaaataccagtctcttatttgttaaacaaagacagacctatttcttatctgcaggaattttcagagccttttaaaaactatgccttaaaaaattgtaaatctccccgagagatgcagtctttctttcttttctctctctctctttccagaaaatgtcttataaggtggaacacatgccggaaaggactggaattgaccacgataacatttcggtggtctcaaatgttacccatccaaccattcatccatttatcacactttggtttcacaaagataaactatgcatcatccctcccctgatggaacacccagtctaggcaatcggatatataaagaattagttaatatcatttagtgtaataagcgatataacagatgtatgtatacttctatgggaacaaaaaagacatattcagaacactcattaagaatttacacattctctactaccctttactcaaagttagtttcgaaggatgtcaactggcgagaatgttatgctatgtaaaatgatgaggtacaatataacacattcttataaattaaaatgtaatttttaaatatatgtttcaaaaaactttttaaaacagtcttagaatcaactatcacaataaagattttatactcatacagaatcttacctagaataaaaaagaagtggcccaagaakcctacttgtgtacagagaaaaaatatgttttaaagagattgttctagggttagaaatagtctttactggctatagtaacattgagaagtccttacctttcttacagaagacttgtctactcctccctcattcgtgagatactcggaagacctatagtaactttgaaagttgcttagcagcagattaaccaacatttctaagatcttagtctagttccttgagaatttgttctagttaactgtttcttgttttagtatcaagtcattatattcttctgaaaagtaaacaccaaatatttaatcactgggggagttttctcccaatctaccctttcataaataacaaaatggaatttgagtattttttttgctttgcttcctcattagtaattttgattgttatgaagttttagcatcctcactcatgagattttctttactaccctatataatatcagttcctagatgataaccctgtgtaatgattctctattggaagatcttcagtaactgsagcctgctgtaatagcttacctggacctgtttcacatgtagtagggaactgttcaaggcatggacttgagtgatttgggtaaatctgagtttcttggacccaccagtaaggtcgatgaccaaataatatcctgtatttaaagaattataaacatgcatatatatttaaatayacagctattatttaattggagattagcaattctttcctataaaaaatgactcaagcgcagggttaattgtgaaarttcatgattaagagactttgaaaaaacttaggtcttggtctctcacacattattaaaggtggtagccatttggtattttggcaccctggtttcccatgaacatgggggcttttttcccttgcagggaatgtcttatgggtgctttggatacttagactggaaatatcaaaatttgtccctagaattatcaatttgttcattatcacgctgctcatgtaagtaattcttaatcacagaatatgtgttacaggggtttgggaattacttataagtcattaaagtacacatttctggcctggcgtggtggctcacacctgtaatcccagcactttaggaagccgaagtcggtggatcacctgaggtcgggagttagagaccagcctgaccaacatagagaaaccctgtctctactaaaaatacaaaattagctgggtgtggtggcacatgcctgtaatcccagctactcgggaggctgaggtgagagaattgcttgaacctgggaggcagaggttgcagtgagccgagatcacgccattgcactccatcctgggcaacaagggcaaaactctgtctcaaaaaaaaaaaaaaacaaaaacatatatatacatttctgtgccttttaaaagttctacttatgaatctggtgtttcaagttacctggtatttttgaaagattttccaagtaaaacgatatacatctgaaatgtgatcattatgccgaagtcacaaatttaaggataaatcttaggaaaaaatgaaataaaacagaaatcttaccatttaaatataagatttaaccaatccccaatgactgctacccatatcatcttggttccaactgtctgattaaattgaaaacaaagtggaaaataaatgaaaaagatattcctggggtctccaacattggacataamatttaraaaagtgtagtaagctcggtagtccttctgcaaatgctgaattatgagcactccattcctgtgaaggaaatccatcttgaaaaagaggcaattctaaacatagagcaattggagctgaagtgctctgattcccaccgtttttatactgtgcctttgtggcatgtcgagccattactgcaacatgtgatgctgaccatctgtggagagggcacaccagccctcctctgctgaatagctcatctatttatgattttaattggtggcaaagagtgaagtacatgctgatctgtggcaattcgagggggaaatttggatagaaacacaatgaatttcttatgcaacctcccttttgtgygaacagttggatcrtgtttgyttgaaattttttgtacagttcatttcctccaaggtcagacattagcaatttctatgtttggtgaaaagactttgcaaataattattgcatgtcaaatagcccataaagycctgcattttaatttaagataggctgtggctctctattttatygggtctttgaggaaaatggttgaataaatatctgrgtatgaaaaatatatgatatgacagattatgttctgatcactgatttaaaataagaatagttcaattttctttatccaagagaatgatagaatatatatggaacagggaaagaaatgtgttgttttttgactataagacaagaaagcagaaatgaaagtcatttggataatagaaatgtgttaggatcaaattgtatcttttattaactagagaatacagttgaraggaatagggaatgattcatgtgacaaagataggaatagacatcaaagggcttttgaccaatcaggaaaatggtttgttgagaacagagtgttaaacagaagtggaaagcaccaaacaaatgctaagaatgaacagaagggtagcgcaaagaggctgtggatctaagtcataggtccataatctacggctgtggactaygactagactatagaccaggactctggtcctggactatagactacgactggaccctggactatggaccagggtagactgagaatgaacagaagggtagcacaaagaggctatggatctaagtcagagagatgttgggtttagagagctggattgtgtctaggattagtgggaaagcaacaaagcctcacaaggtggccagggatggatctaggtaaccttacttgttattttgtcattcagatttttgtctttgcttaccatggcctaagtaaagacaaaagacttcactagagtccttcacaggctataactatcactttgaacttctcttcgagttttgtgtcccatcatttaacagcaccattgttactgggcttcagtgtctattggtaccttacctggaagaaatgcattgactgaccattaacatcttttggggtgctttttaaattgccataactgtgttccacctgagatcagttatatttctggtaatggaatttgggcattggtattattaaaatacttctcaagtggttccaatgtggtataaggggcttagaatcattgcactaaggcaattcatayaaggaattatccttgactaattagagtctatgcttctggcttttctttgttttgcatattcaggttctgtaatttccataatctctttaatgagccatgaggaagagcataacttccctttattctttttctaaaaagtgtttgatctacgtaattcataatactcattttcttcagaaatgtcttatccttaaatcaggatgtgaatgatatcaaatacattttgtcttccamttaaaaattaaacttcctgctcttcagcacctcagagtctgtgattagcytttcatctatggtagttaatttagaaagattttctctcgagaactacctggttctgtagactgtgggataattaagtgaagcaaaagcatcttgatttctttcaccctttaacagcatctgctaatctgcttattcctcgtagttcatcatttttagtcttttcatatcttagcttctatgcatccatcggtgatgccttctctgaccagcatcctcaccactcctctgacaatactttctctcacacactcttttctcctagggggttgtttgagtctgctagggctgctataacaaaataccagactgggtggcttacacaacagaaatataggaaactaggagtctgaatcaacgcgtcggtggcgttgatttcttctgagcctctgtccttggcttgcagatgactgtctactctctatgtcttcacatggtcttccccgctatatgggtgtgttctaatctcctctttttataaggataccagtcttattggattaaggaagatactaatgacctcattttaacttaatcacccctttaaagaccctatcaccaaacacagtcattttgggaggtactggggcttaggacttcaacatgaatttgagggaatacagttcagcccataaccgggagttaaacacaatttataattatatatttatgacaagtgtatatatttagcatctctctcctgtactacagtataagctccataaaacaaggggtcctgtccactttgtgcaacagccacaagcacagttcccataacaggcccgtgtagaagccaattacccatgaagctggaaaagttcgcacgggcgcctaagatggtaggttgggccgggcgcagtggctcacgcctgtaatcccagcactttgggaggccgaggtgggcggatcacttgaggtcaggagtttaagaccagcctggccaacatggtaaaacaccatctctactaaaaaaaaaatacaaaaattagctgggcattgtggtgggctactgtagtcccagctactcgggaggctgaggcaggagaatcgcttgaaacccgggaggtagaggttgcagtgagccaagatcgtgccactgcactccagcctggtctacagagtgagactctgtcaaaaaaaaaaggcaggtggttactgatagtttagagtgcattcacgagtttattttctttttattaaagagagggcctatrtaacaggggctttatagaggggcctatataaagccatttaacaggggctttagatttcacaaaacctggaactgcccctgggyccatcatagttatttagtaaatgtttattgagtgaatgaattattgaacaaagttgatatgagtactaaattataaagagcctgtgttttaaaactatgttatttggttagtgcaaactcaaaatgcatttctccacagagatcatgttatatagtggcaatgtcaagaaagtgtatttaaggtggagaaaatatatataatgtgtattctagaaagggctaatatatttgtatgtgtatatgtgtgtgtgtgtacatacatatataaatatgtatgyagatgtgtgtatatgtatatatacatatattagccctttgtgtgtgtgtgcatatatgtatatatacaattatatatacatatataacatatatacacacacatatatacacatatatgtacacacacacaaacacacacatctgcttatgattaaatagaagaataaacaattaaaaaatattttggccaagcatggtacctcacatctgtaatcccagcactttgggaagccatagtgggaggatcacttgaagccaggagcttgagaccacctgggaaacgaagcaataccccacctctatttagtatatatttattttatatacatttattacatgtgataaattatataatttatcacatgtaataaattatataatttattgcatgtaataaattatatatatttatcacatgtaataaattatataatttatttatatataaaaatacataataaatatatatctatttttatatatttatatttatataaaaatatatatgtaataaataaatatttattatatgtaatagatatttattatatgtaatagatatatttattatatgtaatagatatatttattatatgtaatatatatttattatatgtaataaatttatatatttattatatataaaataaatatatttttaaattctgtaaaggaaagaagagaagagagtagagggaacagggttaaaaagtagacttctttgaacatacttattttatagatgtgactttgaaaccatgtaaatattttacataactatacaacaaaattaaaattaagatgtgattcatacaaaattttaaaaaygaaagaagtgaaaacaccacttgatccattatactggtgagctattcttcccagcacttacatgtattttatgatttgttyctgtgggaaatctctttctacacatttctttagtcctcctcatctaccgtctgccactcgagttgccacggcttagggtggggatgttcctgtatcctatgtgggccccagcagtagggagatagaggaagttggttctttctgacactagtaatcttccagtggagctcttccctccaatgacacagcctgcctgacaagctgggtcatttcaaagccaaggttgttagagtttaagatctgtccaaaatcagtttaccaaatgatggaacaaagtcacattcaacctacccagaccaagatccaaaagagggtagatccacctgactcatcctctttttgaagttgtctttcctaaagtgtgacctgtggaccaccttcctcctgtcacctgcatgcaatttccaggcccactccagatcacagaatgagacattttggaaattaaatccagaaagcgttttagtaaggtttccacatggtttctatacacattaatttttagaagcgctgtcttcattcatcattcccttgaaaggtacccctcctgtacctcctgtgcagagctggcctcttcttgtaccactttctcaacttctaccttaagtcatttttttttcatttgccttatttggggttctgtattattccactctttcccatggatgcaggcgtggtctgtttccatattcttccttttagatctcctttttattatctttttttaaggcacatggtaaatactcaaaaaatactagctataattaatattagttattcctattttgccaaatagtctgtaaatgtggaactgaattcaagctctgacattcttgatcagagtagaagtagggtaaagygatacaattttgctcttatacacaattcttatgttgcttctcttttgtactctgacatctctgcctctaccccactctctctgttctctcctctcttttcttctccccccaccccacctctcactctcttttttcctctatcctggctccccttttttcatactaatatttagtcatctaagtgttttaattggtcactgtcaactccaacagagcagagacragtctgaattgctcactattgcatctgggaatccagccaaatgccctacacattaggagatggttttcaaaaattatacagccagccaccattcctgactggatcacctccttttcttcctgctatagtagaactctccatttgatccctccaagtgttcaaggacttgaactctgctgtgttagaaaaagcacttttggagtggaagaaatctttatgagtctgtgctttggggtctaaccttagccagatctcttcagtcaccaggcagtctataacgcaaattgatttatttaggggtcagcgaacttcctaaaattgcgtgcaaaatgtttgtgcttgtacgtatctgttggaagaagccacaattttcaccagattctcaatggaatcccaagcaaattaagtacagcgtgaggttcactggaatcccatgcgctatccgtggggcctatacccaggatcctcccatttccccagtttcctcagagatatcttcataactccatccaccccagcatgagtttcttgtcttaatgacgtccttcctcttaatgactgtttatttcttaaatatgttactgctatagtcggtcccccaaccctatgctgctgccttgttttttagttcatccctgtagttgaatacttccagttctttctagaatgttctcattccgattcatttaaatttttctgagattttgatttacagtaaatccctacatgtattacatagtgggacagaggatagaatttctccaatatgtttcaccacatcaaatattatataaccacaagatatttcttattgaaccattcatgtctggattatagtgcttgctacarttcaacaccattcagagatatttgactttagcttgtgttacttatgaggtggcagtaaacaacaatatattttgtaggcattgacctttaatgtctctgcatggtcrttatccttttaccacaaacttawctgccttttctaaaataaactatttgagatctctccagtgtcaccttgcaatttaaaatggatttatttcagatggaatttagaccctagtgactttcagaaaatcattaccttcagtctggctagcatcccaggaatattggcagtccataatgacactgttataaatggccctgctacagctctttgaagtacccccctccattagtcttcttagctacttttctctagaaatgatcatgacctatacatctatacactttttcttggattaccaaaggacccaacagagttgcctattgagcagtactattaactttcttcaaagtagagttaatatattgtatagctgtgttcatttttatagatgacttaaaaagtactgtgtagagaaattgtgtaaagcagtggctctcaaaytttaatattcatccaactcccctgaagggcttgttaaaacacagatttcagggactcctartctttgattcactaaaaatagagtggggtctgagactttgtatttctaagttcccagataatggtgatgttgctgggtggagaacctctcacttttgagaagcataagtctagacactgactcttacgagtaccacacaggacagagatagatcagacctcaagaagcttgtggtctagtagggaagatatgatatttacataaatcacataccattgtgtccttagaggtgaacagatagggtgaatggaaaaaaggaaaggcagacaactttcagtctgtgagattagggagcttttgtggaggagatggcaagtggctgggccttgagatatgagtagaatttagaaatgcaaactgtaggatgaaagggaaaaaatattcaagaatrtaaatgagataataccattatcacacctaaagacattaacattaattgattaatgtatttaaaagctgtaaaagaaatcctcatttttgacatttatgagacaatttaaaaattgtacctagagtagtcagattcatagagacagaaagtagaatggtggttgccaaggtgtgagggraggaaagacagatttgttatttgatgggcagagtttttaataaaaagagttctggagatgaatagcggtgatggttccataatgctgtgaatacactcaacatccttttactgtacacttaaaaatggttaagatggtaaattttatgttatgagtattttaccataataaaaataacctggatatttttctgactatattgaatgttttctcagtgcttgggaaatgtagtcttttttcctctgaagctctgatatccttcatcttttatttttaattttaatacttttattgagttataatttatatactataaattatagtatataattcctcattatatttagtatatttataaagttgccagtaattgacaaaaaccagtttcagaacatctccagcaccccagaaagttccttcatgcatgttggcagtcagtgcctgggtctgctcccagcccsatgcaaaaactgaactgctctctgtgtctgggaatctgccttttctggttattttatgtaaattaaatcatagtatatgtagtcttttgcacccggattctttcacttagcataatgtttttgagtagtttctcatgaataaatgcttcttagtttgctgcaatctgttagtcaacttccrggtcacttaaattgttgtttttgataatttggtccagttttatagtttctttttgggggataaaatttggtgacttccttctaccacacagatycaaaccayatcagacctccagcatagtggtgggaggggattggatcatgagggtggatttcttatgaatggtttaataccatcctcttggtactgtctttgtaacagtgagtgagttctcatgagatctggtcatttaaaaatgtgtggcacctccccctcctcctgacctctcttgctcctgctttggcacatgaagtaccttctccccattcgccttctgccatgattggaagtttcctgaagcctccctagaagcagatgctgctcttcttcctgtacagcttgcagaccatgagccaattaaacctcttttctttataaattacccagtctcaggtgtttctttatagcaatgtgagaacagactgatacaaggtcccagcccttcctccattttattttatttttttaattctaggaaggagatgaaagagtccaagtgtaacctggcattgactccactttgtatactgtactttatagcaattgtcagaaaacttgctttcttaaatcatctattgcagtgtttgacacaggccattcagaaatctagaagattgaaagtttctgttcaagaatcttttcattttcaatattgtaggtcctcaacctggaatctgcaagaagagactcctcttttgaattcatagtaacttttaatttttcaattttctcagtgaatggatgttgaaaatataaatgtgaatgtcagcataaatgtgaatgtcgtaaagagaaccttatacttacaggtggggaacttatagtctaaaccatggcattattcacgatcattcctatctttagctctgccccccaagatgcaaagtatctacccagcaagtgtatgtgtaatagaggacaatgatcttttatccttatacsccattatcattcacccwttggagaaagaattaagttttcaggggaggagcaatggagcattcaatctgagcaagactataaccaccatccagaaacacctccagcctgggaacatgtggcatctttctattccccaccctgcagaaacccaaccctgggtcacagaccgtatatcccagagaaggcagtgctcagctcagtacctggcacaaaatagaaactcaataaaccctggttggtttgaaatgaaaggtatgtaagtatggtggtggtggtcatggtggagttgtgtgaatgataatgggtcggggggtctgttttcccctttttaatgctgagaaagctgaaggccctattctgtgtactgagcagaaagaagagctggttgtctctagctatccttggggattagagagaaattattcagccagtctttcrgaaatgaaaattttgacaaacgacaaacttcttcctcacatcctggttggggaggagcactcacagaataaaaaacaatagacaacctgaggctgccctaaaaacagcacattggtagggcaatcactcccctcagctgaagacccaaagagagcaagaatcttcactgaacagtctgataaagaccagtgtataaacccagtgaggaattcatcaacatggtaccaaatcagccctcttccatgaatcttcttaaatactgtcttcactaatttggtactgagaaaaccctaaaaatgagtaccagcactcaatcagctgaaattctgagatgctcaactcataaaattttgctttaaggtaaatagtatcagatatataaaattagaagttcttgggaaaatatttgcaaatgaaaggagatttatcatagtaaactctatgtctaactgtattaatagcagtctctaggctgcaaggtgacttttgggtatattgtgaagtgttaaataytyataataacttgtyctgatttcataggtcttaatttagttcttggataaagaatggctaatatctggtcctctgagaatgttttttacatatttacttcttgttggtgtttgtattgttgatgaaaatgaaaagaaactagtatagtaaagaccttttggtgtataataagaggctttattttcacaaacatatcatagtctaagattaaaataataactttgacttcattattttagccaactttattttccattcttcagaaagcatattctctasgttctttccctagttttctttcttcctcagctttaccaagaaggattcaaataccgaatctatgtcacctttcagagtttctggacaacgctgattccctgcagcttgtctactctggcaaatcctagttgaataccttgtgcctcattcctgtcctcaaggaaatagcaggtgattttgatagtgctctagtttcttccacttctgcaagatagtaacatagtgttctattaggcctcaaaaacattgttagagaagctgggggagtagaaaagaaggaatatttttgtaagcagtaaaaacctattctgaggaccatctgaatgtttctgcccactcacaattgaagtcaactttacaaggtgaatacaaagaagaggatgtatttgttgcaaaagatacgattaaaggtcaatatctgtatttgttccagaaacctttatttgaagccgataaatgacttgtcgtgggcgagcccttcgggtgctattaatactttcgggtcacagcggagactctggctgttgttcagaaaagaactacgaatcccagaatgccctgttcccccattttcccctcgagaatccaagggtgagttcaaccaatcctgtcaaggagagcctgcgctatcggccaatcagaaggccagcctgmgcctggaggcgggtggcgggaagtgcactaggtttgaaatcggaaagttggcggggctgcgggagcygagcctagagtccggctgttggctagagtgggcgcggatctggtgtggggaaggcggcgggactcaggcctgcctgcgaaggtaagggagttgggcgccgasctgggctccttggcccccctgtcgcaataagggaaagtgaatttgagggcgggatgtgtgtatttgcggcggcgtttgtgaaatgcgcatcttgttgctgtttgggcctcacagcctggtggggtgggcagctgcgaacccaaagcgttctgggtttcactgcaggaggtatctttggtcctcctgggaaggttttagcgtcgcagagtactggtgggtccaggattctcccaggacctccttttacagaggatactgaggcccgaggtgacttgtatacatcctcgacggaacctactaaactcccaccttagtccctattttactgttaacttttactgttctgaggtggaggagagagacaggatagatgtgtggggtcttattctatgggagggtgccggccacctggctatcctgatgatctctgttcagaaagggttagagttggatcaggggtttcagaagtcaacagttttacttgtgagaaaatggacccagggtcatagtgcgtgtgagtgtcctgtgcagttacacttacctactaacaagctgctaggaggtaaaggtgtcctgaattattgctgcacgktaacaacagttaagcccaggtggcttgatctacccttgaatacctagaattaaagataagttgctattttctagcaaaggacaaattgccaaaatactgtatacccgattggaatatgtgggtgatttgatttcartaacttaaaaaatgcaatatgtattctgtttttagcattgtcctacataatggtagaggacgaactggcacttttcgataaaagcataaatgaattttggaataaattcaaaagtacggacacctcctgtcagatggcgggactaagagatacctacaaggattccatcaaagcatttgcaggtacctagtgttaacttgtaacatgctggttttgctgttctagtttattttttagtgttattgcagctgaattgaaagttcaatttctctttcagaaaagctgtctgtgaaattaaaggaagaagaacgaatggttgagatgtttctggaatatcaaaatcgtatgtgaaaaagtataaatcatggggttttttttagataaaacatctttatcatgaaatctctcatacaagtaagacaatgtattttgtgtacacaagtgtgtatatgttgtgtgtgtgtatatatatatgtgtatatatatgtatatatatgtgtatatatatatgtatatatatgtgtatatatatatgtayatatatgtgtatatatatacatatatgtgtatatatatacatatatatgtgtgtgtgtatatatatatatatacacacacacacacacacacacacacacacacacgtacatgtagtggctcatgcctgtaatcccaacactttgggaggccaagttgggtggatccctcgagctcaggagttgaagaccagcccaagcaacatggtgaaaccctgtctctacaaaagatttaaaaaaaaaattaaaaattaaaatatatatatayacatatatatagacacatacacacacaaatacatacacattaacacatatacatgtgcttatatataggaataaacattgacatactatacagtttaagaaagaacatcctatgttacaccttctcccaccttccacaactaacctatcaatatattgtttagtattgtgggggttttttgtgtcattttttgagacagggtctcactttgagacagagtctcgctctgttgcccaggctggagtgcagtggcgcgatcttggctcactgcaagctccgcctcctgggttcacgccactctcctgcctcagcctcccaagtagctgggactacaggcgcctgcaaccacgcctggctaattttttgtatttttagtacagacagggtttcactgtgttagccaagacggtctcaatctcctgacctcgtgatctgcctgcctcagcctcccaaagtgctgggattacaggcgtgagccaccgtgcctggtgacagagtctcactttgtcagccaggctggggtgcagtggcatgatctaggctcatttcagcctcgacctcctcggctcaagtgatactcccacttcaccccctaagtagctgggaccactggtgcacaccagcatgcctggctaatttcatattttttgtagagatggggtttcaccatattgtgcaggctggtcttaaactcctgggctcaagcagtccgctcactttggctgcccaaagtgctaggatttcgggtgtgagccaccatgcctggcctctagtattgtgtttttgaatgttatataaatggcattctcttgtatgtcttctgtccattttttcactcagcactatacttgtgagatttgtcagtgttaaggtataaatgccagtattttttaaaagatgagtttgttttcacgttggaaatcacagcctggggattgaaaagctagagttctctcagctctgttagtactctgacagtgtttttctccatatttttactrctattcttgccatcttatttctactactctccaggttgtccagagtaaaccagtagtttttactgaattcttacacacaggacacaaacatgtgtccacagttcaaattccactagagatacttggtttaaaggcaccatgttttaaacaatattagactagaatgtccttacatggggcatatgttctttcatttgcaaaatgggtagccttgacttacccactttactcattgtgtggcccatgaaggcatttgactttgttaccccagtaggttatttgctacacttttacccatgtttactttctttctttattttctttctttctttttttttttttgagatggagtctcgctctgttgcccaggctggagtgcagtggcaygatctcggctcactgcaacctttgccttctgggttcaagtgattctcctgcctcagcctcccaagtagctgagactacaggtgcgcaccaccacgcaccactaattttttgtatttttagtagagatggggtttcaccgtgttagccaggatggtctcaatctcctgaccttaggtgatctgcccaccttggcctcccaaagtgctgggattacaggcatgagccactgcaaccggcctacccatgtttactttctaatctgccctgaagcttccatgcccttcactgcttctctcattccctctgtaaccataagcaaaaaagaaaaccacttttgtttgcatgtgtgtgtgaaagagtgatattgagtttgggttctttaaaacttctttgtaggatccctaggcattagaaaattaagtttggaactgtcagttttactgctgtgagtctcaaactgtgctcttaaagattatctatagtatgaagttatgctctatatagtctaaaatctaaaagcattatcaatatttttcttttaaaaatcagtttatacttggccgggcggggtggttcacgcctgtaatcccagcactttgggaggctgaggcgggcggatcacgaggtcaggagatcaagaccatcctggctaacacggtgaaaccttgtctctactaaaaatacaaaaaattagctgggcctggtggccggcgcctatggtcccagctactctggaggctgaggcaggagaatggcgtgaacctgggaggcggagcttgcagtgagcccagatcgcgccactgcactgcagcctgggcgacagagcaagactccatctcaaaaaaaaaaaaagaaatcagtttatacttgaacagaaatacagtttactcaagtttaattaattcaatgaacatatgactgctattgcccaccactaaggagacaacagtgcataaagtataatctactcacaatattgtgggggatatagatagggaaaccacaattaaaatatattgttccaggctcgatggctcaagccaaagtaatcccagcactttgggaggctgaggcaggaggattgcctgagtccaggagttcaagaccagcctgggcaatatagtgagamcttgtctcaataaaaattaaggaaaaattagccaggtgtggtggtgggcacctgtagtcccagctactcaggaggctgagacaggaggatcgcttgagcccaggagattgaggttacagtgagccgtgatcatgccacttcactccagcctgggcgacagagtgagaccctgtctccaaaaaaaaaaaaaaaaaaagattgtattcgttgttagaataatgtaatagatgctgtgtgaggatagaatctggagggtttggttcttccagtgaggaatgcaggatatttaatagctaaccattaccttgtataccatgtgctaagccctgttctaagctctttgcatatattgactcatgaatcctcacaacaaccctaagaggtatagatactgcttttttatgacaaaataagcacagagaggttaagcaactttctcaaggtcagatagctgataatgaacagaaatatgatttgaacctgcrgtctgattataccacactactttggagaaaatcacataaaggagggttagggatgttcaacagagtcagcattacattctgggaagagggaacagcacatggaatatggcaggaacatgagagcttgttaagttctgggatggctagagtaccctgtggatggggagtggtggagaagtggctggaagaactcgttggccagatgatggacattccatgttgtgcaaagggggttagactttgtttttcaggagataaagagttgctacaggatttcaacctggaaaatgatattggatttatatgccagaagaagcaatctagtaatcatgcacaataaacaggaggggagtgagattgttgtccataaagagaccagttaaaggaaaaatttagtgtaatagtacaggcacataatgagtatggcttggaccagtgacaggtctgaagagttagactcaagactgtgggcctgaaggtgagagtatgctgtggtctaggatgattccttctgacatggagtatgaatcagtggtgatgcatttactaagtgagggattgaaagagaggaggagcatgtttttataggtgggaaggaaacatatgtgggttcaattttaaacatgttgggtgaatatgctgagtttattgtgcagcaagtcttcaggtggcgatatctgataggcaatggatatattcatctggaagccagccagaaaagtggtctttgctgaagatagggatttgtgagtctttagtgtatttagggggttgaagctgtggaagaatatgtagagtgaaagaaggtagccttggttagtaataatatttatttactcattactgtgtgccaggtactgtgctaaatgccttacattgaccacctccttcagtcctcatgatagttctccagggttggtatcatttwttattattattcctacttttctgatattgcagtcccagagagattatgatttgccccagatcatcagattaactccagaagccttactcatcttcagagcattacatttcctctccaatttgagagagttaaatggaaacgaccaggaaagacagaattcgtaattggagaacagaggaagtaagagagaaggtcaccaaaactaaaagaggagagaaataataaagggtgttgttaacactgtaagtcacaggtagatccagtaaggtaaagattgagatagatattttgggaacaagaaagatggaaggaattcattcactgaccaaatacttgttgagctactgctgtataccaggtaatcttctaggaagatactgcagagaacaaaatagcytaaagttctggagccataaattctaattatcacaagaaggaagatcatctattgaaagtgagaggtatttactatgggcaggcttttacattattataaatcctgaagtctgtctaagacagagattatccctgttttacagatgaggaaattgaagctcactgaggttaagaaacttgcctaaggtaaatagaggatctaggatcacaatgatagtgtctgtgctctttccattgtgctatactgacgtgcattggagtgaaaatgcaaagaagggttcctctggtgtgtaggagtgaaagtttgaaatgtcggtcctgggaataagacagcctgctatgtacacatgtaataatagtcacacagcaggccaggtgcagtggctcacacctgtagtcctagcaatttgggaggccgaggcaggcggatcacgaggtcaaaagatcaagaccatcctggccaacatggtgaaaccccatctccactaaaaatataaaaattagctgggcgtggtggtgagtgcctgtagtcctgtctgctcagggggctgaagcaggagaattgcttgaacccaggaggcggaggttgcagtgagctgagattgcaccactgcactgcagcctggcgacagagcgagactccatctcaaaaaaaaaaaaagaaaaaaaaatggtcatacagcatcgaggactcctatatttgtattggccacaaatcacacagttcttcaaatgttataataaaaacactctcatatgtggtatttatgtgtcactagtttaaaagtttttgtattattattactggatactctaaccccagtgaatgrggtagccaatgttatccccattttacaaatgagcaaaagagtttcagaagtcgtgattttgaccgagatctttgggtaagaactgataagctgaatcagacttgagacctttgactttcaatctgaatttcttgtgtagtacaattctacttaatttttttctttaaatagtagcatttttctttctagtaagatgtttatttttaaattatacttgacrtaatatatgatcatgttcatattcttagaacatacagaaaagcaaaaaatatcacctgtaatgttgagaaccatatttaacaaaacaactttctagcttttgtttttcatgagctatgtaggtttttaacgtaattatattcatggtatctatataactatctttttttttcaactttgagaatattttcccacattgctaaattgttttgaaaatacattccatcttatcgatataccatattttaaaaatcatttgcttgttagccattgaagatgttttcagtttttcattataaatactgaaaaataatttttatatataaatatttgcacgtatcctatttccctagggtaactttgtaaaaatgaaattgctgggtcaaaggaggtaaatatttttaaggctcttttattttacaatgtcaaaaatattttctagaaggaccctagcattttgcattcctctcaatattagtaattatttctgtaaacattgttgtaataaatgaaaattgaaatcttactgttttacttgcatttctgtgattaatctgaggttaaattatctttcatatttattagccatctgcattctgtgtttcatctgtttatccctttgtctgtttttttcttaggaatttgtatttgtgtcttcctcttgagattaaaatggtaacccattgttggaggaggataatttaatgggcaaagcattgcctttgaagtcaagacctgagtttgaatgcagtctgtctgtctgwttatttatttatttatttatttttgagacagggtctygccctgtcaccaggctggagtgcagtggcgtgatcgcagctcactgcaacctccgactccctggttcaagctattctgcctcagcctccctagtagctggaattacaggcacacgccaccacgcccagctcatttttgtatttttagyagagacgaggtttcaccatgttggccaggatggtctcgatctcctgacctcatgatccgccagcctgagcgttgcaaagtgcagggattacaggcgtgagccgccatgcctggcccttattatttattttagcctagcaaatacagctttgggcaagttactgaactgctgagtgtttttcctcttcttttaaaaaagtagtaaaagactaaagaatttattttggatttcggcactgtttagagaataatctacctcttgaacattgatttgatatttcatttatcatattaacttcctaactgycaacgtttgtttggcatatcttttataatatttagaagcataaaatatctcttcatatatccagatcaaatatgtgtctcagacaagctttgcagtttttttcaracagagcctacatatttcttgatctaggttgattctgaattttctgtttgttacctctgtaaacgagattttcctgttgcctgaggaatgcttgtcttgagagatgttgttcaagcactgagaattccatgctcwcttcaatttgggaaacakatcatagtgtatttctcttttgaagatttatggtatttaaagtcttcataaattcagtgatggactaacttgtttaactttgagaaaaagattactcatccttggagcacatatttacttgtaattatgatactggaattaaatgacartatagatagtttggtttatttgatacaattctagactactggcattaattggcattcgattttaaagtgtttagatttcatttaagtattagtaaaactaaatctttaattcagaaattcataagcacattataaagcaccacttgagctctactggctctgcttatttgacctcagtagcctctgccctagagctcttatgctttttgtgccttcctgctttgtctagccccctgattggcattttggggacaccatctctgtgcaatgggccccaagtagcagcggttgtatctttcttccaacaaacagaggaagaagtggycctgccagggttactcctttcccagcagagaggtttggccaggtttatgcacaggcattgytgtttttattttgagcatgtgtgtgagaaaggggtgggtagttgcagaagctgagtgtttaagagggctagggcaagaagaacttgtacagagagtgacagggacatggggaaggcagggaaggtagagagattaaagccaagaaggagtaatgaggtgctggccaatatgtgagacagatgtaaaaggccagtattttggtacatggataccttgttttattgcacttcactttattgcactttacagatattgcaatttttacaaattaaaggttaatggcaaccatgtgtcaagcaagtctgtgggcaccatttttccatcagcatgtggtgacttcgtatctgtcacatgttggtaattctcacaagatttcaaacttgtcattattatatttcttgtggtgctctatgatcagtgatctttgacgttactattgtaattgttttaagtgccatgaatgacacccatataagatgacaaacttaatggataaatgttgaatgacttctgactgctctgctgaccagccattcctgtcattcttcctctccttgggcctccctagtctccagtattgaaattaggccaattaataaccctatagtgacctctaattgttcaactgaaagaaggagtcataggtctctcactttaaatcaaaagctagaaatgattaagcttagtgggaaagtgtgtcaaaagctgagataggctgaaagcttggcctcttgcgccaattagcaaaagtgctaattcagtgaacacacgaatgataagaaagagaaacagccttattgttagagaaaattttagtggccttaatagaagagcaaacaaaccacaacattcccttaagcaaaagcctaattcagggtaagactctagccctcttcaattctgtgaaggcttgagaaagatgaggaagtttcagaagaaaagtttgaagctagcagaagttggttcttgaggtttaaggaaagcagctgcctccataaaataaaaatgcaagatgaagcagaagtgctaatgtagaagctacagcaagttatctagctaagatcattgaatgaacagatcattaaagaacggatttttgatgtagatgaaaaagcagttttctattggaagaagatgccatctaggactttcatagctagagagaagtcaaggcctgctttgaagcttcaaagacaggctgactctttagtgactaatgcacctggtgactttaagttgaagcctgtgctcacttgccattccccaaatcctagggcccttaagaattatactaaatctactctgcctatgttctataaatggaatagcaaagcctagatgacagcacatgtgtgtatagcatagtttactgaatattttaggcccactgttgaggccttctactcaggaaaaaagatggctttcaaaatatttctgctcattaacagtgcatctggtcactcaagagcgctgatggagattagtgttgttttcatgcctactaagacaacatccattctgcagcccatggatcaaggggtagttttgacttwcatgtctcattatttaagaaataaggttatagctacccaaatagtgattaactctgatagatctgggcaaaataaattgaaaaccttccagagaaaggattcaccattctagatgccatagaacattcgtgattcacaggaagaggtcaaaatatcaacatgaacaagagcttggaagaagttgattttaaccctcatggatgactttgagaggttcaagacttcaatggagaaagtaactacagatgtggtrgaaatcacaagagacctagatttagaagtggagcctgaagatgtgaccgaattgctgccatctcagataaaacttgaatggataaggagttgcttcttatggataagcaaagaaagtggttttatggaatggaatccactcctggtgaagatgctgtgaacattgtttaactgacaacaaaggatttagactattatataaacttagttgataaagtagcgcagggtttgagaagactgactccaattttgaaaacagttctaccaggggtaaatgctgtcaaacatcattgtatgctgcagagaaatctttcatgaaagagttgattaatgcagcaaactttattgttgtcctattataataaattgccacagccaccccaaccttcagcagctaccactctgatcagtcagcagccatcaacatcaaggcaagaccctccccctgcaaaagtttaggacttgctgaaggctcagatgattattagcatattttagcaataaaatatttttaattaagatatgtacatttgttttttagccataatgctattgcacgcttaatagactacaatatagtgtaaaataacttttctatgtactgggaaaccaaaacatttgtgtgacttgctttatggcaatattcgctttatcacagtgatctggaatagaacttgcaatatctccaacgtatgccagtacttaaaaatagcacagaatagcaaaaactaataaaaccaataaaaacaaagaacaaaaacgaatattgcagctattaatattagtataaacatctattcttacctatgtattaatcactggtgttatgtacaaaaactattgatttttttggkgtgtagtaccacaaattctgataggttttcagtagatttttctgagtattctagatagatgtctattgtctacatataatgaaaaatagttcttgttttttccttatagttttaccagctaaatatcttgtcttggccagaaacttctagggaaatattaaataacagtgctaactggcatctattttattccttttggaaatgccaaatatatatkatgagatttgaaaggtttttgatttgtttctatcatgttaaatgtccttccatttatagttaagaatagtcaggagtggatgctgaattcatatgaaatgtctcttcaattcttattcatgtgatggattttcctaatattacaccttcactatgtaaaatccttggtataaactatatttgctcttagtggattatttttaatgtaacttaatattttattgagcatctttgcacctatgtttttaagtgagattagtttatatagttgtgggcagagggccagtgctatctttaattttttgttttagctttagaattatgcttacattgtaagctttgcctgcccacctgtcttccttcacttatttctgtcttttggtatgttccggaataatttatatagcattagagtgaggcttttcctcaaagcactgtttaaaaccatcttctagagtttggttgttggccaggcgtggtggcttgcactggtaatcccagcactttgagaggctgaggtaggaggattgcttgagcctaagagtttgagactagcctgggcaacatagtgagacaaaaaaatttaaaaatcagccaggcgtgatgtggtgtgtgcctgtagtcccaggtactagggatgctaaggtgggaggctgcaatgagtagtgattgtgccactgtattccagcctgggcaacagtgagaccctgtttcaaaaaaatataaaaataaaataaataatagagtttagttatctttgttggtagtttttatttctgtgcttatttggagtggggagctgcaagggtcatgatcttttgattttctgtttcttgatttaatttggtattctcattttaagaagcttttctgtctcattttttttaaagatgagtaagtaggaaagaatagattaggttttttttcttttttgtcttttataattttgaatcattagaaaatgcttatcagtcaaaacattctttattaatctttatgaaagtcagtaaactttggccttttcttagatacatgtcagagagccaagcatattctagctaataccttgtgcttcttacagagatcagcaggcaaaataagctcattcaagaaaaaaaggataacttgttaaaattgattgctgaagtaaaaggcaaaaagcaggaattggaagtactgactgcaaatatccaggatcttaaggaagaatattctaggaagaaggaaagtaagtttcctcttataaacatactgatctaaaatggaaagtggtgacggttcacctttattaagtacatcttgcctgttccagttcattgctaaaaatggattacagtaccccagggcataaccagccactcatctctgcaagatgtcattaaagttaactaactgggttttattttcttttgtcttacttaaagggccttctcttgttatttttaatataatcagtaataatgaaattgataggaggttttaattaagcagagtgagaaatggtgtccctaaataaaatttgctttggacaagccatagtgtactttatgcaacaaatatttattgaccatacattctctgccaggtaatgttaagcgttctttttatgctgcaaaatctcttatgtataaagaactttcatattcaaatgaatgcatcttttagaaaggagccttgtttgctcacaaactaggtagtctattcttcaaatctgaaaatagcaaagtttgttttgtaaatgctttttcttgtggagttcttatccaagtctaaattgtgaaattatttttctcattacttagggactattgtgctactttaaagtatatttagggactattgtgctaacttaaaaaaaaaaaaaaaagaaaaaactaaactagcatgaaataaggctgacctctcataagaaatagttatgttaaaggaagagamcattttcccatgaagcaattggttatctagaaaaaaagcacagtagtataaatgaagtctatttctatgccagccatacaaatccctggcctatttacttatgctactacataataaagtaagacaaggcttattcttctcactatctgtatacattttcctgagcagtttttccttccaacttgaatgaacagaagcttcttttagccaactggtagatatagaaacaataaatggaagcagatttataggcttggcatcattttatagttgattttaagtttaaaaaattaactcagtgagcattaatttgctattatttaaaacatttaatattgtgtgtgttttttaatcagctatttctactgctaataaagcgaatgcagagaggttgaaaaggctgcagaaatctgcagacttstataaagatcgacttggactagaaattcgaaaaatttatggtaagtttgttaatataaataaaatataggagattacaaaagtatgtcttttcttaagtagaggaaaattttaaaaatattttcaactaaaataatgaccacattaactttttagaaaataggaaaaaattacaatttttaaattattctaatgtagctactgatgctgtagttatttatcattcggtattttaataaatgtatttttggcatgatkgtcaacatgcaaataatttttgttcttcctatcagcattgtattctgagcatttcctcagttgctatagtcttcataatggtaatttttaagtagtgatgtaataattcattctattaatatagcataatttattcaaccatttacctattgtttagcacatattttgcttctaccaacatttggattctgccatttttttcagttttagaaatacagtcatccccacttattcacggtttctgttacccatgttcaaccgtggtctgatgatattaaatggatgagtatggtacaataagatattgtgagagggagagaagctacattaatataacttttattacagtacgttgttgtaattgttctgttttattattagttgttgttaatctctttctgtgcctaatttacaacataaactttatcataggtatgaatgtataggaaaatacatagtatggacagtccctgacttatgatagttcaacttacaattttttgactttataatcagtttatcagggtgttaaatgcatttttgccttacaatgtttttgacttttgatgtgtttattggcacataatgccattgtaagtcaaggagcatctgtttacatagtgtttgctactatctacggtttcaggcatctgttggggtcttggaacatatttctccctggtggataaagggggactattgtaaaccagtgagcatagactttcccattttctttgcatggtttttcatagaattgtttcccagagaggaattagtaggctaaaacacatgaatattttgatgcctgttgcatgtatatcacatgtacrtcgctaatgtatggcaatgtctgttgtgtctgggcttcccaagatcactctcaggtttggtgattcactagaaggaattagcatatagtcatattcatagctaagatttactgcagcaaaaggatacagaacagaatcagcaaagaaacaatagcacgtggggcaaagtctacaggaaacctggcacaagctttcaagagtsctaacccagtagagtcaaacaggatgtgctaattccttcagcatcaaattgtgacaacacacgtgaagtgttgtctaccaggaagctcattagaggttctggacgcttatgcctggttctccttggactttactccatgtaccttttccctttgctgatttcgctatatccttttgctgtaataaatcatagccctgagtatggccatatgctgctgagtgaatcctatgagttctcctagtgaatcataaaaaagaccacagcagccaagttcattccattttatggctgaacaatgttccattgtatgtgtgtactatatccattcatctgttggtgggcactgggttatttccactttttggctactatgaataatgctgctatgaayattggcatacagttatctacttgagtctccgttttcaattctttcagctctatacttaggagtggaattgctgggtcatattgtaattctgtatttaaactttttgaggatctgccaaactgtttttcacagtggctgtaccattttacatttctaccagcaatgtgctagggttccagtttctccacatcctcaccaacactgttattttccatttatttatttgccatcctactgggtatgaaatggtatctcattgtagtttcggcttgcatttacataatgactaatgatgttgrgcatctttttgtggacttaatggccatttttatatattctttggagaaatgtcctttcagattttttgcccattattgaattgggtggtttttagttgcaggagttctaaatacattctatgtattcaacctttatcagataaatgattgcaaatattttctcccattctttaggttgtcttttccttctcttgatagtgttctttgaaggacaaaagtttttaattttaacaaagtccaatttatctagtttttcttttgttgactgtatttttgatgtcatattgaaactataatatattttaaaacgaatttgtaacttctgcatttggaaatgttggttacatgactgtatatacttagcagtgcagatattgatcaaagatggagtaagaaagggtatctccattgaaagctttgacacactaaatagtttaatctcttttcaggtgagaaattgcagtttattttcactaatattgaccctaagaatcctgagagcccatttatgttttccttacatctcaatgaagcaagggactatgaaggtatgtactaatatctcctaactggtatttaagattggcgttccaaaatgttatttcaatcagcatataaagtaatatggaggaaagtaatagctccagactctattgcttcctttttcagtcttgcttcttggagtatagtcttctaaaggaagtgaatatagtcttgatttatagatactgtctaagatccttaataagtagcatctcttcaggatggcacagtgccacagtgtctgaacaatmtaaaaacaaagatcattgcatttatgtgcaaatatgaattgtccttttagataacttttttaaaaggtgaagctttaaagaaaatggctgcttaaatgtgaatattagaatttatccaagtagatgattttaaaatcaaatgtaaagtcaccagaatttaacaatttattttcccaaaaataatttttgaaatacraatcctgcaaatctcacacattgataataaaggttagttactgattctgcagctggccaaaaggcctttgatttataaggaatatatatyattgataataatgtgaacaagaagagaatagaaatatatttatctcttgtttattcttctaatgcccctgtacaagtaatccttaatttattggaattcataaaaatggttctcagctcattacacctatgctatcatcttaaagcctttgtagctgacagacactcaggtgaactgctgagctggcacagcgctgtgccctggtgactcagttcctatttctggggaatttatattttgagaatctgatttcttatacagatgtttgggtttttttctctctagataaatatcttccaatctaattagtgctagattttaaaaagcaagccccaaaaacctcttatttagcttttcaattttctctaaattggatattctcttatggtataatctgatagtacatgatagtatattaaaatagaatatacaggatacattttggaccagatgccctttgctgttgtttctctgctgtggtcatggaccttgtttcctaagcaatctgtacaagagagctggaaatctgataatgggtgaatttcttttcctttgaccaccttcactggagacttgtcccagtgtaccagctggtacaactacatacaaggacaatactgtkattcgtgactttgagtctcatttgattaatagcccctgtaaataccactcttggaatagcaaccacattttctaatgcctgccatttcacttggaaaattctagatatttctttcataattgtaagttattaaggctgggcattgaaaactgttcttttttcaggctgggcatggtggcttacgcctgtaatcccagcactttgggaggcagaggcaggcggatcacttgaggtcaggaattcaagactagcctgggtaacatggtgaaaccctgcctctactgaaaatacaaaagttagctggacatgttacctttaatcccagctactcagaaagctgaggcaaaagaattgcttgaagccaggaggcagtttgcagtgagctgggatctcaccactgtacttccaggcttggtgacaaatcaagaatctgtctcaaaaaaaaaagaaaattgttccttttttttttttaattccagtggtcagaaatgaaaagtcagtcagaccaaagtgttgcagataaaaatgacttaacagtttttaaaaaaagtttaaatagttaaaacaaaatatataagtttaagatgatgggcagggtcattctgtgtcactaaactcttcgatccttcagtgccatctgtttaaatttaaagcaagattatagtacttaagatttgaatatttagagattaaacgaaggaaaggtccaaaagatatttggcataggaaaatcaagtgtatccttttttgctcaaagaatttcattaagatggaattgacattcaaaccagatgagagcatctagattagaaatacttctgtgccataaaaaaactcattctaattgtctttgatttctttttttttttctagtgtcagatagtgcccctcatcttgagggcctagcagaatttcaagagaatgtaaggaagaccaacaatttttcagcttttcttgccaatgttcggaaagcttttactgccacggtttataattaacatacaaatagtgtatataaaaacggtttatttttcttctctattacatatctcttttttttcttgtttttattattattatactttaagttttagggtacatgtgcacaatgtgcaggtttgttacatatgtatacatgtgccatattggtgtgctgcacccattaactcgtcatttcattaggtatatctcctaatgctatccctccccsctcccccaacccacaacagtccccgttgtgtgatgttccccttcctgtgtccatgtgttctcattgttcaattcccacctaggagtgagaatatgtggtgtttggttttttgtcctttcgatagtttgctgagaatgatggtttccagcttcatccatgttcctacaaaggacatgaactcatccttttttatggctgcatagtattccatggtgtatatgtgccacattttcttaatccagtctatcattgttggacatttgggttggttccaagtctttgctattgtgaatagtgccgaaataaacatacgtgtgcatgtgtctttatagcagcatgatttataatcccttgggtatatacccaataatgggagggctgggtcaaatggtatttctagttctaggtccctgaggaatcgccacaccaacttccacaatggttgaactagtttacagtcccaccaacagtgtaaaagtgttcctatttctccacatcctctccagcacctgttgttttctgactttttaatgattgccattctaactggtgtgagatggtatctcattgtggttttgatttgcatttctctgatggccagtgatgatgagcattttttcatgtgattttggctgcataaatgtcttcttttgacaagtgtctgttcatatccttcgcccactttttgatggggttgtttgtttttttcttgtaaatttgtttgagttcattgtagattctggatattagccctttgtcagatgagtaggttgcaaaaattttctcccattctgtaggttgcctgttcactctgatggtggtttcttttgctgtgcagaagctctttagtttaattagatcccatttgtcaatttcggcttttgttgacattgcttttggtgttttagacatgaaatccttgcccatgcctatgtcctgaatggtattgcctaggttttcttctagggtttttatggttttaggtctaacatgtaagtctttaatccatcttgaattaatttttgtataaggtgtaaggaagggatccagtttcagctttctacatatggctagccagttttcccagcaccatttattaaatagggaatcctttccccattgcttgtttttgtcaggtttgtcaaagatcagatggttgtagatatgtgggattatttctgagggctctgttctgttccattggtctatatctctgttttggtaccagtaccatgctgttttggttactgtagccttgtaggatagtttgaagtcaggtagcgtgatgcctctggctttgttcttttggcttaggattgacttggcaatgcgggctcttttttggttccatatgaactttaaagtagttttttccaattctgtgaagaaagtcattggtagcttgatggggatggcattgaatctataaattaccttgggcaacatggccattttcatgatattgattcttcctacccaggagcatggaatgttcttccatttctttgtgtcctcttttatttcactgagcagtggttgtagttctccttgaagaggtccttcacatcccttgtaagttggattcctaggtattttattctctttgaagcaattgtgaatgggagttcactcatgatttggctctctgtttgtctgttattggtgtataaaaatgcttgtgatttttgcacattgattttgcatcctgagagtttgctgaagttgcttatcagcttaaggagattttgggctgagacgatggggttttctagatatacaatcatgtcatctgcaaacagggacaatttgagttcctcttttcctaattgaatgccctttatttccttcttctgcctgattgccctggccagaacttccaacactatgttgaataggagtggtaggagagggcatccctgtcttgtgccggttttcaaagggaatgcttccagtttttgtccattccatatgatattggctgtgggtttgtcatagatagctcttattattttgagatacatcccatcaatacctaatttattgagagtttttagcatgaagggttgttgaattttgtcaaaggccttttccgcatctattgagataattatgtggtttttgtctttggttctgtttatatgctggattacgtttattgattttcgtatgttgaaccagccttgcatcccagggatgaaacccacttgatcatggtggataagctttttgatgtgctgctggattcagtttgccagtattttattgaggatttttgcatcaatgttcatcaaggatattggtctaaaattctctttttttgttgtgtctctgccaggctttggtatcaggatgatgctggcctcatagaatgagttagggaggattccctctttttctattgactggaatagtttcagaaggaatggtaccagctcctccttgtacctctggtagaattcagctgtgaatccatctggtcctggactttttttggttggtaagctattaattattgcctcaatttcagagcctgttattggcctattcagagattcaacttcttccttgtttagtcttgggagagtgtatgtgtcgaggaatttatccatttcttctagattttctagtttatttgcatagaggtgtttgtagtattctctgatggtagtttgtatttctgtgggatcggtggtgatatcccctttatcattttttattgcgtctatttgattcttctctcttttcttcttaattagtcttgctagctgtctatcaattttgttgatcttttcaaaaagccagctcctggattcattgatttttttgaagggttttttgtgtctctatttccttcagttctgctctgatcttagttatttcttgccttttgctagcttttgaatgtgtttgctcttgcttttctagttctttgaattgtgatgttagggtgtcaattttggatctttcctgctttctcttgtgggcatttagtgctataaatttccctctacacactgcttttaatgtgtcccagagattctggtatgttgtgtctttgttctcattggttacaaagaacatctttatttctgccttcatttcgttatgtacccagtagtcattcaggagcaggttgttcagtttccatgtagttgagtggttttgagtgagtttcttaatcctgcgttctagtttggttgcactgtggtctgagagacagtttgttatgatttctgttcttttacatttgctgaggagtgctttacttccaagtatgtggtcaattttggaataggtgtggtgtggtgctgaaaaaaatgtatattctgttgatttggggtggagagttctgtagatgtctattaggtccgcttggtgcagagctgagttcaattcctggatatccttgttgactttctgtctcgttgatctgtctaatgttgacagtggggtgttaaagtctcccattattattgtgtgggagtctaagtctctttataggtcactcaggacctgctttatgaatctgggtgctcctgtattgggtgcatatatatttaggatagttagttcttcttgttgaattgatccctttaccattatgtaatggccttctttgtctcttttgatctttgttgttttaaagtctgttttattcgagactaggattgcaatccctgcctttttttgttttccatttgcttggtagatcttcctccatccctttattttgagcctatttgtgtctctgcatgtgagatgggtttcctgaatacagcacactgatgggtcttgactttttatccaatttgccagtctgtgccttttaattggagcatttagcccatttacatttgaggttagtattgttatgtgtgaatttgattctgtcattatgatgttagctggttattttgctcattagttgatgcagtttcttcctagcactgatggtctttacaatttggcatgtttttgcagtggctggtaccggttgttcctttccatgtttagtgcttccttcaggagttcttgtaaggcaggcctggtggtgacaaaatctctcagcatttgcttgtctgtaaagtattttatttctccttcacttatgaagcttagtttggctggatatgaaattctgggttgaaaattcttttctttaagaatgttgaatattggcccccactctcttctggcttgtagagtttctgccaagagatctactgttagtctgatgggattccctttgtgggtaacccgacctttctctctggctgcccttaacattttttccttcatttcaactttggtgaatccgacaattatgtgtcttggagttgctcttctcgaggagtatctttgtggcattctctgtatttcctgaatttgaatgttggcctgccttgctagattggggaagttctcctggataatatcctgcagagtgttttccaacttgattccattctccccgtcactttcaggtacaccaattagacgtagatttggtcttttcacatagtcccatatttcttggaggctttgttcatttcttttttattcttttttctctaaacttctcttcacgcttcatttcattcatttcatcttccattgctgataccctttcttccagttgatcgcatcggttactgaggcttgtgcattcgtcacgtagttctcatgccatggttttcagctccatcaggtcctttaaggacttctctgcattggttattctagttatccatttgtctaatttttttttcgaagtgtttaacttcttttgccattggttcgaacttcctcctttagctcggagtagtttgatattctgaagccttctctcaactcgtcaaagtcattctccgtccagctttgttccattgctggtgaggagctgcgttcctttggaggaggagaggcactctgatttttagagtttctggtttttctgctctgttttttccccatctttgtggttttatctacctttggtcttcgacgatggtgacgtacagatgggtttttggtgtggatgtcctttctgtttgttagttttccttctaacggtcaggaccctcagctgcaggtctgttggagtttcctggaggtccactccagaccctgtttgcctgggcatcagcagcggtggctgcagaaaagcagatatcggtgaaccgaaaatgctgctgcctgatcattcctctggaagttttgtctcagaggagtacccggccgtgtgaggtgtcagtccgaccctactgggggttgcctcccagttaggctactcgggggtcagggacccacttgaggaggcagtctgcccgttctcagttgtccagctgcatgctgggagaaccactactctcttcaaagctgtcagacagggacatttaagtctactgaggttattgctgtcttttgtttgtctgtgcccttcccccagaggtggagcctacagaggcaggcaggcctccttaagctgtggtgggctccacccagttcgagcttcccggcaggtttgtttacctactcaaacctaagcaatggtgggcgccccttccccagcctcgctgccgccttgcagtttgatctcagactgctgtgctagcaatgagtgaggctctgtgggcgtaggaccctccaagccaggtgcgggatataatctcctggtgtgccgtttgataagcccgttggaaaagcacagtatttgggtgggagtgacccaattttccaggtgccgtctgtcacccctttctttgactaggaaagggaattccctgaccccttgcgcttcccgggtgaggcgatgcctcgccctgcttcagctcatgcacagtgtgctgcacccactgtcctgcacccactgtccggcactccccagtgagatgaacccggtacctcagtcggaaatgcagaagtcacccgtcttctgcatcgctcacactgagagctgtagattggagctgttcctattcagccatcttggctccacctgtatctctttttaaaagaattctcatccgctgtctgcctgtagttctttggtatttttgtaacattctgtgtggcatacttctttgaatcacagtagtccatccttatctgcagttttgctttctccagtttcagttacccacagtcaactgtgatccaaaaatattaaatgagtagactgcaggacaagatattttgagagaaagaaacatttcatatacataacttttattaccgtatgttataattattctattctattatttattgttgttaatctcttactgtgcctaatttgtaaataaagttttatcatagatatttatatatggggaaaaaatagtctgtcggatttagcactatctaaggtttcagacatctactgggggtcttgtaacgtcccccacaggtaagggagaactactgtattttaattaaaatcttagggaaacatataaagtaaaatatgttcttttaattaatgaa

SEQ ID NO: 96393 - DNA, 91614 bp, Homo sapiens
gtattttagtagagacaggatttcaccatgttgcccagggtggtcttgaactcctgagcccaggcgatctgcctgcctcagcctcccaaagtgctgggattataggcgtgagtcaccacgcctggccaacaaatgaccatttttaagacagtgttgataaagtcctgcctgcatcagtcaatatgctgcagtttttttaaagcctcctaaatttcaggctaaaaacaacaagtttaggtctctctcatgctacatgtctagaaaaatgtattggctaaggtaaagtgtactggcttcaggtatagctggatcaagatactccaaagtgttcttcaaggacccaccctctggttccctcagatcttctttcctttgtgttggctccagtctcaagcagcctccaccagttccaggctgacattcacataactcccaagtccagagggaaaaagaggtgttttttgttttttggttgtttgttttttcccaggaattccaacaaaaatcccagagtcaccttatctagaatatatgagtttcatatccatccctgaaccactcactagaaagaggaagatggaaatgcactgaatagcctggagttcatgggggaattagccctattcaaatcaagtaagctgaaaatgggagaggactagtccctcaaggaaaatccagccaatgttaccagatgaagggaggatgaatgttaacgcaagcccaaactactgtttgcattatatggttcgaggcttaaaatgttgtgactccctgcctggtttcaggccctgatggttttcctattacagagggtagcaataacgtcccctgtgtgttcccttaacaattataaagaaggttactcaattttattcatccaacaagcagatattgtgtgtctataatatactagaaactgccacctgacgggaatccaaagtctaatgaaagacagtctctgcttctgggaagaaggaaactaaaacaaaactacaaattactgttgtacgtattataaaagacatatatatatataaagtatagcatgacatttgacctgaatcttactggtcattgaatttacttttctagatcaattctgaatctcacaaaatgcacttaaatctaatttttaaaacagaaaaatctagtatttttcatgagaacaatgttatataaatagccacatttcaggacccaaagattgaagtctagaatgtagcatccttgttgttctactgtcaatcaggatttcaaaggagacacacacatggtgttctaagactgtgtgaaagtgaaggtgaccttgaaaacagttcttgttttgttttcaaacgaaaataataaatgctgcagggagataactgtcacacattctttgagacagaacagccaacaatttgcaatcccatctgccatttaaactgctgcagaattctttggtaaagactgctttatgctaaagcaggtagtgccagcttagtacaaatgatagacgagagagggttgtgttgacagccagagcaaagccctggacaggcttactaacagaagagattcattcctcctcaacttgtcacatcttcacaaatcagaggaaattgtatgaaatataatagacgagaagaatttgtgagtgaaacttggaattattcccaaaattaagtcaagtggtggtatttctttttctctttggctagaaattcatattaaggtagaaaaaagtggacatttaagatttaaggaagtttttaaaacatggagactagtcttcatttactttcattcgagacacacttattgagcacatgtaatgtgcctcattttatgcaaggcaacattaatgcaaaaacgaatgttacacaatacttgtccttgtctcactgtctattgggggagataagggcataaacaaatagttacagcattatgttatatatgctgtaacaggcttttacaaggaggaggagagagaggctcatggagaaagtcatgtttaagaggagtcttcaaaggtgtgcagttcactaagttgacaaggtcaaggaggacccacgtagtgaaaggaaagccatgaaggaataaagtatgtcatacacagggaaggagcagagggcagccattgaaggcttttgaataagggaatgacatgatcaaagttttgactctgaaaaaatccttctgcgggtattaggaaggattagactgaagagaggaagagtctggaagtaggaacacttgtcgggggctctggcaggcattcagactgaaatctaagggagggcaatgaggttggagcaaggggacatgctggctagttgctaggaaagtagaaatgacaggacctagtgatggggaggggagggaatgaaggaacgagaggtgcccaagattcccaggctaggctggcttcatgggcatgtgatttgtgcaattgcacagcaccccctaccccactcaggagagtcccatgctaggtttaatgctctttcactgtctttacattaataataatagaggggctccacatttgtgccctgctaatcatgcagccagtcctgttcccagatctccgtcttgagctaaggggtggattatggtgccaataattgaaatgggaaacagaagacagaacacattttgttgtaggagaggtgggtggagagatttcagttttgccacagatgaatttcatttacctatgggtcatcaaagtagagatattcaatggcctgttggaaatggtatgtaaattccaagtgaggtacaagctagagatatgggaattagaggttgaggagagtccaagtgatgcacccctggatatggatgagtaaagggagcagaaaagagagacagaacctttggtagcaccaatgtttaagggatcagagaagggcaagataaatgggagaggaggggtcaaagtcttgtgggaaaattctggaattatgtcctggaagctaaggagaaaggagtctcaagaaggagggtgtgatcatctgaagcataagccacaaagagatcaaataagatcacaatgggaaaacgtccattgcattcagattagaaagtcaagggcacttaccaagaataaatgtgtgcgcaaagaattgcagggtgcacagagcttcccctccttcctaggaagacattgtagatgccacgcccattccaagctcttggatacgaggggcggagaggacgtgtcactttctaaagaacaaacacaacaggtggaccctgtttctaaagggttaacccgccttccccgagtgcagggcatgagagttttagccgtgggcaccgtttggtgattctccaaaggaaggagagggagtatagagtctttatccttcattccagccacattgcctagagcaggagtatggaacaaagctcaagctttgattgagcaaaccctagaatttgctcaatccttcctttggcttcatagctcaggttcttgaaagtatagtttgctcttatgctctgctttccccaagttcctcctccattccatggcagtgtggcttccatctccaccacggttcttggtaactgaccttgactttttttttttttttttttttttttttgagacgaagtcttgctctttttggccaggctggagtgcaatggctcaatcttggctcactgcaatctccacctcccggtttcaagcaattctcctgcctcagcctcccaagtagctgagattacaggcgcctgccaccacacctaatttttgtatttttagtagagacgggtttcaccatattggacagactggtctcgagctcctgacctcgtgatccacccgcctcacaccccttacaggcatgagccaccatgcctggccacccttggctttctaattgctgaatgcaatggacattttcccactgtgatcttatttgatctctgtggcttatgcttcagatctccctcttgaaactcttttctccttagctcaatctttgattccatgagcaaatctccagagctcaagctttgattccatacaatgcagagtttgtgttgtttttacttaaaacaggaggaggctgagcaagtatatgagagcactgaacttagtagatgagaggagggcacacttctaggagagaagcacaaaagatacaggtgggaagggaggtaggcaaattcatagatgaagtggtcagaaggtgagtgttacacacactcctccccctgcacatatacaggcaaatttttaaaaacctaattttctcagtagtgttcaatttactactgcaagtgaggtgatcaggagagcaggtaggcttctaaacagtgctgaaagtaaatgaccttttgcaaggggagaggacgctgagcagggacaggtagcaaggagggctcagctgctgtgagagcagaggttaggctcaagaaagaaaaggagctgaaagatgcttgcagtgtgtgcacatgaaaatacgaaactctggcccagggtattaaaagctcaacaggaagaaaagacatttgccttttaatatttttcttttaattaagccctgaagaccctccattgcaattctacagcctcccaacagcaaggactttctcagcgctttcaggctacccagccggcgcagaggatcctaagcctcagcagaggcaaaacctccccaggctgtagcagggcaagtgctgatttggtgaataattaatgcctcactcacctagaccccaaggctcccgcctgcctcagactcgtgcaggcttacgaactcgtaaagcagctgactctatggtctaatgattaaacttctctgggccttatttcgttacagctaagttaaaaactgaccagctagccgcttaaactcttctcccggaaatgactggaaaacaagccaagtctcctgactggactgacaactaactatactccctgaattccagccacatttgcccagagcaggactccaagctttgactctgtccattgctaagggtagcagaatgggtggtggggtcccgtcaccaacctcttttccctctccaacccctagaaggtggtgagtttctatgtacccctaatttcaccaggcaggttacactgtgttgttagagacccttcattagaggccctctccccacctcagcatttgcacaccatggagaatcgtcgagatgagcgttgtggggaagtgcctctcatgagagatttccacttcctggctgtgtcaactcttccacggcgagatgggaaacggagtcagtaacaataatagtgtcatttgaggaattacctgagctaaagccatcatctggatataggtaggaagatttttttttttttttgagacgtagttttgctcttgttgcccaggctggagtgcaatggcacgatcccggttcacggcaacctccttctcccaggttcaagcgattttcgtgcctcggcctcccgagtagctgggattacaggcgcccgccaccacgcccagctaatttttgtatttttagtagagatggagttgcaccatgttggaagtagattttttaaaaacagaactggacgttcaattcaatgccgtgaccacctgggtaacagggattacagataggtcctgaataaatgtgtgcgcaaagaattgcagggcgcacagagcttctcctccttcctaggaagacactgtagatgtcgcgcccatcccaagctcttggatactaggggcggagaggaagtgtcactttctaaagaacaaacacgacaggtcgaccctgtttctaaagggttaacccgccttccccgagcgcaccgcacgagagttttagccgtgggcacgtttagtgattcacttcttgcgaacgtaaatgcgcgagtccgcggtaggtcccgccggccccctggctgggcaacctgaaaacccacctcggagacgcccccacgcatccgcccccctcgctggacggccccgccgcgcgccgttctgggacgcgcaccccggggcggacccgccctgggacctggaagcgccccagccccgcagcgatcgcagaytcggctttcaaacaaaagaggcgccccggggggtgggaccgggacctcacccggtcctcgcagagttgcggccgcccgccccttcagccccggctctccgtatgcgcatgagcagaggcgcctccctctgttcctcccaaggctaaactttctaattcccttctttgggctcgggggctcccggagcagggcgagagctcgcgtcgccgggtgaggagaacaaagtggctgcacgattttccccmctttccagcccaccccccgcttccgtgggagcgacaggaaatggaagggcgcctcttctctctttgaacatttgccttttttcccctcckttccacctctccagaaaggaagacgggaagaaagggcaggcggctcggcgggcgtcttctccactcctctgccgcgtccccgtggctgcagggagccggcatggggcttctccagttgctagctttcagtttcttaggtaattccgtggaaacggtgcggggaggcggacggacttgggcatggggaaggaaaacccaaaagctgcttgctcaccttcgtgggatcctgggggcttgggagagggactggatggaaatgacgcccctgggattaaacgccaccgcccttgcttcggtggtggctggagacagcgcacgcggagcgccgcggaccctcatcccccgggctctgcgcccaagccccggcccctgcggcctcccgcggcccccgctcagggttttgcaccctcggccggttcaccctgggtttccccaccgcagagggcaggttccctggggttggcggtgctgaccgaggagggctctccaaaaatccattgcccaggagagtgcctgagctgagcggaggcttcattctgggaacagatgggggccatgtggctttaattaaccatctctgtttgtctccggatggcaccagaaacagcaggacctggcgcttccctggaatggagaagccttgaaaccactccagagccccagggactgtccatgggctcccctagctccggaaagcggcgtccaccgcgagccccggcgcctcgtccccagcgaagcgccggtgaccctcgcgcgtgcacgcacacgcactctcgcttcccaagctcacagatctccacgcgcacactcacaccgaggatgcgcgggctgccgcgtgcacgcgggttcacgtgcgtgggtgtgtggccctttgggggtcagcctccctgcgccgggctccggacacgtcgaagtggagggtctacacatccaccctttgttgggggagctgctccccggggctgatcagggtgggcgcgagcgtcggtgggtttcccgggagggaggctctcgctgctggacagacctgatgacgtgtgtgggtttctttccgtgtccttctcctttcggagtccctgccttcccagcctctcctgcgctyatctctccattgtcttttctgtgcattttgctttcttccgaatggactgtcctctctccgcacccactcscccgcccccgcttgttcgtttttttcgggctccactccctgyttgtgtccccccaactctgttgcctgtccttcccgcagccctgtgcagagcccgagtgcgcgctcaggaacccgagttcagctacggctgcgcagaaggcagctgctatcccgccacgggcgaccttctcatcggccgagcacagaagctttcggtgacctcgacgtgcgggctgcacaagcccgaaccctactgtatcgtcagccacttgcaggtgagggctgagagcggggttcgaggctctgctagcgcctcctcccgtccagacctaaggggcaggccctggggactccgcatccttccagcaatccagataggaagcgcagccagccggggagtcccgggattaggcttgtagctcaacctttcgccccatctcagtttgcacagttgcatccgccacacatttcctgccggcgcggtgagtatggaaaggcaggactgccgacagccctggctgccctgacccagagcctccaaaaggcctgattgtgtgtgtgttttttaaaactttagttttggaagtgtgcattaaaggtgatttatcctctttttaaaacccttgggtttccccaccccyctctaccgcatcttcacttgrgtaaagaggattccagcaatgacaggcgtcttgcaaggtgattccaatcactgaacgaacccgttttcctctcctcatttggtgctgttcccaactagatatcaggatcagatgcttgcttttacgaaatgccctggttgccatggtaccctgatacaggaagaccacagtgaaatttcagggtgttacctgtttctaaaagagggcccaaattttagatttcaggggtcatatttatacaaagtcaaaagtaattttaaaagaagacacaaagtgtaaaatattcagaatcagaatacttttccttcatttttaaaaaggaggctggccgggagcaaaatggctccatgcctgtaatcccagcacttagggaggctgaggtgggaggatcactggagcccaagtgttcaagaccagcctggacaacatagactcagtctctacaaaaaatttttaaaacttagctgggcrtggtggtccacacctgtggtcccagctgtctgggaggctgaggtgggaggatcacttgagcccagtaggtcgaggctgcagtaagcgataatcagtccactgcattccagcttgatcaacaaagggagaccctgtctcaaaaaatttttttaaataaaggctgatatttctggcctctaacaaaagcagaaagtatcagtttcacattcggggcaagttccaagctaattgctcagaacatggtcagcccacccacctgtacaattgcccttcagaaggaggacagagtattgtgtgtggtttgcacagcagatcccttaaaatggagtcacttttacaaagcagaaagcccattctggagacctgatcaattagaccaaaggaatgtggtaaagtggattccgttcatttgcttccaggtttatacagagatgtctagactgcttcctcctgattagaagggaggctgtaattaaacttttttaaacttttttttttttttgagttctggtgattgttctccagtactagtttccttgactacaagttattgaaggcagttgatgttacttttctaatattagcatttaaattttacctacaatattatgctaacacttacttgagaggccaggacatcctgtaaatgaatcaccagattctgaaatcagctttgaccaaaatgagaatcasactgtttgtattaaaagcaactggaaagactatcctctcagtgatgatttctatagttcgttactagagaagtttctctaaacatgtagagagcatcagaaaccacaaaaaagaggtgcagcggtctctcctgagtgtgaagctggctcttggtattgcttcttggttcttctcttcctttgggagagtaagaggaagaggatgcagtcttagtagtttcccttaaaaaaaaaaaaaaaaaaaagcaactggagccaggctctctggtatatatgattagccatgcatttgtgaagtgcttttcacagatagcagggcctaaagaaagggactggacatatgcttttctcaaacatctagtgggcatcaagattgagacaggaagcttgttttatccaggctcctaatgcatccctggctttgggtctctgttttttagacagtacatcttgccagtctccaaatccttttgagaagaaggtaataactaaataaatacgatgtgaaatacaacgtaaaagtacggtcagttaattgtgtccttataagaatattacccttaaatgctgtttgtaacatacatgtgggtctctatgtatttcagtcttagcctcattttcagacttaagaatagtctgcatttcagaaaatgtaggtacagagcaaagctccttgtggaaagagaactattaagctctgttgtttatgatttgccttgatggaatgcacaggaagtagataactctcctaacccaactgcccaggtggctctggctcccattttaggagaaagaaagtaagagaaattcaaagctaacctaaaacttacagtctatcttcatcctagttcatgcccatgttggggttctttgaactggccccagattatagtgggcccaacatggcgtggtcctcccaacagcctggtcctcccttccccagatattctgagcaatttgcaggttagcctgcatgccaccaccattgattcactgctcgggcagggtggaaacgaagaaatcttgttctgtggttcccaaagcttctctaaatacttctgcctaatacttggtttctgcttcatttaggttttagaaaatcaggccaagtgaactgtatttttttctttcatttttagtttgctttatgtcagcaaaaattctctaatatctcctctgcattttactgtagagtaagcttctctagctgtttattgagattaaggtttaagcctagaaatttgattttggttaaattaatagcttgtggaaacaatgccctcttttactttagatcttgaatttgcaaggaaggaggaaattattttcaagactattttagactcagcaagttaaaagtgaaagatgtgatacaaatcwcctragcaattttcacacaattatttttcttgaagctaataggttgatttttgtattaggagcttcatggggtttttttaattaaaaatgtttttaatgagattgctttctagactgatgaactcaactttgtttgtaggaggacaaaaaatgcttcatatgcaattcccaagatccttatcatgagaccctgaatcctgacagccatctcattgaaaatgtggtcactacatttgctccaaaccgccttaagatttggtggcaatctgaaaatggtatgtggttggtgtggggacaagttccgttgagtgtgattgataacttgggtggagcttacaggttcctgggtgtttgtaattatgattcacttctctgtcctgtaattatggcctctgacagattgactgcctggagcactaacttctcttggtaaaatcttatccttcttcctgaagcatgtatttcctataagaaagcagtctgtcatgctagaccaaaggagcatttcatagtccttattctgaggggcttttggagagaatacttgtgtgccgggggctgtctggggagggtatgggtactatctcaggcccttattcttccacaaaatgtaacatctttcattttgatcaatcccaaaggaaggggcagaatcatagcccccactcctccccccactgccttccttcatctacagaaagtgtcttgatagtaatagtaacactatgaataagcagcaagatgtaattttttcaaagactctgtcaacatggatatgaccccaagtcaaatggttcctccagtgattgcatgaattacaccctttttcctgtctttgctatttgggatttggtgtaatacattcatcaaatatgattttactattgctgtgacatgaagcccagatgagtttcacatttgtttcaaactcgaatgctgaaatttggggaataaaggtagagttattgtgttcgttaattaacaatgtactgttagatctttaaaataaataaataaataagtatcctcaaagaagtgaacctaaccctggccgttaaaaagcctggagactactagatttctttattctatgcagtacacctgggcaggctttggatgccgctgcagccatctatcattctgtaaagacaaacgcccttaatagatttctttgtcattgactgtttgtttgtttgtttgtttatttttgaggcagagtctccctctttcacctaggctggaatgcaatggcgcaatctcagcttactgcaacctccacstcctgggttcaagtgattctcctgcctcagcctcctgagtagctgggattacaggcacatgtcaccacgcccagctaattttttgtatttttagtagaggtggggtttcacggtgttagccagggtggtctcaatctcctgacctcgtgatccacccgccttggcctcccaaagtgctgggattacaggtgtgaaccaccacgcccagccatcgactgttaaattgcaatattttctagactattggtttctaaggagagttggtttgttcattggttggccttggcaattcattggttacaaacttcattgggtcatcagaaagcatttatcatttagagccatgttcattcttacgggggcatattttggttgatacttcagtgtgaaagagaagtttctgtaaatctgcagtgtaccccgaggacttctgaaacagcagcaagcttattatgaacaaagactaggaacatttcctgatctcccacattcttctagtgaaagaccgtttgaagaagatgcctcaacattaggatggagactgtccccattttagtcagcagacagtgaaacagtttatcatgtgctgtagttctagaggaaggtttttcttagttatgtcgagttaatcaacttctacaactttgaatctctgggacaaaagagaccagatgccagaaagaagagattttccagtagaggggcttgagttctctgtcactctgtcacaagagattagatgagattagactgatggaacttagtctttagaaagtcagactgattgttactataccctatcatctctctgttgtctgatcacagtttaagagtttatgaatgtgattttatctattttctgtgtgttgtgcacaagttgtgcttatacgtggcggggctaaattatcagtgtccaggcacagaaacgagcttggaatgtacgactatttttacccatcgtgatgatctcttcctaggtctgacagaaatcaaatacactatagaagaatgaccttgtttcttttctctgtggatttttcttcccatataaaaaaaagcctgtagtgctttatcaggttataaatctaaatggaatgtgcttttggtgcacacattgcagcatatgttcttaggttacagaaatggcactagtcttgctttgcactttacattattttgttatctcttaattttgaacaaatattgtaggtttttaaaagcctggaagaggagagatgtacagttgcctaacatttcactcaaaaataaatgcccagtgtagttctgtaatatggttctttttgataagttaggtaagattagttagtgtgaatataatgtttttcttttaacattccagctaactcatatccgttccaatgaccactttcctcaccccccgccccctcaattgacttggcaattttccagcaagagtttatttcaaaaggtcctcctgatttcctgaaaatacaccagtctgtgacatgattcattctgacacattcctgtctttccscatttaagacttcttttgctctcaagatggaccccaaaagctctctcaaacacaagaagcgtggcaagcctcccttgctgaacaggcaggcttgagagctctagggactggggaggaggtgctttccatctctggaattccagtggcctttttaacgtgtttaagtgagactgactgaccctcagggcaagggtgcaaaggctcatttgtttgttcaggctttcccctgaaagagaagatgttagtatttgttctgagccagtttatttgacagattctttttttctctggcgttgtttttcattgtggaaatgcatccaaaggtttccccatcagggataggtttttctaagttgtggtataactaacatatgtggtagactcttatttattttctttgctgctgcatagagaaaaaggaatatttgtgtttctactggaggaggattgtgtccttgtgcatcagactgcaagctgaccccctactgtgcacaggaagtgcccctcccttttttcctttgagagcagcttggcttagagggttgggaagatgtttcacttctggctaggcaaaggatgtctttcttgacagcagctagaggcactctgccagatgtcttgttccagtgagcagattcaatctgttgaactccagaatgatttgtggaaaactaaagaatcattcaacttgtgctttaccacctaaataagcccatgggattattatttagtttcagcttcagcttaaggtagaatgcgaggataatttctatggggaacataaaagtaatttaaaaaatagtctsaactattcacagatgtttctatttacagtttcatttattgttttattttttttaaatctcctgtaggtgtggaaaatgtaactatccaactggatttggaagcagaattccattttactcatctcataatgactttcaaggtaagaaatccatgactttctcacaaatgacacatgagagcactgtgtaatgtcccctttcaaaatggatgtcagatgtgagttgacctaaatgggaacttaaatattattgttgccataaattggggtaattgagcagtttttaaaacgagcatgaataactgcatttaacaaatactctatcttcatgacaataagtagaaagagcctctattctaaggtaattsaactgtaaacttttaattaggtatctttttatttccccatagagtaaggcagtgttgacccttttccaaaccgcaataaaacatctggagagtaaatccctggtcccttgtgtttatgttttaatactgactttggtaactggaaaggaagtgtgttctctttggttttcagagttttgcacaatttgtgagcagattcaatctgttgaactccagaatgatttgtggaaaactaaagaatcattcgacttgtgctttaccacctaaataagcccatgggattattatttagtttcagctaaataatagcttaaggaacagttttacagttccttaagaaatgtgtaatgccttcttaaatgtggattttctcatcatttttctttgagagatgtaaaatgactccagaactagggaatgtctctgtacaaagtccctttgtttcttcttaagcagctgcctggaaatgacaggcttcacatggcttaaagtacacattggctcacagaaaacccataatttagttattgcttctcagattaaaaatcacttttgaatagctttcagttggagttgggaaccttatctacaccctctcaggataggaaaaggtgccaaggatagatttaccatgtgggcgggtagccatgaaagtctcactgtctctgccaccaaagtgggaggccaaggagctagggtgggtgtgggagtcagaatgcaactaggagggatgctgggctgtgcctctgagcctttatccccttgcccactccccagcagcctgctgttcctgctggagcaggaaggtgggcactgtgactgtgacacctggtattgagagtggtggggaaggtttcactaaataaattgtcaactactccttgtcaccaaccgcttgtcccttcattgaccacacaatctggtgattaaactgatgctcatcggcctacaaggatgttacctttatgttatgtgacacctgagaatactcaaaatcatctttattaatgtttatgatcctattttttcctttgcagagggcatctgttcatatacatggatagttctgagttcatctagatccaaaatcctttaggcacatgttttgtagttgaatactcattcaggtgaatacagtgggagaaagatgaacttacttgtgtaggcgcagaaggtaaaacgggggtgatgattgaactgagacatgcagaatggctacaagttggggccaggcgtggtggctcacacctgtaatcccagcactttgggaggccaaggcgggcagatcacttgaggtcaggagttcaagaccagcctggccaatacggtgaaaccccggctctactgaaaatacaaaaattagccaggcgtggtggcacgcgcctgtagtcccagctacttgggaggccgaggcaggagaatcgtttgaaccctgcaggcgaaggttgcagtgagccgagatcatgccactgcactccagcctgggtgacagggtgagaccctgtctcgagaaaaagaataggtacaagttatcacactggtttatgagaaaacaactcatccttcgggtcctagctccagtgagaagagcaacatctatggggttgggtacattgggtgtgaatccctgcctgctccttcttggcatgtgtggccagagctgtgacttcctcattggtaaatgggaagaggaataatacctacatcataggacataggacagaatggtgatgttctcctgttcccctctgttttttgttttttaaatactgagtcttgctctattgcccaggctggagtgcagtggtgcaatcttggctcactacaccctccgcctcctgggtttaagcaattctcctgcctcagcctcctgagtagctggaactataggcacatgccaccacacctggctaatttttgtatttttggtagargcaggtttcaccatgttggccaggctggtctcgaactcctaaccgcaagtgatcctcccaccttggcctcccaargtgctgggattacaggcgtgcctaccgcgcctggcctgttcccttctgttctgggaactgggataatcttgttgccctggcggatagtgggaacctgaaagtctttataaatgcagatgcttggcatatagtaattgctctacaaatgtttactgaatgaaagaataagtggataaatgaattcaaccatcttctgtttgtaagaaactaccctactttaagccttatgggaaattgtaaagatagcacagtgactgccctccaggagcttccagtcttccagaggagaaagatatacttgcaaataacttacagtatgtgacagaatgtgctaatgactacaacagaagttcagacaatctttgttagcctggaggagggtgagattaattttagcctggaataaagaagaaacctaggactgggactgcacttgacctgggccaggaagggagagcagggatgtcagtgggaggagatggaagaaaggccattcatggccggagggaaacagtctgagagcaaggcactggtggtgggacagtgggtcaggatttgctcagcaagtgctatgtagatttgcctcgagtttggggtagtgagagaaggaaaggaaaggaaagtagaaaagcagattagatgcaaaggacattgactccttgctagggagtgtgaactttataagaaatagggagccattacaactgatgaatcttagaaattctttttttttttttttttttttgagacgaagtctcgctctctcccaggctggagtgcagtggcgcgatctcagctcactgcaagctccacctcccgggttcaagcgattcttctgccttagcctcccgagtagctaggattacgggcatgtgccaccatgcccagctaattttgtatttttagtagagacagggtttcaccatattggccaggctggtcttgaactcctgacctcatgatctgcccgcctcggcgtcacaaagtgctgggattacagacgtgagctaccgcgcccagcctaatcttagaaattcttttagtaattttttttttttttttgaggatggagtttcactcttgttgcccaggatggagtgcagtggcacgatcttggctcactgcagcctctgcctcctgggttcaagcagttctcctgcctcagccccccaagtagctgggattacacgcatgtaccaccacacccggctacttttgtatttttagtagagacggggcttcaccatgttagtcaggctggtctcaaactcctgacctcaagtgatccacctgcctctgcctcccaaagtgcagrgatacaaaagaggcatgagccactgtgctcagcctcttttttgtatttttaataagaaatgaatgatcatttcttgccaaaatttgccactatgaggtgattgcaataattctgttgcaaaaacattaacatttagtatgagtcttttttactgtattcttgcagttaataactgctgctatcatgttattttgtgctttatttttgtttatgccagtcttaaagatccagatttctgaatcttttaaaaaaaattaataccaaaaaaaaattgggaaccattgacaagaaaatgagacctgtgtttcaggaaggtagcccaagaggaaatacaaagcaaggactgggatggcgagaataaagggcatgttgggaggctctgttgatgtcagcattgatgaagcattaatggagggttactgctaatgcaaaaactggctgtgattcttaagtaggagggagccttttcctgcaacccaggagtcctgtaagaatatcttagaaagctttttcaaatcccatgtgtccactcactgccatactctgatactctctgctgttaactgcctttgaggatcattgccaagatgaggtgcccctgttttctaagggcagtcatttggatactttaaaatcaaaagctgaaccatgaaatggagaaagattagaagcagaacagtggaaggaaagggctgaatcaaaaattacttagggctgctctgcttatggagtagccattcttttcttcctttactttcttaataaacttgctttcacttaaaaaaaaattagttagtcaagtgaaataactaggaagatggtgaagccactgacagtagtgaaatcaggaagagaactgaggttgttgatttttttcccccaagttcgccatagagatggctaattgctaagtggatttagactagcaaaagctcatttagcatgtacacagtatgtttttctatattactagatgtttcaaaactcataactcttggccaggcatagtggctcatgcctgtaatcccaacacttgggggtgctgaggtggggggatcgcttgagcttcaggagttcaagaccagcctggacagcatagcaagaccctgtctctacaaaaaattaaaaaattagccaggcatggtggcacacgcctgtagtcccagctactcaggaggctgaggttggaggattgcttgagcccgggaggtcaaggctgcagtgaactatgattgtactagtgcactccagcctgggcaacagagcaagactctatctcaaaaaacaaaacaaacaaamaaaaaaaammcacaaaaaactcataggtcttttgtttattataaatttggaggcaactgtgcagcaatggcaggcctgggaaggttgatgactaagcagagagtatggaaaggattctattcgttaggtaaaatgtgttgttctggtttccagcagcttcttaactccacgggaaattggatgactcgtcaatggtcctttgggacttaaaagtttccaaaagagagggagaaggaagcacagccagaaatggctttcacagagccattggcacagagaagtccgattagaccttcccctctcttcctctccccaagcctcccagccaggctctcacggggagtttgccatggtacgtggcacacatggttcagttagtccttagggatttttctctcttactttaaaattcttaggctgatattctcttgagttgaatacggtatcattttcttatattcctgggtaggtgaaaaataaacctaagcagctagtgagtgaataagtcaaagaatctgtcaaaatgtaattgtccatgttcttatccttgacatcttttatcagagaaaaagctcagcaggattattaaggagggctaaaggaagcctaagcatgtttctagttttcaccattaaccctcacccaaatttctgtcaagcgttggttttaattcggaagtaagtgtctttatttaggttctgttttctaggtcagctgaaatttcctttgatctttttcccttgtaatctgacttccaattccccaaaatgcatcactgtgttggttagtgtcaaaacctttgcctgtttgcctatttttcagcrctctttctgcttcatcttttacttccagttgaccctgttcactacaccctcctaaatctccctcctgccttggtttcagaagactgcctttttttctcttttccctctgacactcatttttcagtcttctgtgccttcagccagtgagggagaaagataggaatggatttgaatctaagctctgcctgtaactagcaagtcagtgtctccgagcctcaattttctcatttgtcagacaaatgtgttgtgagggtgccttggtttcctagggatgccataacaaagtgtcacggactgggtggcttaaacaacagaaatgtgtcttctcacagttccataggctaggaatctcagggtawggtgttggcagggttggtttctgctgaggcctctctccttggttcgggatggctgtcttctccctgtgtcttcacatggtcttccctctgtgcatgtgtgtgtcctcatctgttcttataaggacaccagacatatgattacagcccaccctcatgacctcatttaaccttaatcacctctttaaagagcccatctccacatctagtgacctgaagtatggagttaggtcttcagcatatgaaacttgcagacacacaaatcagcccaaattatagagagttaaagtaaagaatgtaatgaggggtactggcaccactctgttttccttgtctagcccctggttgatacgtttttctagagcacagacttaggctctctttatcttacccattccttttttctttttttttgtttgagacatcatatacttggaggtttcaaatatgtgtgtgcagtgactcccaaattcatgtttcaagctccattcttgcagctgagtgccagaccactttttccaagtgtctgatgggtgtctccaagtggacatcacacatgtgactaattagcctacaaccaaatgctttcacgcctcttccacgttgtcgtcattggcaacacakctacctggctacccaagttcaggtgcctgtatttctttcctcaccctgccttttccactacaatctaattgatcaccaagtgtaattcaatagagtcttctgtcactaaattttcagagtggtcagttccatccctttctatctacattgtaatttctcaggttaaaaccgtcatcttttttctttcacttggttttcctgtgttttgtatcatccatgtccagtaactaccacaagagttatttttctaaagtgcaatctgatcatttcatttgtccacttaaattttttagtgttctcttttccttgcaaaaacgtaagtcccttagcatggcaacttcttacctgccccgaccaacctcttctgccacgtgcagccgcctccacccactgcctggaaaacaccttgttgcccttttaagatccagtttggcccaggcgcgggggctcacacttgtaatcccctcrctttgggaggccaaggcaggtggatcacctgaggtcaggagttctaaaccagcctggccaacatggtgaaaccccatctctactaaaaaatagaaaaattagccaggcgtggtggtgcgtgtttgtaatcccagctactcgggaggctgagacagaagaattgtttgaacccaggaggcggaggatgcattgaactgagatcgtgccactgcactccagcctgggccacagcgagactctgcctcaaaaaaagatccaatttgatgccttcttctctgtgaagtattcctagctttttttttcttggcagtaaaatatccataacagaaagtttaccattttaaccatttttaagtgtataawtcaatggtgttaggtatagtcacaatgttgagcaaccactaagactgtctatttccagaactttttcatcaccccaaacagaaattctgtggccactgtccctctgcccagcccctggtaactgctaatcaactttgtgtctctgtctacttaaccaattctaggtatttcatacaagtggaatcacacaatatttgtccttttgtgtggcttatttctcttagcataatgctttcaaggttcatccatgttgtagcatgtattggcatttcattcctctttatggctgagtaatatttcacagcatgtatatatcatattttgtttatcttcatcagttgatgggtacatgggttgttcccgccttctggctattgtgaataatactgctgtggtgaacattcatgtacaagtgtctgtttgagttcctgttttcaattcttccgggtgtatacctaataatgtggaattgctcgattttccagcttcttgagttattaatttcttcctcttgcttttccaaagcacattgcrtgcaaccctactatggtgtttgacatagcatattgcaaattattgacacccatatctgcacctcattggactgtgtataacatatacaacatatagtccactggctgatactaaggaggtagtcatacctttattgaatgattaaatgaacgaatgaaggaacgagcactcaaacttgccactcatattacagtggacatggtgactaaatatacgaaagtgtgtttgctatttaggcctgtttataatcagcttctaaagagaaacagtttacttatccagtagggtggggaaaagtatacattttagaggttagacaytttccttgcaagaagagtctctgtggaacagcttgaattatttgaaatccagccacagtctgaaatacaaaccatatgcagttcaagtttgtggcatgcagttgagtgacatttttacctgagattaaaaaaagtagagactaccaataaaaaacatcaaatgagatttttgctcctgcctttagacattccgtccagctgctatgctgatagaacgatcgtcygactttgggaaaacctggggtgtgtatagatacttcgcctatgactgtgaggcctcgtttccaggcatttcaactggccccatgaaaaaagtcgatgacataatttgtgattctcgatattctgacattgaaccctcaactgaaggagaggtttgtttgcttctgtgttttacattctacttgcaaatctactttttgattattgcagaagtaccaattactcttgtttccatttttaggtgatatttcgtgctttagatcctgctttcaaaatagaagatccttatagcccaaggatacagagtaagttcattttcaaacaaaagtgttttttgttagtttgtttgtttgttttgttttgttttttgagacagagttccgctcttgttgcccaggctggagtgcaatggtgcgatctctgctcattgcaacctccgcctcccgggttcaagtgattctcctgcctcagcctcctaagtagctggaattacaggcatgtgccaccacgcccagctaattttgtatttttagtagagacggggtttctccatgttggtcaggctagtcttgaactcccaacctcaggtgatctgctcacctcagcctcccaaagtgctgggattacaggcatgagccaccacgcctgacccaaataaaattttttgtttgtttgttttgttttgttttgtttttttgagatggagtttcactcttattgcccaggctggagtgcagtggcgcgatctaggctcactgcaacctctgcctcccaggttcaagtgattctcctgcctcagcctcccgagtagctgggattacaggtgcccgccaccatgcccagctagtttatttttgtatttttagtagagacgggttttcaccatgttggccaggctgggtctcgaactcctgacctcaggtgatccacccgcctcagcctcccaaagtgctgggattacaggygtgaaccagcgcgcctggcccaaataaaagttttgatggtaaacagcagccatggaataagtcttactcagaatctaaatattcagtgctaaatctacctttttcattttccttctttctctgtgttacctgaccagagggtcttgaaattagcaataattactctccactgatagggaatacatttacatctgatataagatgtaaatacaatacatccgatataagattgataggttatcaagtaattgtgttgatcataataccttattttattgctcagtatattagggtatatattgggcttttgtatcaaagagtctccccaaatctagttgttcaaataaggtgaaagtttctttctctcttacaaaacccaccaaagagttttctagagaagaagtgtagctcaattgccataattaagcttaccagataaaatacaggatgatgcccagttacatttgcaaataaataattcttttttttagcataactatatcccatatatcccatataatatttgtgactagtacaagtgtgtctcatgcaatatttgtggttggtataaccatgtcctatgtgatatttgagacatactttatcctaaaaaatagttgtttatctgcaattcaaatttaactgagtgtcatttatatttacttgttaaatctggcaaccctagttataaggccatccatgtttccaggtttattcacatggttagagttagaccaccaccactatgtcctcacctcaactcgggagaagagggaagacgaggcaagcaaattccatttaaagatgakacatgggccaggcgtggaggctcactccgtaatccccagcactttgggaggccaaggcaggyggatcacttgaggtcaggaattcgagactagcctggccaacatggtaaaaccktgtctctactaaaaatataaaaattagctgacatggtggcatatgcctgtaatcccagctactcaggaggctgaggcaggagaatcgcttgaacccaggaggtggaggttgcagggagccaagatcgtgccactgcactccagcctgggtgacagagcaagactctgtctcaaaaaaacaaaaaaatgagatgtggaagttgcacacgtcacttctgctcacatctcattggccagaattagtcacgtggctatactgcaggagacactgggaaacatctctaggtgtttcatgtgctctactaacactcttggcgagggctcttactgtcaaaggaacaagggaagaaagaatactgaagagaaatcagaagtctctgccattctcaatatactcaataaaatgagggttgcatttccgtttaatagaaaaataagctgaagcttatagagttggatgttattacgtaaagtgatatggctattaaatggcagtcagatcttgaatccatatgttacggtgctcagttcagagctctttaccacattcaacaactgctcttattacacaattacattttaatcttcttgggaggcatgtatggtaattaaaagaatgggctcactgggcgcggtggctcacacctgtaatcccagcactttgagaggcctaggcgggtggatcacgaggtcaggagtttgagaccatcctgaccaacatggtgaaaccccgtctctactaaaaatagaaaagttagccaggtrtggtggtgcgtgcctgtcgcttgaaccygggaggcagaggttgcagtgagctgagatcacaccattgcactccagtctgggtgacagagcaagactctgtctcaaaaaaaaaaaaaaaaaaaaaaagggctttggagtcacaaagtcctggatttaaatgtgttcataaatcataaatgtgttcagtacatcaaagctgttgctacatttgttgctgttgatgttgctgtgactatcagctttggtttgggttttgcacaggactagttccaaatgttggaatgaaaggtgagcctgcctctcctgctactaaggtgcaaccagttgagtagaggcggggctgattcttgctgatctttcccagctgcacaaggccctatttttaaccaaggccccaaaaaacttccaagcttgaagcaaggaagagtggagtggaagaagtccagggaatattgccagaaaaatgctgcttccccatttaaattaattttacatgtggcccagcctgtctctggtctgtaatttactcattcattctcttgtaaaacaaatatttaatagatgtgtccagctctgygccaatttctgagtgagccatgaggcctttcctgcatgtctcaaagtgcagttatgaaaaacgtccacaagggctctgggacagacaccccctaagtccctaaaaggactcaaccatctgctccctttaaggtgaaatttgtgggacttggaggatgtgttgtctttataattttgattcttttgtcttttgtggttaaatgrcatcggagaatctttttctatgttacggaagcatgcatgttagctgatcatgcatttgatttactttgtaatcaagggagcaatatctctttagttgtctattgttgagacctgagactcacttcaaaagtgatttgccacttagaatagcagtcaagatgaggctcgctttttaaatatggcaggagagagtggggggagcatatttgctctactgaggggtttccrcaaaggtcagttcaagggtttctaaatactccagctgctcttcaagtttgttgtttggcctcttktcaataggcgcttgtgctcattttgtgcaggaggatttgtgcaggagaaaatgttggcgttcataactgccattcagttggggagtaccacggtttctctgtttagtttttgattttacaaagaacctaagtttaacacatggacttttcctttctacccgcagccatttctatagcttcattgtaagctatgcatgtattaaaagcatttgaaattgtatttgggctgtgaaaatatctgatgtactgggccactaccctgttgtcttatgttgtaatttataagaatgcacagacataaatgacagtaaagaaccgtttcaggctacagagcttgagagtgcagacagatgaatcaatctctggggatccagttcagcatgaagaacttagtaactcacgaaaaccccgtggagaaggttgaatggctcttcgtttgtctagttactatagaatgaattggtagcccagcatttacaataagcagaagtctgcagacctaggaagaagagggaaagataaaattgatttagaggtaacttgtatttgagaaaaaataatttgccccacatcctaatactaagcttatttatgcttatgtcactatataatattgagaaaygtggaaacgttttgtaaaactgggacaaaaaagttgtggaccaaaatgttgcttaaaaacttgaaatgttctctccttaggttgtagttattctatagcgttaacactattttggtaacttggatgtcatttaagyggtgggaaatttcaaattttcccttccaaaaatagagacaaaaatgtttctaactatcttataataacaatgagaactggagtgctttgataaatcttttcctacctgaatggaattttctcatgttgaaactgacaytaattgctgtgggaagcagatggcattgtgctacttcaaattactgtctgcccgcaggttccagcagtcatgcagctgcgttcttataatttctccactttcacacttcttcctaaatagctgttctgcaaacagacccatcacagaatagctactcttttttgttgtcgttcaggcaactctcctgcctcaacctccagagtaactgggattacagatgcctgccaccacacctggctaattttttttttttttttttaaacagttttgctcttgtcgttcaggctggagtgcaatggcacaatctcggctcactgcaacctccacctcccaggttcaagcgattctcctgcctcagtctccctagtagctgggattacaggcggatgccatgatgcccagctactttttgtatttttagtagagatggggtttcaccatgttggtcaaggctggttttgaactcctgacctcaggtgatccgcccacctcggcctcccaaaatgctgggaatacaggtgtgagccaccgcgcccggtctaatttttgtatttttttagagatggggttttgccatgttggccaggcaggtctcgaactcctgacctcaagtgatccacctgccttggcctcccaaagtgctggaattacaggtgtgagctaccacgcccggccgacattcttatgaaactgatgagagggcagtaacctttcctctttgcagtcatgttatgttaggcttcactattggagtcatctagatcatacaagaggaggaacttaagctattttcatgtgtcatgcctttctctaaaaagaaatgatgcaaggaaaaaaaaaaaaacttcttgcttgtctgatcagacttttcatcttcttgatgaccttcctagatttattaaaaattaccaacttgagaatcaagtttgtgaaactgcatactttgggagataaccttctggattccaggatggaaatcagagaaaagtattattatgcagtttatgatatggtggttcgaggaaattgcttctgctatggtcatgccagcgaatgtgcccctgtggatggattcaatgaagaagtggaaggaatggtaagtaagccctctgtgcacctttctcctttatgtggctggtaataaaatgcaaagtgaagctagtcttaccttaagccttttacattttctgggggttttagttttacagagttacatttagccctttgcaccatacaggtagctgattgttgattttctctttgaagagtttcttggacacggagaatgtacagactactcatttcatagacgatgaatttttggaatttgttgcttcaggctattgctaaagtagatattttagtcaacaaggattaaaaagttgtctaaataacaattgagtctgcctttacatagggaagattaaaaaccgcagttatgctagaaggcataaattgatctcaacccaaagaaatggatttttttttttttttcttgagacagagtcttgctgtgttgcccagactggagtgcagtggtgcaatttcagctcactgcaccatccgcatcctgggttcaagcaattcttgtgcctcagcctcccaaatacctgggattataggcccacaccaccatgtctggctaatttttgtgtttttagtagaggtggggtttcatcatgttggctaggctgatctcaaactcctgacctcaagtgatccacacacctcagcctcccaagtagctgggattacaggcatgtgccaccgtatctggctaattttgtatttttagtagagacagggcttctccatattggtcaggctgatctcaaactcctgacctcaagtgatccgcacacctctgcctcccaaagtgctggaattacaggcrtgagccaatgcgccctgcccacggctggaaaattttaacccacacccatgggatatcattttagggatcaaatggagttggtttctttctatcttttcctcctaattccattcttttccccacttttatgccacatttgcaacttatgtacattttgaaatttgggatttgggtgatttgccaaatggatagatgagtttattctattagtatctaggagaattcttacagacctagaggattttaaggccagataggacttatgagatcacctagaccaactattggtgatagagcccaaggattaagtaatttactagagagccytaagtaaatgagcagcaggtggaagctcaagcctctcctcactcagccccagggttccttcccctaagctgtggcctcccctcatgaaggctgtgcttatgtgctgttgccttttcaaagattgttagtccttagaaggtacaggattgagtgtattcagccctttaaaaacttctgccttccctttactccagttagaacttttgttgcacaacagaagttgaatttttgacggagcctgaaggggagggaggtatttctctaatcttattggtccatctttcagaatgctaggtagattatgttccctttacggcataacaaatcagctgtgtagctaatgtcctgttactatcacgggtctcacagcatgtgctgttgattcaggcccagtagggtcttatggtatgtgctttggaactggttttcagtttatgtaaaaccacctggtaataacaggactttagtcttctgctaactgcattcccaccaaggtgggtccaggagggacctgtctgtcctgttcctgaattccattctgtagaaactcttgttaaggtgagatgcccatatacatgcatatttagtggaccaaaaggccgtaattcatttatcatttatatgcctcaagggtcgtaagtgtgccttacagtgacacaaggcaaaatcatatatcatgggcctttcatcaggcaaattaatatatttcttttacgagatcttatatttccttacataaaaggaaaacataaatgtaaatgtgataaatgattaatttttaaaattttactgtcattgaaagaaaaatttaagtgctatgcctgaagtaaaaaaaaactaaaataagctagctaacaaaaacctttttaaaaaaatggtgatttggctaagtggtaaatcgtgcagtaatataaattggtttccaggtggtatgtatgcatttagttctacattataacttttgtagatttctattacaataggttttcttaaaaaaatcttaagtaactagtttttttttttttttttaattttaagtaattttcttcatctgggttcttttcatagatactcagtaaaatatttcttgtgcatccactatgtaataggaacattctagagatgaggcatgtagccatcaacaagacagacaactcactgcaggcagggagaaaataaaaacaaccaaacaacccttttctgtggtgagctagagattagtatgaaaaagggttttaaactttcaattgattatggagaaacgtggctattcatacatctcttcctttgttctctcctgtttttataactttcaaggttcacrgacactgcatgtgcaggcataacaccaagggcttaaactgtgaactctgcatggatttctaccatgatttaccttggagacctgctgaaggccgaaacagcaacgcctgtaaaagtaagtctgtgttgaagggacattttaaatccattcaggctctagtatccatttcctaattagaggtactgyaacagtgtactgttttgcagagggtagaaaagttactgtcttttttccagcttcaccctgatactcctagacaaccaacaatctgcattcagttaattaatattcactgaacagcctctgtgtgtttgacactgagctgagtagtttggcagctacagtagaaaactaaggtgctgtccttgacattgtatctgttttgttttttggtttttttttgtcgcctaggctgtagtgcagtggcacaggcggctcactgcaacctctgcctcccaggttcaagcgattctcctggagtagctgagattacaggcacgcgccaccatgccctgctaattttttttgtaattttagtagaggagaggtttcatcrtgttagtcaggctggtcttgaactcctgacctcaagtgatctacccaccttggcctcccaaagtgctgggagtttacagatgtgagccaccgcgccagggctgtttttaaggcaagatgaccgtgagagaaaaatgaaagaactatatggcagggtagctgatgaaggtctaagagatatggagtagcatttttggccttgtttctgtgccagtccagctgcggcctctggcatacctccctccatccatctcaggggttttctccgggtggagatgtagccggcaacaccactgcccctccccactccacaaacagtgattctgatgcatgtcctccccttgaagagcagctccgcctctgcccccactgagaaggactattatagaagttcagcagccagtgagagtagggagtggtcaaggcttgctttgtaggtaaaaaccagatggcccttgatggatacttaacatggagaaggaagggagggagggaggaagggaaggggaggaaaggaaggaaggagagagaggaaaggaaggaaggagggagaggaaaggaaggaaggagggagaggaaaggaaggaaggagagagaggaaaggaaggaaggaggaagaggaaaggaaggaaggagggagaggaaaggaaggaaggagggagaggaaaggaaggaaggagagagaggaaaggaaggaaggagcaagaggaaaggaaggaaggaggaagaggaaaggaaggaaggagaggaaaggaaggaaggagagagaggaaagaaaaggaaaagagaggaaggaagatgggagggagttcaggtaagaacaacaatgtgaagcacaaggcckcaaggatgttcttgaaaccatcacagagtccatgctgggaaggattactccaaggytcacttcaaccagtgtattgagagcagtactctgttgggcaccaaggatgtgagtagataagacacagtccctcttctgcaggctgttgtgttgcagggggagacaggcaaggtgggaggctggagtgcagaggctcaggagggccaggctgagtcaagcttccctgtgcaaagacaagaatgggattgttaagcccgagagcgagatgattaaagctgggtggcaccaagatgaccgccgaatgggctcgcagaaggaagcgctgcacccaagggggtcagctagctggctgttaaacagacctaccttccttactatggcctggcctggtgtggtggtgggaatatgggaatacggagaagggaatccatccttcaggcctcacggtccttgaagcagggagcccgtggacaggctttcctagcagcacatcatctggaaggtccctcgctacagtgttcttccatccagtcccacctcgagtggaccagaaagcgccctcagtgggatggcagccatcctctgtcatacacttccaaagggactttcccttagagttttccatttttcatagcccattctcttccacagaggtcagataactgtttattttataaagttcacatttttgagatttctcatctactttagggtttaaacagtgtcatcggtggatgcgtcctttttccccaggagtcctgcttgttgactgccattttgtctgaacttagtccctggtttcctaaaggatcttcctgccacccccatcctccattggtccatagatttaaaaagcttttcttgacgttgctcttgtcacgcagaatgtaactgcaatgaacattccatctcttgtcactttgacatggctgtttacctggccacggggaaygtcagcggaggcgtgtgtgatgactgtcagcacaacaccatggggcgcaactgtgagcagtgcaagycrttttactaccagcacccagagagggacatccgagatcctaatttctgtgaacgtatgttgagaaatgtcactcactgtgtgggacctacttcagattgccttccaaaytgaatagtcrgtagtctcagagctcataktatgagcagtaaagccagcattgttattgtaattgcasttgaagacgctgggagtggaatttacttggtagttgtgctgcttttagtcgacttttgtgagatttagagggaggaagggaatatatgtatttatacaaagatacattgagtttcctcctgattttaacctggtgctttgcattcttctcaggatgtacgtgtgacccagctggctctcaaaatgagggaatttgtgacagctatactgatttttctactggtctcattgctggccagtgtcggtgtaaattaaatgtggaaggagaacattgtgatgtttgcaaagaaggcttctatgatttaagcagtgaagatccatttggttgtaaatgtaggtctgtttgctaaaaagtttgggagttttcttgtgtttgaaattcccattttactttgtaattccaaagccagattattatttgaaactcacgtggtctgtgtttctccacttyattttgttttaatacagcttgtgcttgcaatcctctgggaacaattcctggaggraatccttgtgattccgagacaggtcactgctactgcaagcgtctggtgacaggacagcattgtgaccagtgcctggtaagtaaatcctcattacgtgggatgggtggttggtgaggatgacatgttttaatagagaagccttttcgccattgtagagtctgcgatcaccctcacgtgtacgtgttaaaagacatgagtagacaatgcacacaataggaattactaatggatgatttcacaagatgttcaccatccctgttagaagtgtaaaggaaagccacaataaaataccacttttatagacacaattaacacaagtttttaaaaatgggaatgtttactattaggatatcatgaggtactgctacttcttggctgctggtgggcatccatattggtttgtacttttgtgaaaagcattttggagatacatatcagtagcttgtagaaatgggcataccctttgacccagtaaccccacytctgggaatctattctaatgaaataatcagaaaattggacaaagatttattctccagaagactcattgcatcttttattaatcatagcagaagrcttggaaacaacagtggaaaaatagttaagtgtggggacttctatacaatgtaatatttggttgccactgaaaatgacaataacatcaggaaatgctcatgctgcttgctatatttaaaaaaaaaaacacacacaggatatgaatagtatcttgattaagtaggaaataaaattcatcaaggaaaacaaaatctggaaggaaatacaccaaaaagttcactgtaataattccaagtaggataattatgagataagtttttwaaaatctgtatttttaataacattgttatactttctaatttagggaggattcactacccccaaattattaccattaaatatgtatatttatatataatcttaatayattcttaaaggagatttctggaagtctaaattgatgagcctggtcaggtgtgatgactcatacttgtaatctcagtgctttgggtggccaaggcaggaggaatgcttgagatcatgagtttgagaccagcaagaccccatctctaaaattttttaaaatcataaataaaataggctgggcacaatggctcacmcctgtaatcccaccactttgggaggctgaggcaggtggatcacttgtcaggagttcaagactagcctggccaacatgatgaaacgccatctctactaaaaataatagaaaaattagctgggtgtggtggcacatgcctgtaatcccagctactcgggaggctaaggcaggaaaattgcttgaaaccaggaggcggaggttgtagtgagctgggatcacaccactgcactccagcctgggcaacagagcaagacttcatctcaaaaaaataaataaaataaattggtgaacctgtttttatatactcatttttgaagtgcacagagctcctcttccctactgttccatttctctttatttccatctctggtgctctaaagatctgatttcctcgtggctcagtggtgagaatagtcgtagctgtatgctacatttccacataaattcttggagggctttctgtatgggattgatgacagactgaactgagggcagatttaaaggcctgccaaatccttgccataattctcttacagccagagtaattataatgaggaaaattggtatctttactgcttgctcttcttagttgttggatggaggttatctatagggcagagcagctagtctttgacctggcacgatcctgtgattgtgaacggctctcttacgccagtgcctacagctcaggtttcttgatttcagaatactccttccttttgttggctttctgctttaatgatgaaaatgagcatttggtggaacagccgaaacaagctttaacttgcttgttgctgagtctgttgcataattacagaaacctaccgttacatgtttcacgttttgttctgcagccagagcactggggcttaagcaatgatttggatggatgtcgaccatgtgactgtgaccttgggggagccttaaacaacaggtaaatggagctctacgtatgctcttgtcctcagtcttccaggaaagtcatgacttayaggaatgggtgacattcagttgtttctcaaaaagacatgcaaaatattttttgtatgtcttgataaatgtgtgtaggtacctctatggactagattcccagtgatggaactgctaagtcaaagtacatatgtatttttaattttaatagagaatgttaggttgttccagacatattgaactagtttattttcctatcagttacaaaagtaccttttcccccatccccagcaacagttggtatcatcaaccattttatttttcaacaatctaagcacatggaaaatggactcctgttttgatttgtgtagagaatcttttcattttctttttttcttttttttttttgtgacttccaagtccattaatgaaaatcacatgagataatgttgagctacttaaatatgctagtattccttgaataaatgaagcataaagctccaccagaagctatcagaacacacatttggcaagatgttaaatctgtgggagtttaaccaccttcgagtcaaagagaatgttggtctctgttcctggctcagagtcagaacatctggaacagatagtgtaagtgactgctgagagaatagacagatgtttccctgtggccttgagtcttcccagagagaacactctgaattcattgagcaagcttcatgtactcaaaaatggactttctttcccaattatttcccaacaccatagtagtctgctgggaaggaatgaggtattcagcagcaagaacatgttgygtttgtcctctttatttgggtttgttctgttcgaggtcgtgccatagacccagtacagcatgtagcctctgaaatccggtgtgaatatctgttcttagaaaacctccagagaggaggaagctaggataattccataaaagcagggaagaaagacagaatgctgtctgcttgtggaatcacttttctgacttttcctttgtgactcccagaacacatgttgaatcctttagtaaatgactcctcagttcaaagctgtcatcactcctaaagtccttcttgatgakataaaagtggcatatgcaattccccaaattatgtcataaactcaggaatgtcctatgattcttaaccctaagtaagttttgttcctacactcccttcctctttttctctattccatacacacttcctgtctgtctccacccacgcacaggccctagcctgccctctaatctcttgtgcaaaaatttataaaaaccagaatgtattcaccaagagagtttgggaagcaaaattgtctagtaaagatttttaaagcaggtaatcatctgatctttctagcatgattgatgggatgccctatctttgagaatcattggtggaggggaaaaaaagaacatttaaagatgccttgtagtctggtgactctagagtgttttatggtgagccttttcaaagttgttgtccctcaagaggaatttccccaggagccccttaggcagggtcaactgaagcactgattctactgggagatgtgcacagatgccgcttgggaaatgtttactggatgattggtttgttgcaatcactcatcaaaaccttttacctgatatttctttttacgtagtaaaagaaatacgttgtaggtactgaataaatgctgattgagtagaatttaaaaataaaagatttctaagatgttaaaaactagatatgtactccttagagaggcaatctctaaatgtgatcccagacactmcttagttactttgttgagggacagaattaaccataaaaatcactggaagtggtaaaagctttaagatgttttgtatagtgagctaaatggatttttggtagtacaacaaaagtttaataatccatgtctattatattgacaactaacctgaactttggaataattaaagaagtggccaggcgcgttggctcatgcctgtaatcctagcactttgggaggccrgcgcgccagatcacctgaggtcaggagttcaagaccaaccaggccaacatggtgaaaccctgtctctactaaaaatacaaaaattagccaggcgtggtggcacctacctgtaatctcagctacttgggaggctgaggcagggagaatcgcttgaacctagaaaacagaggttgcagtgaaccaagatcacgccattgcactccagcctaggcaacagagcaagactctgtctcaaagaaaaaaaaaaaataataagacctaattaatttaaataatctaactgaagccaagttaatgaagttttgcctagtagattacctgttttaatgaaaaagaattggcattggttgctaggtaaatgctacttgtaaatgtttaataacattgaaaaatataaacatttttacagcatccttcaagattattttaacaatgaaatgtagagttttcatatctggcttgaagcccacccccccctttttttttttttttttgagacagagtttcgctttgtcacctagactggagtgcagtggcattgatcttggctcactgcaacctccgcctcctgggttcaagcgattctcccacctcagcctcccgagtagttgggactacaggcaccagctaccacactcagctaatttttgtatttttagtagagacggggtttcaccatgttggtcaggctggtcttgaacttctgaccctcaagtgatctgtctgcctcaggctcccaatgtgctgggattataggcatgagccaccatgcctggccccacctcttttttgaactcaccgtggtgaagccccgaaccctcccttgatgcattgcttctgcatctcttttagcatttattttgctcttatagttgtgttaaaaaggtcyctttggacagagattatgtcatctttgtttttgcatctcacttggcacccagcacggtggacctggcaggtactcaataaatgagggactaaaatttattgtacttcgaatccagaacggaagttagtagatatttttatcattgtattgaatgactatggtgtagctaaccctttgttaattataatcatgtactgcataataacatttcagtcaaggatggaccacacatacaacggtggtcccataagatactgtatttttactgtagcttttctacattttgatatggttgaatacacaagttcttgtcattgtgttacaattgcctatggtattcaatacagtaatatgctgtacaggtttgtagcttaggaacaataggctatactctacagcctgggtgtgtagtaagctataccatctaggtttgtgtaagtacactatgatggtcacacaacaacaaaattggcgaacaacacatttctcagaacatatcccagtcattaagtgacacatgactatactgtgatagaacaggattataggacgtaggtcttaccaaaaagaaagtgtcctagttgggggtggggaggaatgccaccctgagaaaatgaatggtgctgacggaacactgtggttggttattatgaatgatgttttttatgctttaatatttttctgcctaattccttagtaatagggaaatgttaaaattccattttctttattcaccaccatttaaatgaaatggaatttttaaatgttgccaatttctatatttatgattttttttttttttttttgagacggagtctcgctctgtcgcccaggctggagtgcagtggcgcgatcttggctcactgcaagctccgcatcccaggttcatgccattctcccgcctcagcctcccaagtagctgggactacaggcacctgccaccatgcccggctaattttttgtatttttagtggagatggggtttcaccgtgttagccaggatggtctcaatctcctgacctcttgatccgctcgcctcggactcccaaagtgctgggattacaggcgtgagccaccacacccagccataaatgtatttttttaagaaataatcttggccttcacccactgagaaaacatagagcctgtatcagttttctattgctgccataacaaattaccacaatttggttgtttaaaacaatataagtttattattttccagttctatgtgtcaaatacagtctcagtggaccaaaatcacgatgttggtagggctgcattgttttctaaggctctaaaggagaatctgtttccagctaatttgggttgttggcaggattctgctccttgcagtcgtaggctgaggttccccttcttttgctggctgtcatctaagggctattcttgtcctctagagctgcccacattccttgactcatggtcccctctctccatcttcaaaggtaccactgggtcaaatccttcttatgtcacagctctctgacctacttacttccctgcctgcctctcccacttttaagaatttatgtgattagattggacccacccagatcatccaataatcgctccatcttgatgtccttacccttaatcacatctgcaaagttccttttgccatatgaggtaacatccyacagataacagggatgaggatgtggacatctttgggggccattattctgcctcacacaggccttatttattttatgtccttattctcccttactgatttaatgaaattgaatctctagtttacagagaaatttgtagagaatacataagaatctaagatgtgccatttctatcagatttgatttttacttgaacacaggagagagtaattacatgtaataaatcattggtatcactgtgaagaagccaggatttgtgcttgagttttgaaagctgagatttgaaaggtgcgattagtgagcaggggagggcctccgagctgggagggaaaagatgggtaaaggcacagagatgggaatgactgtagcaaggtcgagatctggtctgatcttgaccatctctgcccacattcccccatcaccctctttgctcctgttattcctgtcctctctctgcctgtcaagtcctctccaggctttaaggacacctctttcatgacgcctccctcagtcttctcartcagatgaatcatatcttcttctcccttagtgctttgcttgtaactctatcaatgcataggttcttactgcattttgatttgttgcattggttaatttctttattgtttatccccaattagactgtaagttcttgaagacagggactatttttttttctatttctctttctgtatatcatttagccagaaataatagacttagtgaggaagtaaggattcattcagaacaaagttcacaatggactaaaatgtgagaatacctgcactgrgaagcaaggctgctagggccaatatttgatcagtaaatatttgctgaagagtatgaggagtgtggctcattggaaagcaaagagtcggcaccagaaagagaagccgttttcagaggatgggttatggaggctgcagaaagccaggcagaggcatcatggcttgatatcataagaaacaattgtgggttttcrtgaaacaatgaaagcagcactgtaggaagatcggttggcccgtggtagacaggatggactaggcagaagaggaagaagaatttgagaggtcagtttaggagattgttagagtaacaggtatggggtgatgccatcctggactgacgcagtggcagtggcagtgacaatgagaggaagctgctaagttgagaaacattttgaagtaaaagctgagtattgggataaaggaaagagaaggtgatgtctcacctataccatgagaagaattttaaatctactggcagaaacagcagagctgaggataagaagtcagtgtgggtggtgatgatctgtttgggacaagatgaattagagatgacagctggccagtccatggaaatgtcccattgatggctggaaatagagaagcagagcccagccacctgctgggtgctgagagctgtagggtgagggccatctgcataggaaagccacaagaatgagttcactgaaggagccagtgttgaatcagagccatgcctatctgtgatgacaattcaagcctgtggacacagacttgtgattggcagggccgctgttaagggaattcctttcacatgatcagctctcatggagccattccttgtttagaattgtgctgcagatagaggcagcaccgggagcctgctggcgcctttgtcctcaccttcatttgctcgttctctaatggttgcatgtgaaggtctagttgttttcttctttggtggttcatgttttggatatttgttgtctcagtaaacatctggggaggaaagaattttcttttgtccatatgatgtaatgtctgatgcctgaatttctgaaaatagcttttgttcatggactgtgccaaaagaaggctaggtcctaattggaacaagctttcctttcttgggaattggctatgggacgttaagaattcctattcctggctgggcgtggtggcttacacctgtaatcccagcactttgggagaccgaagcagatggatcacgaggtcaggagattgagaccagcctggccaatatggtgaaaccctgtctctactaaaaatacaaaaattagccaggcatggtggcagtcgcctatagtcccagctactcaggaggctgaggtgggagaatcgcttgaacccaagaggcggaggttgcagtgaaccgagatcgttccactgtactccagcgtgggcgacagtgcgagactccatctcaaaaataaaaaaataataataataaaaagagttcctattcctgtaggataacaacatgatacacaaaaagaggacttcagctatgctgcggcagggtcgtttaggattttatttatttatttatttattttgagatgaagtctcactctgtcacccaggctggagtgcaatggcatgatctcggctcactgcaacttccacctcctggtttcaagtgattctcctgtctcagcctcccgagtagctgagattacaggtgtgtgcccctacacctggctaattttttgtattttcagtagagacggggtttcaccatgttggccaggctggtctcaaactcctgcaagtgatccacctgccttggcctcccaaagtgtgggattatagacgtgagccactgcgcacccggccttgggacatttttaataagcctgtgagtgcaaagtgttcctgtgagttgcaacttgccttaggtaccttgtttaaaactttgggatgagaaaaaaagaaagaacaaaccttgagaatgagttgaaagtaacaattccaaaccacagctcttctttaagtgaagtaaaaatggatacatgtaatttgagttttgtattgtatacaaaattatgatactaataaaagggacataagctgagaacagaagtttcactcttgttgcccaggctggagtgcaatggcgtgatctcagctcacctcaacctctgcctcccgggttcaagcgattctcstgcctcagcctcccaagtatctgggattacaggcctgcgccaccacgcccagctaattttgtatttttagtagagatggggtttctccatgttggtgaggctggtctcgaactcccaacctcaggtgatccgcctgtctcggcctcccaaagtgctgagattacaggcgtgagccaccgtgcccagccgcatttcttatatttagcatagcatagccaatggaaagggggaagagagacacaagatgcagaagtaaaaatcacagaatttggttcctgatggagtgtgaagaaagaatctggagaagaacggggactaaatttctgacttggttgactcagcaggtggtagtgccttcaccctgatagagaccatccgagggattgagggcttctgtcttagatccgttggtttgggatgctctgggacagccaagctggagatgttcttcagggagctggatatttgagcctaaatctcaggaaataagcaaaagatgtaacatgccaaagcaagaargtttgggatgtggaaaaccttcatgtgatgcggacggcgtgttagtcaagagagggcaagggaggtaaaaccgagaagaccaggttctcagccacgcttytggagttwgggattaatccataggcactayttttttccacatatgtattttctgaagaaaacaagaacatgctatgtatttggtcctgtgtactgagtaatggcagctgtagagctgcttctggcgggttgactcgcgtgaccatgaactcagctgatgtggctcctcctcccttccagttgctttgcrgagtcaggccagtgctcatgccggcctcacatgattggacgtcagtgcaacgaagtggaacctggttactactttgccaccctggatcactacctctatgaagcggaggaagccaacttggggcctgtgagtaggggagtgtgtggcaggtcggtaaagcagtgttttggggtgtagtggaacatacatgctttgtaaagaccccatttcagaagcatttttatagctttgtcagtgagcacaaaataaggatcaggaccatgccttcctgagaagagtcatatttaaagctaagtaattctatmactcacaaattggctttggagcattcactgataaggcttttggttggtttaagaaatgtgtctttacaagaaacttttcttctctctacttatgctccaaagttatcaacctagcatggtaaatactgaggcaaggatattttttcatctattcatccccaaatttagtgactttaaatgtatgcctggctcttgagctggggtggctgaaacagctggaggctggctgggcatttctctccacacgaacacgacctttcttttttctttttttcgagactgagtttcgctcttattgcccaggctggagtgcagtggcactatctcagctcaccacaacctccgcctgctgggttgaagcgattctcctgcttcagcttcccgagtagctcgattataggcatgtgccaccacgcctggctaattttgtatttttagtagggatggggtttcatcatgttggtcaggctggtctcgaactcccgacctcaggtgatccgccygccttggcctcccaaagtgttgggattacaggcgtgagccactgtgcctggcgatagtgagatttcttagatggcttccagcttccaaaaagaggaaacaagctgccagctctctgaaagcttggactcagaagtcctagaaagttcckcaggttctgttggtcacaagtcacaaggattcatggaaaggataacatagtttgcacctcttgatgggtaaggccacacacgggtacatacagatacatacagggaatgaaagagttgatcccagccatttttggatatgaccaaccacaggtattaaaaaataaccctgtaaacaattaatcagaattaactcatcagttgtgaacattcattatatcaagtttcttcacttgaaaatggagcctgaaactaatgccagtatgagagacagaaatccactagatactggactaaccttatggagaatctgggaagcaccttatgattcctagacttgcttataacggcatgtgggatgttctcttttttcttttatgcttactctcctggtcatatcaaataaggtatatcccaagcctttgagtgctatatccagtgtcccaagactgctccaaccacaaaactaaaaagaaaccagtttcctgtttggatatcagaaactttttacaatctattaggggagatttgactataaaaaatagacataaggtagccaccctttttgaatctttgggtgacttcggattactttgactattgaaaattattgaattccatttcaaatacagaataaccattgtttgccatgccctcagggggttagcatagtggagcggcaatatatccaggaccggattccctcctggactggagccggcttygtccgagtgcckgaaggggcttatttggagtttttcattgacaacataccatattccatggagtacgacatcctaattcgctacgagccacaggtaaagaaaccacttagtggactggtggaggagggaggggagaatcagtagaaaaatagtacttctamtgggtattatatatagttatgaaatatggaggttgcattagaacagatcagattcctatagtctcacctcctccatggaagttaaaataaatgtaccattttctttctttcttttttttttttttttttgagtctcgctctgttgtccaggctggagtgcagtggtgccatctcggctcactgcaatctccgcctcccgggttcaagcgattctcctgcctcagcctcctgagtagctgggattacaggcatgcgccaccatgcccagctaatttttgtatttttaatagagacggggtttcgccatgttggccaggctgatcttgaactcctgacctcaggtgattcgcccgcctcagcctcccaaagtgctgggattacaggcgtgagccaccacacccagtcaaaacgtaccattttcttgaatccagtttctcaaacgtagtgatcttttgtgaggcactcaaccttgctgacractgaggtggtgatgaggatgtatgagatcctctccttccctcacaacctggctgtgcagtgacagactgaagccccgaactgtaacgaaagactgaaggtgacggtgtaacagcagagagatgcatgatcctagaagatgggcatgcaccagccagcccgagccagggctaccaaaacrttttcctagagaatcagagctaggccttaaagtgtgaatggaattgtggaaagttggcacaaaagtaagaaatagtgtgagtggaagagagaagagagggttttgtttttattgagaatcattccacatagcttgatgagagatatggttggagatgctgttggcaaaaatactaggattagtaaaggaatttggactataatattcacaggaagctattgaagcatttcaagcaggggattgtcattatctgagctgctttaaagtggactgaaagggacattgggaagaggcagaaaacagttgagaggtgtttcagcatccagggcagaagggatttgggctggaaccaggggagtagcagaggtagtagtaaagagaaaagtgaagagcaactgtttgttttccatttcaacttggcaattgattgattcagagaggtctttttataaacaggcagtggtgggctaactatcttttcattgtttgtttcttattctagctacccgaccactgggaaaaagctgtcatcacagtgcagcgacctggaaggattccaaccagcagccgatgtggtaataccatccccgatgatgacaaccaggtggtgtcattatcaccaggctcaaggtcagtgtgacggtggtttggcagctcaacgggcttcatatgcaaattagtatttttctaatattttgcgagttttcaagtcaccatttcagagccagacgttgactgctgacttttttcctttggaattatcgatgcagagctttstttttaatttttattttttggatgcaygaaggttgactttcgttgttgtctttcttttttgtttgggggcagatatgtcgtccttcctcggccggygtgctttgagaagggaacaaactacacggtgaggttggagctgcctcagtacacctcctctgatagcgacgtggagagcccctacacgctgatcgattctgtaagtgcgagattgcttctggcatatgcaggaaagcctgggcggaaagtgcccagctgctctcagggtgttttgttgaggggtaatgctgaggccagcgtaagcagaatcattctttcttgcctccgcggttactttgcttatactccaccccatggaaaggatttattccttctaaaaatataaaatgtcttttaaaaaaaacagcatttcactaggcgtagtgactcacacctgtaatcccaacactttgggatgctgaggcaggaggatcatttgaggccaggagttcaagaccagcctgggcgacaaagcaagaccccatctctaaaataaaaataaatagcatttaaaagccatcaagctgtgtaaaacatatctaaaatttcctgccaagagtatttaggaatagggaggtttatactttatttaatgagtctaatgatttctgttcaagggtcaaagaagcatttgggttttctacacgtttgcttgcttaaacccatgccatggggcaccactgtaaggatgtttggccgttctcatttcttcacagcttsttctcatgccatactgtaaatcactggacatcttcaccgtgggaggttcaggagatggggtggtcaccaacagtgcctgggaaacctttcagagataccgatgtctagagaacagcagaagcgttgtgaaaacaccgatgacagatgtttgcagaaacatcatctttagcatttctgccctgttacaccagacaggcctgggtaggtattgctgggcagctgcagcagctgctgtttctggctctgagtatatctggcacatgaagtacagtggagtgcccaccccctagccctgtgttaggcagcacaagggaaatagtgtctcagttacagtttgtctttatctttttaagtaatatttcagtgaaagagcaccactgaagatggaattgatattcaagaaatatgcaaataacaggtgaccaggggaaaagtccatgaggataaagcatttccataagcagggtagggagaggggaatggaatcagagaagcatcaaatacctgaaatgtatgtttttctctttgaaacrtcagaccatcctctgaaggtcactgggctttggtctaatgtcctgtgatatttgagctttgaaggcaaggggagaaaacattaatgacctcctgcctagaaaaactgttttgatctgccaactctgcctcccctttcttcccttccgctcatcatagggatgatactgttttaaaccagaactctgaataatccaaagtagttaaaggagaaaggatcagggagagcccgatgatgtgctgctccgtgtcatgggttctggcctctctttacccacagcttgtgaatgcgaccctcagggttcgttaagttccgtgtgtgatcccaacggaggccagtgccagtgccggcccaacgtggttggaagaacctgcaacagatgtgcacctggaacttttggctttggccccagtggatgcaaacgtaggttcctcaaaagcattgttatgcattcattcagattaactcagccattgtggcagggttccattgctgcagagccgatgcttccctcctgaagttgatcacaccaacccatgagcattctgaattggggacagggtgcttataaaaggagcatgtttccattgaatgagtttctcaaggcagttccttgtttgcctgtttctttagcttgtgagtgccatctgcaaggatctgtcaatgccttctgcaatcccgtcactggccagtgccactgtttccagggagtgtatgctcggcagtgtgatcggtgcttacctgggcactggrgctttccaagttgccagccctgccagtgcaatggccacgccgatgactgcgacccagtgactggggagtgcttgaactgccaggactacaccatgggtcataactgtgaaaggtatgcagatgctgaaagtaaggagaatgtagtgatctctggctgagcagacagcatcttagaccaaccacagaattcatctccaccaggcttcagctcgctcattcatttctgaccacctcactattttctaggatcttgtttgtttatccagtacatattgagttgacatcctctatgtgccaggcaccgttctggtgctggagataccgcagagaacaaaactgacatgaatccgtcctcttggcgagtcaccctagagcttaccatagggctgtatagaaattctgtctgtctcagcagattctggcggaggataagagttgtgaaatgctcctgcctaatttaggcgaaaggagaaactaatccaaatgggattagtcattttaaatagctttgtttttcagaacgttttatgcaactacagtttccaggagactctataaaacatgcctaagtagatctgttctccagttagcaaatgtcagttgaataatcattatggatgtgctagatgtagagtaagaataggagagagaatatacctccataacattaataggatagctcaatagataaaaaatactccgtatgaaaaagttacctgctgacttacactgtttattactaattaagaaatgcagacagtactgttagaactggctttttgggcgtaatagtctccaccttttcactgtgataatttttctctcttccaacatccattcgccctatcgaagatatttgtttttaaaagtcacttgtgaaacattgcagcaagtgcttcagtcagtggtgaagttactcatcaggtgaaagagaaattgttagtgaaaaactgagtatgtgattaacttttggcatgaagatgttcatggaggcaaacacgtggctctcggctcaatgctagaacggtactcaagaatttggaggtcccacggactaccctttgaataaaaattatcccttccaaccttaaaattgtgttgtagaaagatagcaaggacacagttatacaacagtgaaaggaggaaattaatattttggggtcatctttttcttttcagccgttttccattattgttttttcaaagagagatggagaataagtacgagagaaagatatgagaaaacagagaaagacatgagaaaaagattaacagggagcagagagaggagggggaacagaagcaaacagcaaagggagctgccacaatgctgattcagaatcagcactcacactgtagaatgcatttgaacgaacatcatgtcagaatggcatagttgatatctgtgaccagctttggattttatttgtaaagggttttgagaatgagaaagggtatgggagaaggaagatttttaacaataggtttgggtggcaaacacttgattttaagtatttggaattctactatctagtttgagccagtttctcatcattcttttttctcattccaagataaccagagtttcaatcctgtgaatttacaaaaaaactctacacttagattgtccccaaggggaggcaagaaatgaacactcagtttctatcatgatgtatttggattgcctccaaaagacttgagaaacaaattgaattggaaatccttggacctcagttcctggcccaattctgcttctaacttgctttctaaccttgggtgagttaggatatccagcttctagaaaatttttttgagacggagttttgctcttgttgcccaggctgaagtacagtgstgcaatctcagctcactgcaacctctgactcgcaggttcaagcaattctcctgcctcagcctcccaagtagctgggattacaggctttttgttgttgttgttgtttgtttgttttgagatggagtctcattctgttgctcaggctggagtgcaatggtgcgatcttggctcactgcaacctctgcctcctgggttcaggtgattctcctgtctcagcctcccaagtagctgggattacaggcacaggccaccatgcctggctaatcttttgtatttttaagggagatggggtttcaccatgttggccaggctggtctcaaactcccaacctcaggtgatccacccgctgcagcctcccaaaatgctgggattacaggggtgagccaccgcacctggccggaatatccagcttttcataagtagaataactaggttggatgagattgtctccaaagttccttcaagatgttatgttgtaggacataaaaaagtaacataattaccattcaccttgacaagcaggctaacatagtaaaagaatgtattgctttaaggaccccaaattcaaattctggctcattatttaactagttgtataaactttgagaatcctttgacctccctgtatttgttatctttaaagagtgggattgacatgttggatatgggaattaataagtaacatgacccatccctgcctgagtttggaaccacctgagagacaaacacaggggctacacagctggagagcacccctgtcaccccctcagctccagtactgggaaaagctgggttatagcacatggctttagacctgtggccaccgtgggcttgccaacacatcacccctctcaggcataggcagaggctgacaggtataagccccgcctaggaggacagactctgtaatacaaggagggagcagaactgaatggtcaggacaggcaggcagctgatagaacaatcaagtgcacatggggagaggtggctcttcctctggggagcagtgagtgaggggccagatgaagccatgggtgtcactcgaacgcagtggtcctgcaagtaggatccctagatcagcagcatcaatattatcggggacctactgaatcagaaactcggtgggaggagcccagtcatctgtttcaggtgattgtgattgaagctaaagtttgagaaccactgttcccatagtaaatcttccacatgaaaacataaagagaggtgggcagatcacctgaggtcaggagtttgagaccagcttgaccaacatggtgaaaccccatctctactaaaaatataaaaattaggctgggtatggtggctcacacctgtaatcccagcactttgggaggctgaggtgggtggatcacctgagatcaggagttcaagaccagcctggccaacatggtgaaaccctgtctctactaaaaatacaaaaattagccgggcatggtggtgcatgcctataatcccagctacctgggaggctgaggcaggagaattgtttgaaccaggaggtggaggttgcagcgtgctgagatcgtgccactgcactccagcctgcgcaacagagcgcgactccatctcaaaaacaaacaaaaaaacagccaggtgtggtggtgtgtgcctgtartcccagctacttgggaggctgaggcaggagaatcacttgaacccaaaaaacagaggttacagtgagctgagatagtgccactgcactccagcctgggtgacagagcaagattctgtctcaaagaaaacatgaggagtggagaagagtgtgcccaaacagaacagttttcaagactttccttggaacaggtttcttagaactgtggggtcatggcctgttctcttctgtgactgatgcaggtgcttggctggttactatggcgaccccatcattgggtcaggagatcactgccgcccttgcccttgcccagatggtcccgacagtggacgccagtttgccaggagctgctaccaagatcctgttactttacagcttgcctgtgtttgtgatcctggatacattggtaagtcgtgtgcatactttgggaggcaaagagagagaaaaagatgtctttatgagttcattgttaatgagaaaaaaagatgcaaagtgaaccaattaagtctacttttataatttttaattaaaaattagaaaagatgctcttttcctatttggcacatggagtggagtcaattcatattgagtctctgataagaacgttataacacaaagcaggaaagtaagctcgtggaaatctagaaaccctgtggaacacttttctgttattaaacattagaaagattaacttaagttttactcstgcctttctttatccaactcctagcaaaagtatctcaaagctgtgaggttaccaaatagtagtcagaagaaagaaataatatcatccagggaatcacaagatggccgaatatattcttcactgttaatgatactcacattatctatcaagattcaattaatctagctgggttgttaaaaactccctcttatttcatccttgaagccactgttacaaatactaattatgtttatatgtaactcagtaaaatttttttgcatataatttcagaatttcttagggaaattggtcatcattaaagatcccatttttcaggttgctcacagaggagtggtaacttttcagtttctgtaattctttgttttgttttgtttttgagacggggtctcactctgtcacccaggctggagtgcagtggcacaatctgggctcactgcaagctccgcctcccaggttcacgccattctccagcctcagcctcccgagtagctggggctacaggcacctgccaccatgccccaccaccacgcctggctaattttgtttttgtatttttggtagagatggggtttcaccatgttagccaggatggtctcgatctcctgacttcgtgatccacccacctcggcctcccaaagtgctgggattacaggcgtgagccactgcgcccagcccactttctgtaattcttgaattaggctgggtgtggtggctcatgcttgtagttccagcactttgggaggctgaggcaggaggattgcttgagcccaggagtaagagaccagcgtgggcaagatggcgagacaccatctctccaaaaaaaaaaaaaaaaaattttacaaaattagtcaggtgtagtgccgcaaacctgtagtcccagctgctgggaaagctgaagtgggagaattccttgagcccggaaattcagggctgcagtgagctattatcatgtcactgcattccaacctgggtgataaagcaaggccccatgtcttaaaaaaatgtaatccttggattaggatttctacatgaagctatgctttacattgttagtttgctccyaacatgctccacccccatgtgctcagaagctaaagtctcatgtgctaggacctaactgtccacagccgctgtggcctctggggcagttgcaacactgttagagactacaaaacattagattggtgcaaaaagttactatggtttttgccactgaaagtaatactgccttcctctcacaactcaaagcctattctttccccttcagatgtgatcaccctgggctctttaaacagtgcagtgaagatgaagcaccgccacgatcagctctctctaggcatgagtgtcggtgcactggtgagctttcagtcaataagctaaacatcttgtgtttggttttatcgggtgacaggttccagatgtgacractgtgcctcaggatactttggcaatccatcagaagttggggggtcgtgtsagccttgccagtgtcacaacaacattgacacgacagacccagaagcctgtgacaaggagactgggaggtgtctcaagtgcctgtaccacacggaaggggaacactgtcagttctgccggtttggatactatggtgatgccctccrgcaggactgtcgaagtaagatgcacatttattctgcccacttcttagaatgacttccacctttttttcattatcagcagattttattcttcctgtatttatttcacttgggaaaacacttgttcagagaggtaaaatttcactttcaactaaggaaagatgagaccaattttttttttttttttaatgagacagagtctcactctatcacccaggctggagtgcagtggcatgatctcagctcactataacctctgcctccagagttcaagtgattctcatgcctcagcctcccgagtaggtgggattgcaggcaccccccaccatgcccaggtaatttttgtatttttaatagagacggggtttcaccatgttggtcaggttggtctcgaactcctgacctcaggtgatccacccgcctcggccttccaaagtgctgggattacaggcgtgagccgttgcacctggtcatttttatttttttctttacatccacattttctggcaggagtgaggtctcaagatgtgactcagtgcctgggagagataacaggaaagaaaaaccatgtagctgtccccatgataaatggcatccagtagagggtactgatggtatgctctgcccatgaacttgctggttggatggacttcgaaatcctaaatacccactgtggtcccaccttttctagtggcattgatggaatagagccttccagcttaaggaagagaaagaagtagcatctctaacatctctcttttggacctctttatttctctcttaccgagatcaactagcatttcctcttgctgcagctgcacagcccccaggctcctggctttgtttatacaaacatgtgtggaatgctagggaccagcaggactggattccttaaaagccttagtagcttaaagggcttttacctgctatgtccaacacgtttattacggctgttctctgccaagagtttgaaattattagatatctcaattcccactggcattttttaaaattatttccagttaagccttcaattttaaaatgactcaccagcatcttgtcaaatctgtgtattttgaacatacttttaggtgaaatgtgtcattgtgtgtatctgggaaatgtcagaactgtgtaagaaatcacgagaacttctaaacagtaattttagctttatttttgaatcacctccatttctttccttctttgcatttcaaggtcaagatgtgaagtgggaacatcttagcatttagatgtggctaacatccgcatgcctgtgtatttgggagtgtgacaataagtaaatgtgatgttcttttgcagagtgtgtctgtaattacctgggcaccgtgcaagagcactgtaacggctctgactgccagtgygacaaagccactggtcagtgcttgtgtcttcctaatgtgatcgggcagaactgtgaccgctgtgcgcccaatacctggcagctggccagtggcactggctgtgacccatgcaactgcaatgctgctcattccttcgggccatcttgcaatgaggtgaggggctgctgctggggatgatgcctttatgagctcaggtgtcagccyatggtgactttgccccagttagagcaaggcaccagggcacacagcttgaaacacagcgtggcctggatcttagccctcatttgtaccccttggctgggtctacataactgtgcacagagtccccatcagacacatccatagcatttcagtagagggtcccagctgcagatgcagactcacttaacaatagacaagggtgtgctayttctcttcagtacctgggcgctgaagcagactcttttcttagcttctcgaaaggaaccaattagccatacccagcattgtaaaaagtgctgttgtttcctgacacatgctaaggagggcatactccctaagtcaggcgagtcaaaggtggcccaggattgtggctgatctgtgaggataaaagtgaggaaatatgtaaataaataataacatgccacagacctttccaagccctgttgcaaaagagcacttagatgctggcatggggctctcgacacctacraytgaagtgggagtcccttttcctagtcaatggagaccttctcaggtaaacagttcattcctacttctaagtggcagctagaaaaaaaagatgacaactggcttctggcctgaagcctgcttgaccaaggtctgtgttctggccgcagttcacggggcagtgccagtgcatgcctgggtttggaggccgcacctgyagcgagtgccaggaactcttctggggagaccccgacgtggagtgccgaggtgagttgtgggcgttctygcattgacttgatcagagagtggagggaactggggttctacaagagccttctgtaaattataaaacacagtacaaattaacgtgtctataagaacctgtatttaattgcaaaataaattaacactgattgtttaaaaaacaatctaacaaatctagccctgcccataagtataggtagtcaagagtggatgtgcatactctcccggcctcacaccctggggtaaagtttgtttctgtgtgtaagcacacacacacacacacacacacacacacacacacaccacaaatacacacagagctgctttttaaaatacttttaaccaaggtgggaccatgtgaaccctatgtttggcaaagtgactttttatcccctctgaacagtattttgtggccaacttccttgatggcacaagaagaggtaaatggttatcctagtaagatcactggattcagtggatcaactagactctgttgacagtttaagctcttggcgtatgtgtgtaagataacatccccaccagtgaaaactggagggcaatgtcatggagacttcgtgcacaacaaagggctccaaggtcaggggctccaagtcagtttaatgtgaataaaacccagattttcacctaagcttatgattaaacaaacaaacaaaaaaagatggaaatgacattttcttacaaacaaaaacttgttaaaattatgtgaatcatcaggattgcttgatttttatggtattgcagtttttttgacctggaaaattatttttcagatcttaaagtcaaaatatggaaaagactgaataggctgttgcaactctgtttttatattctttctttcctacttgattttcttccctgtttttaattgatcattatggataaaaattttctgtagtttcttaagtgctctttsgtatatttgttgcacatctgaaattataggtctctgttggactcttgaattttttttttttttgagacggagtctcgctctgtcacctaggccggaatgcagtggcataatctcggcttactgcaacctccacctcctgggttcaagcgattctcctgcctcagcctcccaaataactggagttacaggcaagcgccaccacgcccggctaatttttgtatttttagtagagatggggtttcaccatattggtcaggctggtctcaaactcctgwcctcatgattcacccgcctcggcctcccaaagttctagaattacaggtgtgagccactgtgcctgrccaggactcttaaatttttaaaatgaccgttttctttttttggacacaactacagcaagaaataatacagatcttcaagttggcaactcattcaatatctcctacagaaggtcaggaacctagaaactgtgttccttcagggtgcaaacccatgtgttccttaacagcagaaaaaggtcagtgggcaagaccagaacaaattagatatgatttgttttttaagttgaggcttagccagaagggtttgtatggacctcttagattaaggtttgtttcacagtggggataatgtttgctatgtcaataaacaggtacttttctttcatcattctccaaatttggttcttaatgagatctgacatcccctcttccattagaaggtattgaaatccagtggaccagtttctccaagatgtctcttgaaagtaaaactctgcttaaaatctgttttttccagggctctaatcactactctgttaaattcctcaaacttgtaatgccccaaggcttgattttttccagataatggctctatcgttgcacataccctgattctgtcagcatgtgtcattggcaaaatagctttctctgccaaagctttctgacctttggctccatcttagctttgttagcaggaaaggcctgctacccagagtcagagtcaatcagagaattgttcatgtggtccttagaactttactccttacccttttatcttttctttaaactttcgcctctaaatctgccagggaaattgtgacttatagaaaccttgtcaacttgtttgggtcaaaagttagatcctgttttagaaactctgcaaagagtgagattcatggcatcattgttcgccaacttctttgttcctttcatccagaagaaaggtcagctcattacrtaagaaacttttcatcaggaaaagcaaacaacygataaaaaacagaaactaagtattctgcaaggaaacctggtttaaggagaatgtattgaaactggatatgtctgttcctttttactcctccctttggcatttcctttttttttctgtaagataatcatagaaatttagttaatggaggaactacaaagatcacatggctttatggtttgcctattatgctggccaatcccggtggcacgagggcagcagggatgcagacagatgaagaggtcccatagccaagagtgtaggtcctggagccagactgcccacattcacttcaagcaattggtactcctgtattagaagaaaacaaagtcccttctcatctcctcacccagtatactcctctttttactcagcttgataggaatctttccagtcctctctgcatttatatgtatacatcattcgtattcgtgaccctaataatgatacccagtcagctcacaccagcaagaaaaagtatttttcaagccctctggaagcattggaagctccaagtgagcataagtgaaaataccctaagagatacttccaggttctagatccaggtgtttcattttccccttgttttcccactacattgtcatctctccaaccttatctttagttttgtttttttcatggaagaccagaaagcccctttccccaaagtgttaaaatctggggtgaaggcaactgacctcattgcatactttggcaattcaaagttataaaatgttagccgggcacggtggttcacgcctgtaatcccaacactttgggaggccaaggcgggcggatcacttgaggtcaggagtccgacaccagccggaccaacatggtgaaaccccatctctactaaaaataygaaaattaatcaggtgagatggcgcacacctataatcccagctacttgggaggctgaggcatgagaatcgcttgaacccaggaggcagaggttgcagtgagtgagcagagatcgtgccactgccctccagcctgggtgacagagcaagactgtctcaaaaaaaaaaaaaaaaaaagaagaagaagatataaaatgttggggcatctttatttggggtgttaaagtagatactgtctctcctttgtgcccacagtggctgagctggggtggggacatttggaaatttgggaggaggggagtattttgggtcatcaccataatggggtcattgctataggcacttggtatgcaggagccaataataataaatgtcccacagtgcttaaggcagtctgtcaaacagagaatgtgtcggatcctcaatgcttttagcactctttggagaaagctcataacctacaaagcacccagagagagtgagaattgatttgagtggacaatgggggattgattcatggccagctatggggtctggtgcagacagggtggcaacaggagtaggaccagtgtggcctgtgaaggcaggggccaagatgcagaggcagacaaggctcttggttatgtttgtgctggaatgcattcacgattagaaacaggagcacaggggctttctgaagggatgggcccagagatcagcagggacaagaagaggtgtcattcaaaattagatggaactatgcaaaaagaacatcagctcttttctccagttatgtaattgcttgacaaatatgttttcagttgaattggttgttagagggcataaatttagactttctgatgccaactagctaacaatatgcttatagaaagatttaagtcctagctaagtattctccttatggaaaaaaagaatgtagttatgtaaaagacaaatgagttgagcctccaacttacagattgttgaatgttcctattgtccaggcgggttggggctgttggtcgatggtgccaagcctgaacaagcccaccactgtgctgggatggagagggaatctcatccacccaccatgaacgtgctggagaaaacagcctggagcgctgcattgtcctcctcaggagtcaaagagtcacaggaggaatctttctgttgattcatagatagcaaaaaggaagggtaaagtttccatttggggcctctggctcttggaaaagggcagtgtctctaaacccaggcaaacggtaaatgtggggcataggcaagagggtccgggtagtggccacttccccatcatgctcgtttctcattttgtgttttttagtagaaaaacacagtgtgttcttttgcccagacattaatctttagaatgcctgtattttctaatgttgggatttctttcacaaccacccaccttaatatttccattgtgactcagaaaatcagacttcattcgattctttagagaactataaatactgttgtcagtagagtgaagtcttgtcttatgtaatcctaattacagaatgtgttctcagaagaggtaggctagaccagagctgggcagaccacaggcagaggccaaatccagccccctgccgatagtagctaatataagttttacacccacttgttcatgtattttccctggctacttgtgggcagcaatgccagagtcaagtcatcataacagagacagaatggcctgaaagctggatttactatttcaacttttacattaaaacttgatgacccctgtgctagacaggcagctcatttctgcaggtaaaattatattcatctcccaactttcattccaaaattgaacctatattactgaggccaaaaagggaaraggataaaagagaatgtcagaaaaaagaaaatcccatgtaagaaataaaaattatttaaattgcccttgcttttagtaaatagaaatgcctaagtaaagtatcagtaaaattcttggcattgcagcagatcctggagtcccacgttgctttgaggcaaggtccacggcagaagaaaaccccattacctgaatcttagggtgtagcagtttctctgtcccaaggcaaatttaagttkccaacaaaaaggaggataatcagcccagtactgagtgaccaatggtatagagtggggagtggacacagagagaacagctgatactgttctgccacttgcaggctatttggggacatggggtacataaaatgaagtaacaagatagcagaaagtaagtggcacaaacttttcagttgtcagaagagggcaagatcagtaggaaatggagtcattagggaagggtttgcagaaaagattagctctagtggccatctacagagaacrtgctgagtgccaagcacttttaggcatattatataagtattcttaattttatccttgcaacaaagaacctatgggggtaagtatcatctccatttcacacttgactaatctcagactcagagaggttaagggacttgcccaaagtgaggaaagaactgggatctgaagccaggcctatgtggccctgtgtcccagctgtttccacaagcctgggggctcctcattgacagctggtatttagagaggaaattatcatccaagctaaaggacaacacagacaacatgaagcagcatggctctgggaggtgccctcgggaaacagtctcagctggagagtcatggagagatttggtttcaccagattgtgtgaagccttcggtgctgggccattaagggtagactttgttcartgggcacaggaaggtctggaggaggagagggaaggatgtaaaggaagcaggcaagttaggtctatgtgataaatgggtacatagactatttcccattgtggcattgacttgctagtgttttcctctggaccttagtatctttaaaatcggtacaatagctttcatttacctacttcttaacaattatgtttgaaatgataagaaaacttagtaaaaatagaggaagcctactggccacagaacagagagtgtgtttacagatgaaagtcaaattattatggcttgttaaaatgagtatctcatttaaaaaatactrttcttcatcttcatgatttgttcatcttaaagattaggcaacaacttttgctatrtatgctctcctttccaagagaaagtttctgattctctgccaagtaatcccatttcttaaaataagactgctttatctaggtcatttggattctgattcctttctcttaagagagaaggagcccactggacctcatcagctgcagcctgaatagtcagttcacagtttttcagatcctggtgggtgtgtgagatgatgggagaatctcctccatacattagtgtccatgaagttttactaacttgtcaagtgtgaactgacctttctgcttcagccacgtgagtgtgggagtttcactgaaaatattcttgaagtggagggggtctttttacaaggttgtaaaatgtgggccttctggtgcctgcctcttaggtgactccaagagaagcaattctggaaattcaatagccagggaaggaagcacatgaccaggggcttcagcttgaaatcaaaacctggtacatttgagactagttatttggtgccctcccggagagtcaggcccaactttttcaataatgacactgcaatccggtcatctgtgagatttgatggtttacttttcaggtgggagaaaggaatgttggtcagtttggctgaactggttgttgacttctggagagagccgaagctctgctagctcattggaactcttacccaggctaatttccctcggccagataaagagggaagmcttatctgccttttaagtctttcagggttgggctgttttccccttaaagatgcctatgacagaatgggagcaagacatgtctttggcaacgaaataaatgaaaaatgatcacagaaattaaaaataaatcaacgtatgcatgcatcccttgccccaagcatgaatccagcaaaaacctaatgtttaggactgaacaaaggtatacctttgcatcatctatgggaaagaaataattgtctaagcaaactataagcatatgcaactctgcctcagttgtgtcaagtctaagggagatgggtgagtaggccccagagggctgcctcaccctgaccactggctggtagacaaggtaagttttattacaaatggcatcacttcttcctctgttacgtaagtcctgagatttgtgcatcagcctacattgctgaacttccgaagtcgtgattctgctccagctccaccttttgaagggtatctctttctccatctctcacacagacacacagatacacacacacgcacatgctctctttttttctctaatatacagaaggcgggcagaaacagctgggaaagtaacagtcagtgctccacaaaacggggtcgcgtgactgtgaacatcagtatctcctgggaacgtgatagaaataaaaatagttctgggccccacccagacctactgaatcagaatctggggatgggaggagagtagagaagcaatctgttttttatgaaccttccaggtgattctgatacctacccaagtttgagaggtgaggacccaggtgactcgggggtaacttttagctttctggaagatgactaaattttaccaaatgataatggaaatgtattcctaaaatctaaacaacataaactcttaaggtactaagttatttaagttatttgtaagttatctaagttcttcctaatctcagaaatcgattaatgtagtggttttcccaagcctttctcattatttctcttgggtgtcactggcattgacttccactaaaaaaagatcccatggtcaaatgactttggcatacatacaactggataaaaacaatataaaacagtttttcctgcagaactcttctgagtctgtaatatgctgacacttgtttttaatcttcaagataaggatacagaayttttcatcatgggatagttttttcaaggaacacatcatagaacgtatggtctacggatcaccattaaagttatccatggtttgcctaaacagcttcctgattcattacgagaatattccccaaacaagaaaaatgaaacatactttaagtacctggaaaggatctgttttttgaaaagcatacacccaagttttacttttgaaatcctaaggtcttggttttgaaaaccccaggcgctaaggaaattacatgttttaaaatcctaaaggttgaggaattaatattctaaacttcaaatttttgaataatcatgacgttattggcaaatacatataaataaacatataaccggaacacgtttttcccctttatccaatggaaataygatcaagcatcactcttagcagaagactaccagacacttgtagggacacgaaaagtgataataaaaacaatttatttattgaatgcttgctatagaccagatgctcttctaagcactttgtaattattttatcttgaaagcagtcctgtatttataatcattacctcttcttacagatgtggaagacgtgactcagtttcctgattacccagggtcacataacatgtgtggagaaggcaggatttaccacctcagtccgcagttcatgctcttaaccataatgctgtactcctcaaacctgccactcgagagcttggaatgtagggggagaacaaagacaataaaaagataaactagcaatacaaggcaggatgtggtgagggccaaatgaatgggccacaaacacacacctctgggttgaaaggatggtgatgttatagcagatctcaggaccctcagtataactggttctgggagatgttccattagaaagtttttcagaggaaggccgggcgcggtggctcacgcctgtaatcccagcacttcgggaggccaaggtgggcggatcacaaggtgaagagatggagaccatgctggccaacatggtgaaaccccgtctctactaaaaatacaaaaattagctgggcatggtggtgcatgcctgtagtcccagctatttaggaggcagaggcagaatagcttgaacccgggaagtggaggttgcagtgagccgagatcatgccactgcactccagcctgggagacagagtgagactcttccaaaaaaaaaaaaagtttttcagaggcaaatcacagctattgacccaagagtggctcacacctgtaatctcagcactttgggaggccaaggcaggcagatcacctgaggtcgggagttccagaccagcctgaccaacatggagaaacaccgtctcttaaaaaaaaaaaaaaaaaaaaaaaaaaaaaaaaaaaagccgggtgtggtggcgcatgcctgtaatcccagctactcgggaggctgaggcaggggaattgcttgaacccagccaggaggcagaggttgcagtgagccgagatcgcgccattgtactccagcctgagcaacaagagcaaaacctccgtctcaaaaaaaaaaaaaaatccgagaaagcatgaatctgttgtgctttgccacagttgacattgcacttcaggaggattattttcttttatgaaggtatgtaagtgtccttgcatgcctagactaaaatgaggttagggcttcatttggcaaagacgtttggattctgattgcaagttaaccctgagtccgatgctgaaaaacgaaaaatggtttaagatgtgcccctgcccttggagtccacaatccagttagggaaataagatagtatattctttatttattcctgtctttcctcagaatgggtggaagcccagcgataagatgttagcataaggcctttcgtaattcaaaccctgtataaatactttcaaatgtcagatgttgatataaaaatgatttggtcacctgaaatttgggaatctaagccagggttcaagggcacagccactgtgctaagtaatctcagccacagctactggccaagaacacattttgtcctgtacggcacgtgattttcctgtgccatttggctttgcatraggtgccaaccctattgggcctgtgagacgctgagactgaatggctcccaagatccctgcttgtagtactggcagtggtcatcacaatggcagacacccccaagttagattatacttagttgaaagcctttaaactggatacttagaattcctttgggttttgttttgttttgatcatgtttattgcatttcatcaagtatgttttgttgtgagatagagtcaggtacgtaargagcttctcatttgtgatgtatccgatgccaggtggcacattatcaggatgtaacctggattgtttgtacagacatggtctgtggggaaatcctaagtaagggggaggcaaaggcaggacggaggtgaagagtatagactccggagttgcaaagaactgaatcagaattctggcgtggccttttccttgcagtgagacttggggcatgttacataatctctctgatctctsagttcccacatctgtgaaatagtgattattataacacgtatcccatagggttattgtgagagttaaatgggatcattcatataaaacatttctgtttaaagtattattactgctaagaaggggttagcaaccactgaagtcacgcatgtgctagaggaagctgctacagtctctacctgagccattggtcaattgttgtcgatggttgacaccttcccattttcacagtgaagtgagtattctaaatgccacatcttgtcactgaggttcatgatyaagtagatcagctagcattgcttattcccttctagcctgtgactgtgaccccaggggcattgagacgccacagtgtgaccagtccacgggccagtgtgtctgcgttgagggtgttgagggtccacgctgtgacaagtgcacgcgagggtactcgggggtcttccctgactgcacaccctgccaccagtgctttgctctctgggatgtgatcattgccgagctgaccaacaggacacacagattcctggagaaagccaaggccttgaagatcagtggtgtgatcgggccttaccgtgagactgtggactcggtggagaggaaagtcagcgagataaaagacatcctggcgcagagccccgcagcagagccactgaaaaacattgggaatctctttgaggaagcagagtaagtagttaatgagccagaggaattactcataaagctgaaaaaatattgtgagttaacagcaaagatttcctggcatggtgcttccatcaggaggttttgttagtcctgtgggtgagaacagattctgagccatttattttccagcagtcttgactgggcatttgggtgagtgaacgttggcacatcagtggggaccagccttctggaggctgcagtacagaatatgcaagcattatattcagtgctcctccttgcaaatcatgttctaagtcagtaaaatgggaggaatgctggatttagaagacaaagatccataattgagtcttggctctgatgctaggcttgtgaacttggatgactcaattcctgagcctgtattttctctcctgtggagaaggggtaggataatatatgccattaccttatgaagtaatgaaaggatttatatataaaataacaacaggattgcagaaaattataaattaagtattgctactatgggggaaattccattacctcaaaataagactgcttacttcaagttttttctgcttctccgccattagtccaccagaccagtgcttcattcatctagttataacagctgctctatgctgaaaagtcctcatcccaccccttctctaggtaatcttccctctgattggacagtgtttgttagtggaagcctagagaattgaccttctcaaggatcatttatctaccctttctcctacctcccctctcttgcccctaaacwtcccaactccttttgccaaaaaggaacccccaaaacagcacaataagacctaagtgctaaaggacaaaaayagaaaagggtatgaggcatctgtgcttccctagatgctatggttttttcactgcagactcaccatctaggcctgaggggactgcttcacagttaaatcctgcacactgaggtgtttatatgacgaaatgacagtaacattttttgtgtgtgatgagactttaatcagcacctttaagaagccagagggacttttcatctcataccaggcatgagtagcagaggacagctgacattagctcaagcgacttgaaggaggtccttcctagacctagatttaaagtaactggaccttgatgtcaagccttgggttttatgcccaagaccatgtagctggccagagtgttaggaaacgtctgatgtagagtgacaatgcatttagtgaggcattttacctcactgaaaagactaagcctcctaatgtgcagagatcacagttttggcaggccgtggtccgaatgcaagcccatttaggaaatgatccttggcctgggtcttaggcatctctgggaggaagaaaaaaatctggtgtcctttgagagcctgccagaagagagattacattcccaaaacagctctgtttctaccgtcactattcatttaactagacagattgtaataatcacaggaaaactagttccattactcttttttttcaacatactatccaaggatacatgttttaggaaccaaagtggccttattttaaaatacgatgttagatttgcttgttttaaaaaaaattgtatcattttatgagacctgagaagaaatgaaagccttctgtgagtcatataattaataaaagcaaagcactgaaaaaagaaactatgtatattagcctcaggaaaaaaaggcactgaaatgtaatttaatctaccattttaaaccatccctttaagtactttttctttgagttgggttatagttttatctcagccttacatatcatttttctaatggctcccaacctttcagcatctttacattttcctggttttttatactattatatcgccaagaagacaattacattcaattaggtgaaccagtaatacccagargtaaaatctgctcaaatattactttctttacaatacacatacaaccctacccacacccacctggagcacactcgcatgtgcacacacacacccatatccacactatgtacacaataatatacaaatagatgtcaaaagtacggctttgtaggtttgaaagtacagaacaaaatgcagtttagattccaaattaaatactgtgaaagctaaatcttcttatttcattcttagtagatgctattttcttataaaaaataaaaaggctgttggtagaaggaggcccctctgacggaagagaggagtgtatgaaagctgatactggtggctcctgttgtctttgtggcaggctatagggcttcccctctgcatgttccatcttgaaggagatccctgaggcttagggaagaatgttttgggcttgtggctgggaggcctaattgtataactggagtcatttatgtcttcagttttcacaattgtaagggcttgaagctgcctgtgaatagagccagaactccacactctgacctgtgctcatcttacagcagaaatttggaatcccttaaatggcttgtctgccacaactcagctgagtggtacttctgtgtttctctcaaaagtcattgaacaaagaaaaattgttagatttaatactatctgttataaggaaaataaaactagcacttagggatgaaatgttacaaattactgaattggtttgaaattagtaatggatacagtactagtagaaaatatgaaacgtgaaagttctcccttgggtttattttatgtaagyaagcttaactttctctttacaggaaactgattaaagatgttacagaaatgatggctcaagtagaagtgaaattatctgacacaacttcccaaagcaacagcacagccaaagaactggattctctacagacagaagccgaaagcctagacaacactgtgaaagaacttgctgaacaactggaatttatcaaaaactcagatattcggggtgagcattttttggtgcaaatagtcccagacaatggatttaacgatatgtctaacgttttaatatagcacttttggggaaraaaaaagttttctaataaattttaaaacttttgctcatccagtttctggcacaaatgaggatcaaagtccccattttacaaatgtgggacttgggcacagagaacctaagagacatagcaaaggtcccacagagtgaatggcagtagttgtatcagaatggtatccatttcctgattttttttttttccctccagttagtagtttaatcccctggccttttcttggaagggggttcttttgaatagttaaggtattaatacttctgcaaatcctttcacattcaagaatgctgcttggtcagaaaaaaacttttgcaaatcattatttatatcatagactgtaaaggatcctcagcaaaaagtgaatgtagaaatatgttacatcatactgtccaactatccatactgttttatgcatgattgcttttggactaaagctaaaaacatgtcatgctgttatatataataccgtcatcccttggtatccatgggggattggttccaggacccactgcagaaaccaaaatccacaggtggtcaagtccgttatataaaatggcacttgcatataacctatgcatatcctcctatatacttctttctttttctctctctctctttctttctttctttaagagatgggctcttgctatgctgctcaggctggtcttgaactcctggactcaagtgatcctcccgtctcagacttctgaatagctgagattatagaggtgaaccaccacacccagctttacttttttctttttttcccttcagtatatttaaaagtaatctgtagattacttacaatacctaatacaatgtaaatgctatgtaaatagttgttatactttattgtttaggaaataatggcaagaaaaaagtctgtacacattcagtacagatacaaccattttttccaaatgctttccatccacagttggttgaatccacatatgtggaacctacaaatatggagggctactatattagtcatttgagtggatccgaataaaggattgagaaaagtcatctagtcatataatcttcaggctgcctgaaaccagctatttataaagaactggatgtttgcttgtgtatagaaacaagattgcatgattttcttaatttttcatttttcacccagatgtttgccatactcgagctggagtaggtgctaatgggacaaaacatattcattgctcatgaaaactgtacttcataaatattttttcttgaattttaaaactttacagtaaatttaggacccgaagacaccaaatatagacactgcttggggaggaarcctagtatgatgaggttaactgtgggcaatttcatttcctaccctaggtgccttggatagcattaccaagtatttccagatgtctcttgaggcagaggagagggtgaatgcctccaccacagaacccaacagcactgtggagcagtcagccctcatgagagacagagtagaagacgtgatgatggagcgagaatcccagttcaaggaaaaacaagaggagcaggctcgcctccttgatgaactggcaggcaagctacaaagcctagacctttcagccgctgccgaaatggtaaggtttggggatgtggccttactgctatggtgccaagcaaaaaaaaaaaaacaaagaaaaacaaaccatcttttgtcattattacaataatttgcaaatgaatcagcaggactgaaactcctaggctgaggtctctggatcctggaatggggtatctgtaaccaagacagattaaaagcagcagcatatgggtttccagccttcccctcttctgtttctctgtggtcctcaactaaagaatgaatcatgactattctcccatactgttttagctactcagtgacacygcactgaaacttgatcctttttacactgtggacatttctttaatattttttttcctaagtagagacagggtctcactacattgctcaggctagtcttgaactccgggtctccagcaatcctcctctcacctcagcctcctcccaaagtgctgggattacaggctaacaccccagcccacccccacccccgctttttttttttttttaaagagatggagtctcactacgttgcccaggctgacctcaaactcctaggctgaagcgatcttcccacctcaccctcctgagtagctgagatgacaggcatgtgccaccacacccagcttggacattccttttttagtttgttctgatttgaattataaaacccatctcagtgtaggaattcagartcattctagaaggggcttccattaaaaattaaagggagcaaaagaattttttcacgggtattagctattatgttcctttgttccagtaactttacctggtgaagattaaccctgaaaccagcctagaaagtagattcatttcccagaagcttttaaaaaggaactctggagccaaatgaaattgggttgtgagtttaatgaaaatcaggcagaaggccccaaaaaagcctaactgagcctgtttcttcctcttccttcctgtgttttcaaggaaggatacctatgtgaaataatttggagggtattttttatagactaaggtttgtgttctcttagcccagagacacagagaaagttaaagatggaaggtacataggygcagaagagttcaaacttcattacagctttgtcttagtgatgcttcctccctcctctcatcactttctctgaaatagacaaaattggtcacaatataagacagtgtttattgatgcctgctaggtttcatactcattatcttctgaaactttatagcaaatagggagcaaataatctgtcatttattaaatggaaaaataaaagatgaagaaaaaagaaaaatgaaggcttagagcaatgtgtaaattgcagctaacaggagacaaagttatgaagcatgaaatgccaattctctccatctttcccttcagcattgattccttccttacatattgtagttaaaaaaaaaaaatcagytatcacaaacaagttctgtgtgacctacaagaaacagctaagcatgctaaaggatttttgtcttgaaccggaggcatctccgtgggcggcagggagatgcatgggcggtgggtggggttcggggttcctctggcctttcaaatgtgtgcccttccctgtgcttgcttttccacctggtaaactacctagggattagcagctgcttcagttctcttactgtgtttttgtctttgttaatgatcctgtgagaattctttctgtaagttctttactgccatttccttgtgtagagagagttttgtccttttgtttttcaggtacttctagttctgtatctttgtggatgtttagctagagccatactgtgtttttttttttccatgtctgccccatctgttgaaacaaaacagatcttctatgtgtgctgtcagattgtttttagaaagcaaccgaggttttacacttatgttcttaagactcatgttttacagcatgcagaatacactttattttctgaagctttttgtttttgtaagccagataaatgacttatttagttgtaatttgagatataatggaattataattatcttaaaattattaggctaaatagttgattgtatttatttaaaaactacttttttgtactttttaataacaatacttgtttgggaatattctgttaactccttttcactgcagtaaatctttgtcttcttttcagtatgagaatttccacaaacagctctaaatgcaattttctccctgctcagccttttctatcatatagcacacttgtattataatttatcaatttgcatttgtatgccatgaccaagtggtgatctttgagaggttttggtaggtaagaaaggaggactctatgcatgtgtgatggcagtcgggggtggtaatttgggaacacttcatctacctttgttcctttgtttgtactgttttctttaacctgtggaatgttttcccacttcccctgctcaaatcccaccagccaacagcttcttcagctacaactgtagcattcctctgcagtctctcctttgtctactttctttcatagtgactgcatctgacctattcttggctattttatgtggaatgatccagtcctaactagatgggaagttactaaaacgctagktaatagatcttttmtgtcaccatatttactggaggagttaacatggtgctggtgctgktcccaaagatggttcacaatagsttttttttttaaactctaactggttagaaaaaaaggaaggcattccttggcccttgcactggcagaattcaacttgatatagcagatgtttgcatcctgggcagagctcatatagtattttaactcatttgggcagaagatattgatgagttgtaaacttccattgtttccttggaaataagcaggttagtttaytcctaaactctctgctcctctctccattctgtctcccaaacactgttttcaagcacccttgctgaggaccacctacacattctctggggccacccaggccctgcacagctgttttgctgcagcagattcactatccgaagtattgtgcctgatccttggcttgttgcagacctgtggaacacccccaggggcctcctgttcygagactkaatgtggcgggccaaactgcagaactgacgaaggagagaggaagtgtggggggcctggctgtggtggtctggttactgttgcacacaacgcctggcagaaagccatggacttggaccaagatgtcctgagtgccctggctgaagtggaacagctctccaagatggtaactcagtggatggcctcagtttttgttatgyatgtttgctttcagctgtggactaaaggatctgaaagggagaaatcaattctaaatgctaactgaaatgaaaagggcatatcacaatcaaatatgaaagttcatgtttctgtgaggtcagagaaagagatggggagattttcttcacagataaagaatttgctttctcctcactcaacacatgctttagagcaagatgtttaaatcttatactggataatttgagatagccatcttacttttctgactccagggttataaatacatccagctgtatgacaaaaactctatactaagcaattgagcatttattcttctaaagtgacacacactttttaagtatttatgtgggcacctgagaaaaagactcaggactattttataggccaggagttaaaaaacaacttgaaaaattttaaatgctagttctatttatatcagaatactgtttaggaatctctatactgaatacttgcagtctgtaagatacaatactttgttgaatgggagaaagttgtttcccagacatatgattccaagtacatagtttttcaacatcatttttgagccatttccaatattctggtctcctttagaaagaatgaaagtcttccctgggtaatttattcttcatatttaggtctctgaagcaaaactgagggcagatgaggcaaaacaaagtgctgaagacattctgttgaagacaaatgctaccaaagaaaaaatggacaagagcaatgaggagctgagaaatctaatcaagcaaatcagaaactttttgacccgtaagaaattttttcattttacttttagacatttgtttctgtgtgattctctgtttacattttagataaaatccatttctgtcagggtactaagtgacatttccaaataagaaaaacgtccgtatattaaatgtttccacttcttaaacttatatatgtgtatcaaataactttctccaatgttacgcagatacagacacacctgatgggatactcaggtagccaatcaaaagtcaaatatttacattgaaaattgaacgtggaatttgttagaaattacgtatagtaatttctaaccttaaagaagtggagtttgttattttggcattgcccccaaagctttgtaattctattatttacaggatattatacctatagttagttaagagtgttgctagtcacagttcaagtgttaccagtaaagatggttttggctgcaaattacagaaaactctcaagtgaaagggacttaatcaaaaaggatgtttattatctcacatcttaataagatatccagtagcaggatagcttcctgggtctgcsacccacatacttttcatctttctactctaccatcttaagcatatcagctttgtcctctagctcctcatggttacaaggtagctgccaaagttccagacatcatataaagattaataatggaagaagagaccacctattccttgcatctttttaaaaaggaggaagtcttccctagaagcctttaagcagtcatccttataaacctcactggccagcaataagtcacatgccaatgcataaatgtcactggaaaatggaaatgcgattacagtaattcacaaactaatatttaatgctgggttgataattttacctgacttagaggcaggtrcctgaaaaaaaatcagtattctgttagcaagaaaaaaggcatggctaataaggagtcaacagtatttgctaaggatatcttaggtaatattttatggaagccatcattcaagtacatattttatttgaataaatcctctggggtccatttttatgttcaatagtttaaaacataagcaaagcttgaaagtaaatgaggatctgacgtatttgaagcttaacttcataaactttttttttcaccatcttccacattttacatttgaaactccttggctttgttgacaacccattattccggttctcctgcttctataattttctccctttctataatttcctgaatctagatcatttgtaggaaatatcaaatctccatatctgcattcacaagtttctgagctattcgtccaacctcaattaaaagatttcattgcctttaagtctcagctttaagctctggccctctatggttttccacaatgttcagattcactctgctatactttcccgtaacatactctgccgttcctgtctccccatctggaattgtcctttcttctttcaaattctattatcccttaaaatctgatcagctcctcatcttccacgaaggtttccctcactacccagcctaaaacaaattctagtagtactcaattgtctgcagttacttttttgtgtgtgtaggtctcatctcccctcaaaatcccagatagattataaactcttaawcaggaagttagtgtctcttggtgtgtaaccccaccatgctagtccatagtagatgaccagtaagtggttgaatgaatgaaccatctattcttttcacctctttttggggacatctttgcttttcacagaggatagtgctgatttggacagcattgaagcagttgctaatgaagtattgaaaatggagatgcctagcaccccacagcagttacagaacttgacagaagatayacgtgaacgagttgaaagcctttctcaagtagaggttattcttcagcatagtgctgctgacattgccagagctgagatgttgttagaagaagctaaaagagcaaggtatctaaagacatggcatctaaggggcttattttgtgtatctatcatggagtaaaaagtatctctttaaccaatgaaacttctaagaaggacctatgcgagtctctctgggtcatttcaggaaggctattctttaaagaaaagaacactgagagtacwtttttcatgttcagcaacaatatactgtctcattattttttactcagcaaaagtgcaacagatgttaaagtcactgcagatatggtaaaggaagctctggaagaagcagaaaaggcccaggtcgcagcagagaaggcaattaaacaagcagatgaagacattcaaggaacccagaacctgytaacttcggtaggcatacacaatcattacatgaatgggaacacacctacatatacacttaccagaaaagtacatttgttatctatgaacagaaattcttacawctcaacattaaaggattcctttaataaatctaaactactccgttagcatggatgctaaaaataagtggagataggttttcaaggaataaaaggactctgattcagacactggaccattacgtcccatctcattttctcccccacaaagtctgagaaagataaaaacttctattcttgggcgggcatggtggctcacgcctgtaattccagcattttgggaggccgaggtgggtgggtcatttgaggtcagtagttcaagaccagcgtggccaacatggcaaaaccccttctctactaaagatacaaaagttagctgggcatagtggtgtgtgcctgtagtcccagctacctgggaggctaaggcaggagaattgcttgaaccggggaggtcgaggttgcaatgagctgagatcacaccactgtactccagtctgggcaacagagactccatctcaaaaaaaaaaaaagcactcctattcattgaggaaacagcatatactctgttcagtagtatgaagtataataattttagaaaactgtcctgatgttataaagcagcttatctggttaagaaggccaatgtctcaagattttggtcatcaaacattttactatatagtagttttggaaactatgggagaacagtcagtctgctttcaatacccaattctagagaaacctaatagagcacttatagctaaacaatctgttctgtttagaatgcatggaaaacttaatgttttttataagraatatactgtgactaccagatattaaaagtactcattacgaatttttcatagggatctagcacyttgctctaaaaatcctctttatctcttaaaagaagtaatgcaaacataattccattaaattcttttgtttctcagaaagttaatgttttcgttccaattttacgagtttttaaaaaatgaagaaaattgatgagttatctaatccctatacaggttctcagaatatactttgaaattaaatgctcccatacccagcattgtcagccttctcaggccaatcctccatgtgtttaaaacctgggaagatgaattttcaacatgcttttcttaccattagttggtaaaaacctgtgttcccctattctattgctgtcagttaaatgaaggccaataattctgtccattttcctccttaaatttcgagtatcaataagactttttcttcaggctatttgttcaagtttagaaaaattatgttttcccaccagactataaatattttgatgtttcgatctctaggtttttccattttctcagtttgctgttaatattttagtgaatattatgtcagtgactgtagaaattattgttttgaaagccaggtgcagcagtgtgtgcctgtagtcccagccacttgggaggtggaggtgagaggatcacttaaggccaagagtttgagactatagtgcactatgatcatgcctgtaaacaaacagtcactgcactccagcctgggaaatatagcaagaccctgtttcttgaaaaaaattgttctgaaaagcaaattagaaaatmattataggtgagatgtggcttgatgatgcaagttaataattggggttctgtttttcaggggccctagggggcaggaagtgttttaggttagtaacaataagaaacaaagagaacctctaactaaactgtgttcatgaaagcttatcagaaacaattcactcaaactttatcttctaagaattataatttctaagaattttattctaattaaagggtccttaggtttgaaatatttacaaattttagcctatgtcttatactgacccttattaacttcattatagcagtactgttattcagttaattctatgtaattagacccatccttgaagatcattttaaagaaaaattgagtgctcagtgaaattgattcttttgtcatgggctcaactgcttactttggctagcttttaaaagtcaatgtttattgattctactttgaaaggagatcagatgtggatcctcaccagttgcccagatatttttttttccctaaataactttgtgtatttagagtttacagctgtaacgttcccagaccatacatcatctcacaattctatagaaattcaaagaacatccctagtctccatgtcttcagtaattagctgaaatctccactactagagtttaacatttattttcccactcacattaagttggaaatttatgtggaaatccctcttcgcacagctgcttatttgtgaatgttctttagccaaagtttgcaggtgtccttaaaatgctttctcaacacatcatgctccttggggrggtggggttttttgtttttttttactgtcagaaaaaattttacatcaatctcagcttagatcatcagaagtactgaaagaatgaagtgaatatatgaaatgtagcaaagactaaagttagatacttcatgtaacttttcctgaaatattctttttagtaattacttcttttggtctagagcaaaatggcacagcagacttttaaatcttcctccaaacttgtactcatagtaattccatttcttaaactaatgtcttgctggaaaattgacatrcttttagattgagtctgaaacagcagcttctgaggaaaccttgttcaacgcgtcccagcgcatcagcgagttagagaggaatgtggaagaacttaagcggaaagctgcccaaaactccggggaggcagaatatattgaaaaagtagtatatactgtgaagcaaagtgcagaagatgttaagaaggtacgtaaatctttgtaatttcagagctatgttgttaaaggagccaccagtctcctccttgcctgccttagagtaagggacatggacctaacagaaacagaattcatcagaaatatcaaatgacctgttttgcaacagccgtctttagaagtgtggatgggaaagaatatggaaatatctaataagtatgacctatgtcctcaaatccaaatttggacaagagtttagaagaacggaattaacttaggggtagaagtctcaaaacaggctttttttttttttttaaaccaactatattgacaaaaaccagtcatattgaacttttatttctgtgcggtagtcagttaaattcttcatggcatatagtaattatcaggccatttgagaatattttacaagcaggttggaacagagaacaggtagtaggaaaccaaatcttatctctttgagactcattttgaattaactacccctcacctctcattcgaaggcactatattttgcagagaaaaactcacacaacccaaatgtttaatcagaagccatgtaataactgaaacacatgttcagtttctcaataatgcttatttctaaagagaacattaaaaacttggtggcgccggggtggggcttaaaaccattgaatcactggtccccaacttttttggcaccaaggaccagtttcctggaagacaatttttccagactcgggggtggggatggtttcaggatgaaactgttccagctcagatcaggcattagattccataaggagtgcacaacctagatcccttgcatgcacagttcccaataggattcgtgctcctatgagaatctaatgtcaccactgatctgacagaaggtggagctcaggcaataatacttgcctgcccacccagttcctaactggtccgtaggcctgggggcacctgcatttactgacctaatttcagtatttaactccctactattcaaaaattttctggaagttactgtagcttttcgggcattacgtaagagtaactttccctacctctctctaggttgggaaagagaacaaaacaatgagaaaagttcactgccacaatatcagacagctgtcttttctgttttggtttgtgtggtttcctgcagtactgaggacacaaatttctcaagtactctgcttcagggcattttgcataatgacattttatcacaagagaaaggaacaaaatctcttgaaatgaaatttccataaatggctatttgaacagtttctaaaaagaatcatttgcattccaaccccacaccccatttctcttctcctcactcacttcttgcatatgctacaatctcacctttccttcctgtatcttttgtttaatctttttcctctgatttccttataagcaagtcttcacaaatcctaatttagtcaagatccaaagagcctccacttcttcaatatgggcttctctaatgtctaatctacttttgaaaaatctgcrcttctctatgtaatttgcaatacaattatgctacaacttttctatagaaaagtaataatcaggagaatgaggacttagccctaaggatttgctgcaactccagaattttttgaaatgttctttaaaatcakgtcaattttgcattcaattccactgtttgaagataaaattttaaattacttaccagtgaatatccttggtggcccttaatccagaatgcatgccatgattacactattgctcttaaatgtaattactgacactaacattaccacttctttctgtctaaatgtggaactatagactttagatggtgaacttgatgaaaagtataaaaaagtagaaaatttaattgccaaaaaaactgaagagtcagctgatgccagaaggaaagccgaaatgctacaaaatgaagcaaaaactcttttagctcaagcaaatagcaagctgcaactgctcaaaggtgggtcttttcacacaggcttattttttaaattactttaaggcatccatagtttatttaaaagtgaaaaatatattcactttgtcttgagatcatcatagtataaattgctcagactttatatatatatatmtcyccacagatttagaaagaaaatatgaagacaatcaaagatacttagaagataaagctcaagaattagcaagactggaaggagaagtccgttcactcctaaaggatataagccagaaagttgctgtgtatagcacatgcttgtaacagaggagaataaaaaatggctgaggtgamcaaggtaaaacaactacattttaaaaactgacttaatgctcttcaaaataaaacatcacctatttaatgtttttaatcacattttgtatggagttaaataaagtacagtgcttttgtatatattttggtgtacttgttactttcactgattgttgatgaatcccttttttcactgtaaacgtggatttataaacaagtttactgcgtccatgaagaccctaatttatgttgtctataaacaagctattatatttatttgacaggtaaacatcctccaaaactccacacccttgactcccctcctcccaatcacctcccagtgggattcccaggttgaggttaaggaggacaaatatagtctatgctaccatcactatttcaatggttgctgagttgctccagccatcaaaactcctgtaagtaagtattccttgctctaggaatgagaaaaagcaacattttagaaaatcagcaggatgtactagggtttgtagtcattaccacctagaaaaggactagggttactgaggggaaggtttcagttaaatcaggccagagtttatggatactgctcctgccaattgagcaatgctactacagagcacggaatgatgctctaatttctcagcttttgtattgtattttatactacagagcacagaatgatgctctaatttctcagcttttgtattgtattttatgtgattttgcaactaatctaacgaaagtaattgccaggcccatgtcaactttattgcctaactagctgtataaaaggctagcccctatgtgtttttttcacacattcttagagcaagactattctgtggactgcttaacaaccacccacacatccaacacagctgcatctgaagctgggcctggacaacagttatgtaaacagctgtaagttaataactttcctctggcccaaagcaataatttgtcacttttatggtactgttaccaaaacagatatatagaccaatggaacagaacagaggtctcagaaataacaccacacatctacaacaatctgatctttgacaaacctgacacaagcagtagggaaaggattccctatttaataaatggtgttgggaaaactggctagccatatgcagaaagctgaaactggatcccttccttacaccttatacaaacattaactcaagatggattgaagacttaaacgtaagacctaaaaccataaaaaccctaggcaattaccattcaggacataggcatgggcaaagacttcatgactgaaacaccaaaagcaatggcaacaaaagccaaaattgacaaacgggatctaattaaagagcttctgcacagcaaaagaaactatcatcagagtgaacaggcaacctagagaatgggagaaaatttttgcaaagaacttcaaccccatcaaaaagttggtgaaggatatgaacagacacttctcaaaagaagacatgcatgcagccaacaaacatgaaaaaaagctcatcatcactgttcaatagagaaatgcaaatcaaaaccacaatgagataccatctcatgccagttagttagaatgacaatcattaaaaagtcagcaaacaacagatgctggagaggctgtggagaaataggaacacttttacactgttagtgggagtgtaaattagttcaaccattgtggaagacagtgtggcaattcctcaaggatctagaactagaaacaccatttgacccagcaatgctattactgggtatatacccgaaggattataaatcattctactataaagacacatgcacatgtatgtttattgaggcactgttcacaatagcaaagacttggaaccaacccaaatgcccatctatgacagaatggataaagaaaatgtggcacatatacaccatggaatactatgcagccataataaaggatgagttcacatcctttgcagggacatggatgaagctggaaaccatcgttctcagcaaactaacacaaaaatagaaaaccaaacaccacatgttctcacttgtaagtgggaggtgaacaatgaaaacacatggacaaggggatgggggtgggggagggatagcattaagagaaatacctaatgtagatgatgggttgatgggtgcagcaaaccaccatggcacatgtatacctatgtaacaaacctgcatgttctgcacatgtaccccagaacttaattaaaaaaaaaaatcccaataactagcaaaaatggtcataccccatcatctactagagcaattatgtagtattttacttagaacagtagaaacactctccattccttttcagctaaacaactaaagatctcactttgaaattactttttttttttttttgagacggagtttcgctctgtcgccaggctagaatgcagtggcatgatctcagctcaccgcctcctgggttcaagtgattctgcctcagcctcctgagtagttgggattacaggggcctgccaccacacctggctaatttttatatttttagtagagatggggttttaccacattggtcaggttggtctcaaactcctgaccgcaggtgatctgcccgccccggcctcccaaagtgctgggattacaggagtgagccaccgctcccagccagttgaaattactaattttaatcagttcaatgaagtggacaattaatttcactcttcacaagccacaaaaatattgacagcttagtagataacagtaagtgaacacttaaaacttgttttattcctaggactttattccccatacagataaatttgcattctcatactgaatgtaaacacttaaagatggatttaactctacagctagaattccatattaaattatatttcactattccctaactaaaaacttttttttccctgagtaagggatatgttgagatttacataaacagcacttcacatgataccgggatttcaaatttttaaaaagatgcagagttcacttctaataatggcaaagtagcacacagatatcagaccaaccctcctgctgatagcaactgcaaactctgaacaaatatattttagaaaaaactaaaggcactggaaacaactataaacaagtggaaagtagagggaagttggcacttaaaaagtgaacagcactggctcaatgtctcatttttaacgggttctcacttgagggggaaacaaaagccaagttttattggttaaggatcagaaggcagaatatggggcaaccacaacagctggaacataaaggggaaacccccaaaaaacaggaggcacagaaggggcagacttccttctgcccaaactctggttgacccctgaactacacacttgcatgggaaagacttccagcagcatagctaaagctaaaacaactgagaagagatttcagctgctgccacctacaaacaagacagagtgtggagttggtgttcagccaagttaactgcctcctaagacaacaatcaattttctttagaagtatgtaacagaatccagggtcattatgtcactcatgagcatgagacaatctatgctatctataccaaatttcagaactacttaatctgaattattcttaaatttagttacaatatgcaaaagcctacttagcatttagtactttgttacttaagtttcctcaggacatggccattttaaacaccacacatccaattttacagcactctttaaataaacagtcattaacccagacaaggaaaacacagattaaagactcccttatgttgtacttctccaaaagtatatattaaacatttagtaggtgtatctaaaatagatgaaaggatgatgacctttaaaatgccttaatattgtcctataacatgaaaataaagatacattcaggcctagaaaagaaattagaatatacactagaagtagtcataaaaaaaactatgaccatctcaacacgtactcatgataaccagtaaatgaatatttaagacgtttatttcagtatcttcattccccactgtaatacatttgaatgcccacgtatttgagttccgtaaatagactctcttaatttgggtaactatataattacccttcagagttgcagacaacaatggaagctttaaaacctcttcaacacaaatgctacccctaaaatgaaagaatttagaggttaaataaaacaagtgagagaccatttacttacatcagttcggtttatagacatttgaatcatatctgaatgactgacttgtttccaatgtgaaaaccaaattaaaaataacttgatcactgtgcttcaaacacaactgttcacatatcaaattctagctccagccatgtaaaattcaacttttctgtatcagagaaaaaagctatttaaattcaggggcattgaatctttcatgaacagcatgaaaatatgagttgacggagatattccaggatgctacaataagtagctttttgtcttacacattagtgcactgaaacaaaatactaaatttatgtaaaatatagatataagagtattccattttgtccaaacctattaaataccttccaaaagtttcataattcagtcctagaaattcttggagctgtgagaatatcctgttcaggaatgtgacttctacaaaagctcccaggaaatttcagaaaaaaatatatataatcttctaattcaaaagttgattgatttgccaaatgacgcagcaagatttgcttctctaaaagcttctgataaggtctgcaagggaagaaatttaaaattaaaatccaaatatttgtgggtcagaagaaaatttaggcaaccatcaattctatatgttgttaataattaccggatgtgcatgacagactctagctatatcttcacaggatgctccatattccaaagcaagagcagcttcatttaccatttctccagcaccctttaaaataacaagccaagtaaatttgcttccaaggcaaaaactacatgctaataggatagcaattgttgaggggaagcttttagatcttaaaaacgccttaaatctgtttctttatcagttgaagaaaagtcaggaaaagcttaatagaaaaggtgacacagaagagcttgggctctggagccaaagggccttcaattcatatctaccacttactaccttaaccattcattggttctttgtgcttcattcagtttcttcacctcaaaaataacagcacctatttcaaaaagctgatgtaaaaataacaaaatgtatactaaagtgacacagcactcaaatattctattctcattattgttacatcagatacaagagatatctacaagaaagatacatactttaggctcagtggtaggaaaggcttcccttaggaggtaacatttgagctgagacctgaataataaggagccagccattcaaagatctggaggcagaacagtctaagcagagggtatcttaagcacaaaggccctaaaatgcaaatatttggtctgttgtgaaaatgagagaaggcccatgtgacatggcattaatgagtaaaagagagcagaaaaagaagaggtcagagaagtaggcacaaacagattcagtgaggccttggatgtaacaatctgaagttgaaaagcaccactggaggattttaaggggcataatctggtgtatgttttaaagagagaatcttggctgcaggacaaagtagatgatacagtgggcaagactgtgagagtgctgctggtatccttctagaaatgatgcacagagagccatattcaaagttttgctggaaatgagcaacctcagactaacaccaggtggtttataattaataaacagcaatgctttctagaaatcttaatgggatttctctggttttacaatactcactggtccaagaatatgtgctcccagtactctgtctgtcgatttctgcccaaggatcttcaccatgccatctgtgtcagcatttgtcttagctctgctgttagcagcaaatgggaatttcccaactttgtactcaataccctgtgacagtcagaaaaaaagaatctacgtaactgccagaaaagttctttccaatttgtaaaatcatctaccatttgttcagaaaataaatcccaagaagggaattgttcgcaaagcacatagaaggaaaggaaagaccagaagactggttaatgaactatatctcaggcacgaatacaagcaaatacaaatgt

SEQ ID NO: 96394 - DNA, 12859 bp, Homo sapiens
gatataatctagagcttatgcaattttttaaacttacaatgtccagcatccagaaaaactataacgtatgtgaatccagtaccgaattacaaaaaccaagaattgatgttcatattagaattaccacaaaaacatgttgaaataaaaataacaaaataaaattatcaaaatatatcagatacctatgaattagttaaataaaatcattccaatggaagatgtaaaagacacccaacactgaaaatttttaaaacacaggaggaaaataaagatgacccgaataattgaaaaaatatgccatatgtcatggcttggaaactcaacaaagacccaattcaccctaaattgttccacatattcactgcaatcccaccatgtttttctcttttaaaaatttttttgtagataaggtgattctaaaattcatatagaaatataacatgtcaagaatagccatgccaacaacattgagaagaacaaggttggaggatttatactacctaggtttatacagctgcaaaaattgagccagtgcactatcagcacaaccacacacaaatataccagtggaacaaaatactgtgtctggctgggcatggtgactcacgcctgtaatcccagcactttgggaagccgaggtgggtggatcacctgaggttgggagttcgagaccagcctgaccaacatggggaaaccccatctctactaaaaatacaaaactagctgggcatggtggtgcatgcctgtaatcccagctactagggaggctgaggcaggagaatcattttaacctgggaggcagaggttgtggtgagccaagattgcacattgcactccagcctgggcaacaagagcgaaactccatctcaaaaaatacataaatgaaaaatactgtgtctagaaacagatccatatatacatctcatttatgataaaggtcttttcaataaatggtgctgagtcaactggataagtgtattttttaaaagtcaggacttctgacacacaccacacaaccaaatctattctagatgaatactagatagaagagtaaaaggcaaagcaaggtttcagaagaaaacacaagaaaatttatatatatatatatatatatatatatatatatatatatatatatatatatatttttttttttttttttttttttttttttgagacggagtctcactctgttgccaggctggagtgcagcggcgtgatctcagctcaccgcaacctccgcctcccaggttcaagccattctcctgcctcagcctcccaagtagctggaactacaggcgcacgccaccaagcccagctaatttttgtatttttagtagagacgaggtttcaccatgttggccaggatggtcttgatcgcttgatctcgtgatctgcccacctcagcctcccgaagtgctaggattagaggcctgagccacggcgcctggccaaaaatacttttatgactttaggataggcaaagatttcttaaacaggacacaaaatactaactataaagaaaagtatttataaattggacaaaattaagaatatctgttcatcaaaaaacacaagagtgagaaggtcagccacggaataggagaacgatttgtaagacatacacatacacaccgcacatatgacaagtgagttacaaccgtaatatatttttaaaattctacaaataatgaagaaaaagttggtgaacccaatggaaaaataggcaagatctggaataggtacttcacaaggaagtataaacatggccaataaaccctggaaaagatgctgaatatcatagctatcaatgaaataaaaaattaaaaccataatttagtatcacttaacacccaacaaaactgctcaaattaaaaagatttaaaaaggttgggcacagtggctcacggctgtaatcccaatactttgggaggccgaagtgggcagattacttgaggtcaggagttggagaccagcctgaccaacagggtgaaaccccgtctctactaaaaaaccaaaaattagcagggtgtggtggtgcgcacctgtaatcccagctactcgggaggctgaggcaggagaactgcttgaacccaggaggcggaggttgcagcaagccgagatcgcaccactgcactccagcctggacaacagagcgacactcagtctcaaaaaaaaaattacaaaataaagtgttggagagaaagtagaacacagaggcctcatagaattctggtgaaagaataaattggcacaagcactatgcaaaaccatttggcagtatctactaacgttacaaatatgctcactctgtgagcagcaatagtactcttaggtatatactccaaagaaacgaagacctatgttttccaaaagatataacccagaagtactactactaaatattcccaaactgcaaaccatccaaatgtctagcaatagagggaaaaatgaaaagtatacccaacaatatagaaggttctcacaaacataatattgagtgaaaaaaaaaaccagacatataagaacacatgctgtataattcatagaacatgcaaaaagaggcacaactaaattatgctgctagaattctgaaaaactgatcaacctttttgggaacagtatttggagtgttcataagattgtttctcattcagggtggtggttatatagatgtatttcatgtgtgaaaaatcatggaactgtaaacttacgatttgtgttgttctctatatataatatttttataaaaagttttttaataaacccaaaggatgtatgaatccttgtgacaaattcagcattttaaaaaagagaaggggagaaaatagatcatagaaacaggctcggtgaggctgggagcggtggctcacgcctgtaatcccagcactttgggcggccgaggcaggtggattacctgaggtcaggagatcgagaccatcctggccaacatggtgaaaccccatcgctactaaagatacaaaaattagctgggcgtggtggcgggcgcctgtagtcccagctactcgggaggctgaggcaggagaatcccttgaaccccggaggtggaggttgcagtgagctgagatcacaccactgcactccagcctggtgacagagtaagactctgtctcaaaaaaaaaaaaaaaaaaaaaaaaagaaacaggctgggtgaggtggcttacacctataatctcagtactttgggaggcaaggcaggcagattgcttgagcccaagaattcgggatcaacctgagcaacatggtgagaccctctttccacaaaaaatacaaaaattagttgggtgtggttgtgcatgcctgtggtcccaggtactcaggaggctgagctgggctgaacctgggaggcagaagttgcagtgagtgaagactatggcactgcattccagcctgggtgacagagactctgtctcccaaaaaaagaaaaagaaacacatttaacttagaaaaacaaggagtccataatattttttttaaaggtgcaaaaaaattcatttaatcactgaggcagctattaaagcaacaccttactttgaaaaccggtaactaaaatactggcaaaccgaatccagcagcacatcaaaaaacttatccaccatgatcaagtgggcttcatccctgggatgcaaggctggttcaatatacgcaaatcaataaatgtaatccagcatataaacagagccaaagacaaaaaccacatgattatctcaatagatgcagaaaaagcctttgacaaaattcaacaacccttcatgctaaaaactctcaataaattaggtattgatgggacgtatttcaaaataataagagctatctatgacaaacccacagccaatatcatactgaatgggcaaaaactggaagcattccctttgaaaactggcacaagacagggatgccctctctcaccactcctattcaacatagtgttggaagttctggccagggcaattaggcaggagaaggaaataaagggtattcaattaggaaaagaggaagtcaaattgtccctgtttgcagacgacatgattgtatatctagaaaaccccattgtctcagcccaaaatctccttaagctgataagcaacttcagcaaagtctcaggatacaaaatcaatgtacaaaaatcacaagcattcttatacaccaacaacagacaaacagagagccaaatcatgagtgaactcccattcacaattgcttcaaagagaataaaatacctaggaatccaacttacaagggatgtgaaggacctcttcaaggagaactacaaaccactgctcaaggaaataaaagaggatacaaacaaatggaagaacattccatgctcatgggtaggaagaatcaatatcgtgaaaatggccatactgcccaaggtaatttacagattcaatgccatccccatcaagctaccaatgactttcttcacagaattggaaaaaactactttaaagttcatatggaaccaaaaaagagcccacattgccaagtcaatcctaagccaaaagaacaaagctggaggaagcacactacctggcttcaaactatactacaaggctacagtaaccaaaacagcatggtactggtaccaaaacagagatatagatcaatggaacagaacagagccctcagaaataacgccgcatacctacaactatctgatctttgacaaacctgagaaaaacaagcaatggggaaaggattccctatttaataaatggtgctgggaaaactggctagccatatgtaggaagctgaaactggatcccttccttacaccttatacaaaaatcaattcaagatggattaaagatttaaacgttagacctaaaaccataaaaaccctagaagaaaacctaggcattacaattcaggacataggcatggtcaaggacttcatgtccaaaacaccaaaagcaatggcaacaaaaaacaaaattgacaaatgggatctaattaaactaaagagcttctgcacagcaaaagaaactaccatcagagtgaacaggcaacctacaaaatgggagaaaattttcgcaacctactcatctgacaaagggctaatatccagaatctacaatgaactcaaacaaatttacaagaaaaaaacaaacaaccccatcaaaaagtgggcaaaggacatgaacagacacttctcaaaagaagacatttatgcagccaaaaaatacatgaaaaaatgctcatcatcactggccatcagagaaatgcaaatcaaaaccacaatgagataccatctcacaccagttagaatggcgatcattaaaaagtcaggaaacaacaggtgctggagaggatgtggagaaataggaacacttttacactgttggtgggactgtaaactagttcaaccattgtggaagtcagtgtggcgattcctcagggatctagaactagaaataccatttgacccagccattccattactgggtatatacccatatgactataaatcatgctgctataaagacacatgcacacgtatgtttattgcggcattattcacaatagcaaagacttggaaccaacccaaatgtccaacaatgatagactggattaagaaaatgtggcacatatccaccatggaatactatgcagccataaaaaatgatgagttcatgtcctttgtagggacatggatgaaattggaaatcatcattctcagtaaactatcgcaagaacaaaaaaccaaacaccgcatattctcactcatagatgggaattgaacaatgagaacacacggacacaggaaggggaatatcacactctggggactgtggtggggtggggggaggggggagggatagcattgggagatatacctaatgctagatgatgagttagtgggtgcagcgcaccagcatggcacatgtatacatatgtaactaacctgcacaatgtgcacatgtaccctaaaacttaaagtataataaaaaaaaaaaaaaagaaagaaaaccggtaactagctctttttccggctggaaccatggtgggtgtagaagagaagaagaaggttcctgctgtgccagaaacccttaagaaaaagcgaaggaatttctcagagctgaagatsaagcgcctgagaaagaagtttgcccaaaagatgcttcgaaaggcaaggaggaagcttatctatgaaaaagcaaagcactatcacarggaatataggcagatgtacagaactgaaattcgaatggcgaggatggcaagaaaagctggcaactactttgtacctgcagaacccaaactggcatttgtcatcagaatcagaggtatcagtggcgtgagcccaaaggtccgaaaggtgttgcagcttcttcgccttcrtcaaatctacaatggaacctttgtgaagctcaacaaggcttcgactaacatgctgaggattgtagagccatatattgcatgggggtmccccaatctgaagtcagtaaatgaactaatctacaagagtggttatggcaaaatcaataagaagcgaattgctttgacagataacgctttgattgctcgatctcttggtaaatatggcatcatctgcatggaggatctgattcatgagatctatactgttggaaaacgcttcaaagaggcaaataacttcctgtggcccttcaaattgtcttctccacgaggtggaatgaagaaaaagaccacccattttgtagaaggtggagatgctggcaacagggaggaccagatcaacaggcttattagaagaatgaactaaggtgtctaccatgactatttctctaagctggttggttaataaacagtacctgctctcaaattggaaaaaaaaaaaaaaaraaagaaaactggtaactaaatacaaataaattaagcatttctctttcctttcctgtaaaatttgtaaaatttgcctttgagaatacccaaatagcttcagttgatgaaggaaggctcttctttacagaagaatgtcaattataatgtaggagtaacagaattagacattggtcattctgcaactctaatgaaattattagttctggaaatgattaggttaatggttgatgagataatgcttctagcacaattgtccaatgagaagcagattgtcatcactttaacacggtggtcatccttagcattactaatggttgttcaactaattgtcatgtgtgtcttgatatgatgcattatgaggcacatgacattacctacaatgtgctctaacaacaaaatgtttaactcaatcaagccattatatttaaattccagtgttcaggaaatgaaaaggaaagaggaacacttcaaataacactgagaaggaagaaggcaggtacatccagaaagcgagtctttctgcctgttaaccagcctaatgtcttcaattaaatcagttttaaaggtgcaggtgaagaaggtgtggctgaaggactgcgttatattttaagtgacttggagaaatagtcagatgcaatgtgtgatctagactgaaccctcatttggatctaatcagttacataaataacattttcaaactgggtacaggataaagggacatttactgatatagaaaggtatacattatatgctaaaaaaccagattataaaacaacatatacagaatgagtttattttggtatatatgtgcatagaataatttctgaaggaatactgtgcagacattactaatgttcaccaatacactgtttgcttccccttccaagcatacagaaggttgtacttttcaggcccatgcaatcggacaggataaacagattgtgagtagaagaaacccgtggcaacttctgctgaaatattatttccttgccacagaaatcatagaggaagactcaattaaaatacagacaacaggacaggatctaagtaaccaccacacggaggttcactgtgccaaagagtcacccaaacccacagttaactttgcatgagccagaaataaaactgttttgttaagtcactgagatttcggtgttgtttgctattagagcttaaggaagcttaatccaatgaacacaaataaactctaatacattacagtggtaatctgagggtaaaatatattatttttattttcttatcttttctttcttctaattccctacaatgctttgtgctgccttctttctaaacagtcaaagttcttctttttaattaaaaaacataatgaaaggagaccaccttcatcacagtgaaaaaattatcacagacaattccctaaatgtggctgccataaatgtagcatacaaaataagtaactcatttttttttagggcattacgtatcagacataattccctgtatttagctaccttaaatatggtagacacataaaaaagtaaaattgatacagatgttttataaaaattctatcatttttaaaaagctcaactcttgataataacaaaaagtttagctggaaaagttcacactagagtgtacatgctgacacgttatatgcaatttgtccagttcactgtttttcagatgattatttaagggaagggtgacaacttttttcagactacctagatttttattcataattgatctgaatatatattcctatattacattttttcatagtattgaaaggtccttagatttgggattagttatgcaagataaaagagtcctcagagtttcaattagcaagactatttaaactgcaactgaaaactactcagaaatccatcagtagtacaactggccttgtaaaagaggttgaagtgagccaccttgccccttctgccatctaagtaggtcatgagaagctgctgtctaggaggaacgggactctcaccagacatcaaattgttggtgccttgattttggactgcccagcctccagaactatgagaaataaatttctgttgtttataaattacccaagctaaggtattttattatgacagcccaaatggactaagccagtatgtaattctatttaagatctttgctttcagtatatcactgaaatgtgaaatatacttaaaagcatatgtatatttgagaatcttatcttttatgtaagattatataaatataaaatataatcccaaattataggaccataaaatagtgaagctacctataataatgtatgtgttatacaatacacaagtaaggatgggtacattattcaaagacaatttttcaacaaggtaattgttaaaaagtagaataaatgtgttctaagttaaaacaattttctgaatgccaagctaaaaataagcactaatagatttctaatgaaatgtaagcagtatctatcattatgatattttcaaatttttcattaaatattacaaataatcttaataatatagatgtaaagagactcaatcacattagtcatattttatagcacttctctgaaaacagtccatttaagtgggtctaaattatcttcattattttatagttgaaaaaactgaggcaaagaaaagctcattgttttacttaatatgattactaattcaattatgagtaaggtcattcaaatttttagactttcaaatacgaaaggaccatgaaataaaaacaacagcctcacatatgaattatgtctcctatcttaaaagaacagttacatagtataaatatttacattgcactaaagaaaaatctggcagctgttaggcaatccaactaataaactgattattttctattttataaatgtttaatttcaaagtatacatattggtgctaacaaaataaaatgaattgattagcataatgtatgtcacaaaataaatagggtaattactgaatacacatcacatgtataataaaaaccacaaaattcaaatggaaaaatgaaaggctttgccttctccattttagattttttttagtacttctattccaagacaaaactagattaaataaattagaaattaccttgacagccactccttttccttcaggaaattctagaagatgaaaagtcagttcttcaaccctagtaatgcagagctttgggtcagttgttcttcttaatgcctgaactaatgcccgggtcctgttatcaatactcacccttgcgataatctacaaagacatattaaatagatatgattagaatacaaaactgctctaaagaacaatgaaagtttcttagttctcattaggaaataaaacttataaatttgacaaaaagtaatagaaccgaaaagcacactgaacaacttgccttttctcgctgaagagataaacgctttttctcctctgcatttctgtctttgctgacagcctgatcagttttagcaggctcttcctgttcttctgactgactctttgaatcatactttaatttggggacaagtccaccaatataaccacctactaaagcttgtacaccttccgtgggacgagaaagaaagttagcaatactttgtttagttgaaacttgaagaacatcaggtatcgcagaaggacttgtaggcttgtccaccgtatgtacagattctgagcctggcttataagccaggatgccaggatctggagatcttaatttcccctcttctacctttttatcttcaagttctgatttgtcccggaaatgttcattttccttttgttgagacattttttccttacgtttgaaatatgaattaatatgatttgataaaaagtagaatgagtctccaaattttgtggttatagaacttgtgtaatgaaaaagactgcgtttacctatatcttcttctttgtctataatgtgacttttctcttctggaaaaggactcttttctgctgatttgtcactatattttttcagagatttgatggcttgtttgatgtttttctgttttaaccagccactatccgatacttttcttaaaatttgggaacttggcttaaattgagctaaacgtgaaatcatttcattttgattgccaaaaacagcctttgaaacagagttcaaagtacttttaatacgggacatacaaatgttcacttttgtaagtcccttgggagcagaagtgctaagtttcaaaatcccaatatgtaaaccatggttgcttggagagtaacagtgcttactgcaagaatgtgcttcacttttggtccatttacatcttattatgtttgtatgaaaacctctttgtagactgatgtggcttatcctccagtaatgcttaggtgagaacaagaaatacagttgcttgcttctctgcttcccacaaacacttcttgcattactaaggaggtaaatatatatatctacagtcagattaatagacataacttaaaaatcatttattttctatgacattctctcacttcttgaacgcttcatttaagaaatgccataattcatggtcttacctgaaatggcaagaaaaaaaattagaattcacgttaaaaattgaaattgggtataacagaaaacacaagactatttggactaaactcagcaagctgtctcaaaaaaagcagacaaaatattcctattatagctgatagaaaattcatttttaagctaatagaaaataattcactttcagtatagaggtaaataaaaaaagaaaatgaggaatagaatgtttagggagaagaactaatttagggaagtttcccaatagataagtcttccgttgcacaacacataatttaatatgcaatttagatactatgcttttttttcccttcctcattgttaaattctggactactttatgtgacactagactttaattccttgaagaaaaaggtcaggtcttatacattattcattgcaaacgatttatagaatacttaatctataccagacatggtgctagatgctgaagccacacagttacaggatatgaaagaatttccagactagagctgctgatagccatgtgaaaaagatttcactacctaagtaataagtgctcattaaatcaagtaagtcaggctagaagaaactacagcatataacatagaaggggttcttaaccactatgtaaaaagaacacatacaaataagaaaagaataatccaatttaaaaatgtggtattggtaaaagaaaagacaaatagatcaatggaacagaatagagagtccagaaacagacccaattaaatacagttaattgatctttgacaaaagagcaaaggtaatacaatggggcaaaaatagtcttaacaaatgacaactgacatctgcatgcaaattaatctagacacagactttatacctatcaaaaaaattaactcaaaacagattacagatctaaatgtaaaatgcaaatgtataaaactagaatataacataggagaaaacttagatgaccttaggaatggcaatgactttgagacaatatcaaatgcacaatacacaaaagaaaaaattggtaaggtagacttcattaatattaaaaacttctggccaggcgtggtggctcacgcctgtaatcccagcactttgggaggctgaggcaggcagatcacgaggtcaggagttcaagaccagcctggtcggcatggtgaaaccccatctctaccaaaaatacaaaaaattagctaggcatggtggtgcacgtcggtaatctcagctactcgggtggctgaggcagaagaatcacttgaatccaggaggcagaggttacagcgagccaagatcgtgccactgcactccagcctgggtgatagagccaggctttgtctcaaaaacaaaacaaacaaaaaaaaaaccaaccttctgctctgtgaaggtcaatgtcaagagaataagacaacgaggcagagattgggaaaaaatattttcaacagacatatctgataaagagctgtcatccgtaatatccaaagaactcttaaagctcgacaataa

SEQ ID NO: 96395 - DNA, 172943 bp, Homo sapiens
  misc_feature (1)...(172943): n = A,T,C or G
aaacatttaggattgttatatccttttgataatggactcttctattatgaaaagataatatactgtgggtttataacatatgtaaaagtatgagtaacatattatcagaaggggagaaatggaagataacttaggcatcttatttttaagcatagttttccctttgtttctgcattagatgatttacctgaaatgtcattcaatttaacttactctccatcctcacccgcccagctttggttatgaggcagtagaaagaaatgatctgcctgtggttttctagaaatacgaaagttgagtccttaaggctacacagaaagaaagtacctccccagggcttcacccttcccatcctttcagcaggctttttgtctgtcgtatcttctctgttgaaatggccattgacaagaggaggaaaggggttttgttgtggattgttcaggcacttcctttggggtatatgggggatgagtgttacatttatggtttctcacctgccattctgatagtggattcttgggaattcaggcttcatttggatgctccgttaaagcttgctccttcatgttcttgcttcttcctaggagccagcaccgctctttgaccttgccatgcttgccttagatagtccagagagtggctggacagaggaagatggtcccaaagaaggacttgctgaatacattgttgagtttctgaagaagaaggctgagatgcttgcagactatttctctttggaaattgatgaggtgtgacagccattcttatacttctgttgtattcttcaaataaaatttccagccgggtgcggtggctcatggctgtaatcccagcactttgggaggctgaggtgggcagataacttggggtcaggagttcaaaaccagctggccaacatgatgaaaccccgtctctactaaaaaaatagaaaaattagccaggcgtggtggcgggtacctgtaatccaagctgctcaggaggctgaggcagaagaatcacttaaacccaagaggtagaagttgcagtgagccgagattgcaccactgcactctagcctaggcgacagcgagactgcgtctcaaaaaaaaaaaaaaagaacgttccaaggtcaggactaggcctcccctcagaagcagcaagtgacatatgtgacatcctctccactccctatttgcatttctaggttatataactgtactactatccatgcatgcctactcttgttcccagggtgaaggacccagacatggagagccgaatccctgcaggccattataaatgagattatgccatttgctcccatttcttcttattctttcatttttggggctctccatcttgatgtgttctttggatcgtgaacagatccaaagaaaaggttgttctgccgtgctgtttgtcaggatgaaaaactcttttttaagtgtttaggtctgcccccagtgcccagcccaatcaagtaacgtggtcacccagagtggcagataggagcacaaggcctgggaaagcactggagaaatgggatttgtttaaactatgacagcattatttcttgttcccttgtcctttttcctgcaagcaggaagggaacctgattggattaccccttctgattgacaactatgtgccccctttggagggactgcctatcttcattcttcgactagccactgaggtcagtgatcaagcagatactaagcatttcggtacatgcatgtgtgctggagggaaagggcaaatgaccaccctttgatctggaatgataaagatgataagggtgggatagctgaaggcctgctctcatccccactaatattcattcccagcaatattcagcagtcccatttacagttttaacgcctaaagtatcacatttcgttttttagctttaagtagtctgtgatctccgtttagaatgagaatgtttaaattcgtacctattttgaggtattgaatttctttggaccaggtgaattgggacgaagaaaaggaatgttttgaaagcctcagtaaagaatgcgctatgttctattccatccggaagcagtacatatctgaggagtcgaccctctcaggccagcaggtacagtggtgatgcacactggcaccccaggactaggacaggacctcatacaatctttaggagatgaaacttgcccatctctaaaatttcgggatttctttgtacccaacaaggttcaaacacaacagtcagcttttattcatgatttttacttccatctgctgatgtagaacatacctccagagtgacctcagaaattgtcaaatgtgaaaacacaagccatcacagtgagaaatgggaggttgagttagattgtctaaggctggagagtccatatactcccactgttagctctgaagtgtgtagccagtcttcagattctgggtcagttgcctcagtctctcttagcttttgccttactctttatccgaccactgccctgccaggaaaacaaggctctataactcctcttacaggtcagcttgacacaaaaagggtgcctggattcctaatgtttcattgtcacttttcccagtcagatgataatgcttttcaaatcaacatatattttgggggaggttggaagggagagttgaaatattctaagaatcaaagagtagcccactttaatcagagtatgacccctgattgctcacagtcatctcctgagcagtgtgagcgagtttcagatgaggaggctgaaggccagtcaggcatgctcgaggattccaagtctgtaggtgggagggcagagatttagtcctgttggccaaagcctctagggaatttctcactccagtggagaaggcaacacacttaccaaactgtgtggaaactatctcatttgattagaaattttacctcaagaagaggaaggacagttgagaaagaacattttcttacacatgagacagctaaggcttacaagaaggagaggaataatgaggcaaaataatcctcattaatattttcattcctcccctggggattagaactactttcagacccgattttaatggtaagttaggtacttcctacagttgccatccaaatatcagtcaggatcagacatgatgttagctcctgctacaataaaaccattttctccctgaatgaaaacaaaggttccacaggagacagtcccacagagcagtggcttcttttcctccctttaaaacctcatgttggctggacacagtggctcacacctgtaatcccagcattttaggaggctgaggtgggaagatggcttaagcccaggagtttgaggctgtagagctatgatcacaccactgcccttcagcctgggtgacagagcaagaccttgtctctaaataaacaaacaaacaaaaaatcctcttgtgttcaggcctgtgggatcccctgagaggctagcccacaagatccacttcaaaagccctagataacaccaagtctttccagacccagtgcacatcccatcagccaggacaccagtgtatgttgggatgcaaacagggaggcttatgacatctaatgtgttttccagagtgaagtgcctggctccattccaaactcctggaagtggactgtggaacacattgtctataaagccttgcgctcacacattctgcctcctaaacatttcacagaagatggaaatatcctgcagcttgctaacctgcctgatctatacaaagtctttgagaggtgttaaatatggttatttatgcactgtgggatgtgttcttctttctctgtattccgatacaaagtgttgtatcaaagtgtgatatacaaagtgtaccaacataagtgttggtagcacttaagacttatacttgccttctgatagtattcctttatacacagtggattgattataaataaatagatgtgtcttaacataatttcttatttaattttattatgtatatattgtgtcagttcagatgccaaaaagaggtcttgaacatgtcacaggctctgatggcactgaccatggagaaagcttgatttgatcatctggtgtctacaataaccaaagctaattattaaggaaaaaaacttgaagaaagaaaatagtccttacttcatctataatgaggtttttgtttttttgttttgagacggagtcttgctttgttgcccaggccggagtgcagtggcgcgatattggctcactgcaacctccgcttaccgggttcaagcaattctcctgcctcagcttcctgagtagctgggattacaggcacctgccaccacgcccggctaatttttgtatttttagtagagatgtggtttcacgatgctggccaagctggtctcaaactcctgacctcaggtgatcctcccacctcagcctcccaaagttaagtgctgggattacaggcatgagccactgcggccggcattaagtatgagtttttaagttagcccactttgttaatgactatgagtactaatagcttaagataaagaagtttctaggtaatcttgtttgaaggatgatgtaaaaatataaatttaaactgtgagtgacaaaataaacttccttaatatttgcctacatttagagaaatggagcattcagctcagaaaggaagaatgtctgtggttttaaggtaaaatccatattccaagactcagtgaagaaagttcagtgataaagaacagactactctcatcttatgaagaaatggagcaatttcacttggaaagactaggaagacaaaatgttacagacgtatttgttgtgccacaaaataggcaaggtcagttttgaacaataagaactccataaagtagaccagggcatctcagaagtgaggttccatgagcccaggtggggcacaggctgggtgatcttgagtggagaggaagaggggttttctgagcttcaagagctgggccacacagtgtgttggttttagctgggatggagttctagaacaaacctgcactttagaacacctttctacccacccccaaccacacaacttgctactattagtaaatgtataggctgaggcacggtggctcatgcctgtaatcccaacactttgggaggctgaggcaggcagatcacttgtggtcagtagttcaagaccagcctgggcaacatggtgaaaccctaactctactaaaaatacaaaaattagcagggtgtggtggcagacacctgtaatcccacctacttggggggctgaggcaggagaatcaagcttgaacccggaaggcagaggttgcagtgagccaagatcataccactgcaccccagcatgggtgacagcacgagactgtctctcaaaaaaaaaaaagaggccaggcacagtggcccacacctctaatcccagcactttgggaggttgaggtgggcagatcacttgaagtcaggagttcaagaccagcctggccaacatggtgaaaccccatctctactaaaaatacaaaaatcagtcgggtgtggtggtgcacacctgtagtcccagctcctcgggaggctgaggcagaagaatcacctgaacctgggaggcagaggttgcagtgagccgagatcgtgccactgcactccagcctgggtgactgagcgaaactctgtctcaaaaaaaaaagaaagaaaatgtatagaaaatcatctcaattcagaagattggtatccatattttttaaatgaagggctaattaaaaaaggaacaaatattagagattttattcacttttgagttacctttttaaagtctagttttattatcttatgtgcctttagtcactagattttcccccaatatattttctgtgtaagcactttaaagatacaataatcatttctataaaaccacctgggtactaagagcaaaagagaatcataaattctgcaaagtagttgcactccatgattttaaaaaaacctcttggacagggtacctctaaaggtgaaactcaagtctttaaaagttctacattccagattgtttttccttgagaaggagacaaaagaagagggatgtggttgccatgatttgttttaaagtctcctataacaaaatgaacatgtcagtagccaattgtggttggcaaaagggtgtatttaayagaatctgcaggcagatttccaatctgcctgccctgccctaccctccccctttgggtttgtttgaggtttcattccacaaataagcagcagataaaatactttacaaggtacagcacagttgtattgaagaaaaaaaggacccaactcttactttargagtattaggcctggacttcccctgccccatgcaataaagcaagttttatatacactccccatatttttttctaacattttcttatataaatttaaatattttacaaaaaaaggcttttttcctccaaacatataaatctgagtgaaacatagattccccacccgagaacttgtttcttcactaaaatataaatgttgtctgatattaagggtaaatgtcttttgaccactggagatcactgaagtctgaattgcaccgtggagaaggcacttgtgttttctgaggtctccagcaagtatctcagtgagcactcatagaattgctgtctgtcctccagaacccgtgccaaggcctccgagtgcccagttactgaggcagctggggaaaaaygttgagtaaacatgattctacaattacggagataaaaaataaaaacagcatggactggttctaccctagaatcaaactacaacaaaatccaaagtgttcattcatgtagattcaaaatgacttcattctgtcataaattataaaatacaaaggtggctgttttaatgacaaaactcaaaacagtactaaaaggggtttgtgtcaatggacaaaagtcagtccctctaggtagggccccaaggagcatcacccaggttgaagggtggttttcctactgctgggccagaagtgctgtcctattggccttcatcttctccagccgcttggccaggtggctgttggtcatctccatctcctcaatcttgtccagtgctgttcgtaactggagacagggagaatgcagtcactacatgtggtcagaaacaacatccagtgctactctattttcaacttcctgggaaatgaaagcactgctaactgtgatggccttgcacaggacccacaacctcattttttctatcagttagaggtgttaaatgatgatactgaggattgtttatttgttttaatcacagaaaggatatatagaagttggagaaatagacctgatctgaagcaaaaatacaaactatctttttacttagtatctaattgaccaaaacataaaagtaaatggcagtcactatgcaggtcaaaaaccaacacaaattagttaagtgactccactgctgtttccttaagtatcaaatttcttacacagctaagaattatttccagaagattttttctttttaggaatgtattctccaagaaacatattaaaagaagtacctctcgttgtagcttccgtttttctgctttcaattcatcttcaactttctcagcattctcagcagcagttttatatctcagaacctgtccctcaagccggctaatctgtaartatgagaacayaggcctctagtactgggcactagaagtcaccactttttggtagccaggatggaaatacaatgtcattataaatgccaagtaatctactaacaagtcccctaagggtgactcataagtcctctcagaactcagttgctatttataaatcaagtaatgtccccagagaggattacagctgtagagtcattttagggccaatttcccatgctaagttttattatgaccatattgtttaagtgccaaagcaatataggaagagacactaaatggaaaagttcktacactttttggaatgcgtaagggattttattacaaatgatgatcttgaattctcctgaaatatctacaaaaamtgatagctatagtttcctatggttttagagaaaacagaaggctaaaatgtcccaacaagtgctctctgctggcttttctattttaatacagaactattattgatccaactgcaaaggcaacccaggcactcatgggttgttagccacttagatgcaggaaggacatttaaataacttagtaccatatagaagtacttacactttgctccaaggtagttatatcctgttctgcttttgaaagcttaaatttgtattcgctaatttgtctattggcatctcctagaacagaagaagacaatgaattatcttcacctgtcagagatgacagtatgagccatcaggcagtacctctgtggcacagagaggaccatgcagtcttaagattacaaaatacagggctgggcgcggtgactcacgcctgtaatcccagcattttgggaggccgaggtgggtggatcatgaggtcaagagatagaggcgaccatcctggccaacatggtgaaaccctgtctctactaaaaatataaaaattagctgggcgtggtggcacaggcctgtagtcccagctactcgggaagctgaggcaggagaatcacttgaacccgggaggcagaggttgcagtgagctaagatcgcgccactgcactccagcctggcaacagagcgatactccgtccccctgccaaaaaaaaattacaaaatacaaatgyacacacaacaaccacagcatcttcagcagcccaggttctggactgtatatactacaagatgctctagcatatatgttactacagtatcccttgcagcaagagttagaagaaaattctttaccctatgatatgtgtgagcagggcttgagaaaggagccctgccaattcagcagcagcccctaccaaccctgtgtgtaaccttgtggagcctccctgcccacgggactgggccctctagttccctgaacgcggccccatgccttcccatctcccaggttttgcttctgctgtccaatactgtaagggtccttttctcccacctctgacttgcttcaaggccaagctcaattttcacctctttcatgactccccttaattataagtccttcccttgctgtattttatttgcatttttatgacatttgtcatgctttttaaacatcgtatgtgtaagcaagragaggggccctgtcttggccttcctaaatctacctatgtacctagccaagtgcacacagtgtatgcctaaataaatatatgttggaataaatgctgttcagtaatgtgataatgtgttatgggtagagctataagttactagatgaacatctgacctaggaagtaaatcacttaaaatgaaaagtttagaaatgatggcaggggacttttaaaatccctccaagaatccaagtttagcaaaaatcagtctctggcatgattacagtaataagatttgcaaaagataaaccaaatctaacataccacaggaaatattcagattatctaacttaagaacttttctacatttccacatgaccaaggttacaattacttatacagtcttcaatgtgagaggtttttctttttttttttttgagatggagtctcgctctgtcgcccaggctagagtgcagtggcgcgatctcggctcactgcaagctccatcacccaggttcacgccattctcctgcctcagcctcctgagtagctgggactacaggcacccgccaccatgcctggctaaatttttgtatttttagtagagacggggtttcaccatgttagccaggatggtctcgatctcctgacctcgtgatccacccacctcagcctcctaaagtggtgagaggtttttctaattggacaattactgtcaccttaaaaggaacagggttaccatctccccaaaagccatatctggtagtgaaagagaagtattcctatttctgagccctaaaacaagcttcaggatctgatttttaaattgttatcctcagcaatctattgattatccaaatgtacttcttccttctcactctccaaaccacctttcccttcctgttttcaaaagtttaagtctcttatctcagtaacttcatgtgtgttttgaaatcccattccaaaacactctcataataggcaaggcaccatccagaaccaagagttgctccactcctggccttctggtccagggaagctgcttgcttttgtctttgccagctttcccacagtcctgcaaagctcactttgttctacacctcctgcctgggtactttaccttctgcaaataccagctatacaacaacctacctactctaggaagtattcacacataaatgccagcccattccccctaaatctgtttccttttaaatttgctgcttaaggacaatctctcagatctattccctaccctctctctaagactgctgacagctactgaactggttcaggctcaccactgtagtagcttcctaactagtcagcctgccttttcccatgtccctgttctcatctaccgccaacaccaaaatgacattcttgaacaaaatattcaccaggaaatgtcacaagtgtcctaactgatgtccaacagaaaagataataccaatatcaaaagttagtattaataagccttaacccaaaaagtcttttctcttttttttttttttgaagagacgggttttcaccacattgcccaggctggtctcaaacttctgagctcaagcaatccaccacctcagcctctccaaatgctgggattatgggtgcgggccaccacgcctggccccaacatgtcttttcttggcagcctatctcagaaggtttagatgaaaagtccatggaataaacaagattttaatattagttatcagaaaagtcactattcttattggaaaaatgaaaatctcctctgtccgagaattacacataatcactaacaaaggctaactacaaattcctgctgaaatcttcctactatgggaattagtgtgactrcagtgatcattttattatgaggtcagaagtagaaaaatgagaaaaactggaataattcgggtaaaatgaatagaatagactttattttgtggacttattttaaatttcatctaataaagataaacttggattaacaaaatacttctaggaaaattctgaaactactcaatttagtgtgaagtagttccaaatagattcrtccaattatccaagacaaattccagagaaaaaactttaatggggaagggtgcttgctgtatgggagcttaaagatgacaaatggatgtggaaaaggacagtgccaggttgtcaaaaggcatttcactgtgtgcaaaaagttcctagaaatcactttatccagaaagggtaagagcaataaacctcattatcccctgaagcacacaggctagtggagcctctattcagctatattgctgactaggactgtttttctggactagccaaggactaaccaatttttgcagcatagctcttcttaagaaaagcatattaacggccaggcgcggtggctcacgcctgtaatcccagcactctgggaggctgaggtgggcagatcacctgaggccaggagttcgagaccagcctggtaactatggtgaaactctgtctctgctaaaaacataaaaaactagccgggcatggtggcaggcgcctataatcccagctactcaggaggctgaggcaggagaattacttgaacccaggaggcagaggctgcagtgaacggagattgcaccactgcactctgacctgggtgacagagtgagactcccatctcaaaaaaaaaaaaaaaagaaaagtgtattacaagataccagcaacctgctgacaaacccacccctgggacacagtctatatacagactgggactggcctgtcccctggtacctactctgcatttcgatgaactgcaagtctgagccattctgcagtcctgccaggtcacccactgtgccatcattcctggagcatttctgtcgttcctcctctaactgaagcttcagttttctaatctgaaatgaaaataaaggttcatcagcaagatccaatctctcaaatgaagccgatgcttattctatggtcacatcatagaacaaagcagacccttatcgtatcasccacattcattcaaaacctattttcttgagtgcctaataggagacacacatcgtcctaggtgctaaagataagctacgaacaaayatcgaaaagagcaagccccaggaccaggtgtcccagtagaaaatagccatattttaaatttgtgtctgcttatggaacagtacatctttggggtattttttgttacttttatttaaaatggaaaattctagccaggcatagtggcatgtacctatgtatcaggctacttgggaggctgaggcatgaggatcacatgagcccaggagtttgagaccgacctgggcaacacagtgagacctcatctctaaaaaaaataaaacaaaaatataaacagttaactgatagggtatattcaagagattatttcttaaaatggaagattccatgagcagttttttgttgtttacttttagacataggttaaattttcttacttagaaaacatcctgtatgtaaaaataattggggctgggcacggtggctcacgcctgtaatcccagcactttgggaagctgaggcgggcggatcacaaggtcaagagatcgagrccatcctggccaacatggtgaaaccccatctctactaaaactacaaaaattagtggggcatggtggcacrcgcatgtagtcccaactactccagaggctgaggcaggagaatcatttgaacctggtaggtggaggttgcagtgagtggagatcacatcactgcactccagcctggtgacagagcgagactctgtctcaaaaaaaaaaataataataataataataattggatacatagagatggcttccccagctgtccttaactccaccaacaggggtcaaagggaggcctctgcactaagattaagtttgccactccccaatgggaaaagggtaagctctatattgggactaactctatacttcccaggcacctctgccctttcaacacacagggtcaccatcattagctgccttgagggaaccaggacaaatctcagtatctccatcattcctatttatgtgcatctcacaaagggtcatatccttcctctgcagtcttcctcacaagggtctgtacgaccactaaccttcatctcctaacctttcccaatgcctgaaacttttccactgggccctctagaattatcagtccatcatcagcaaacaccctctgtcctcagtcttttctgagcatcccccctttaccctcgtgctctgataaccctctcctgctgcttctgcagctctctcaaacactgtttttgttttgttttgttttgttttgtttgtttgtttgagacagggtctcgctctgtggcccagactggagtgcagtggcatgatctcagctcactgcaacctccgcctcccgggttcaagcgattttcctgcctcagccccccgagtagctgggattccaggtgcatgccaccacgtccaatttttgtatttttagtagatggggtttcgtcatgttggccaggctggtcttgaactcctgacctcaagtcatccacccaccttggcctccccaagtgctgggattacagacatgagccaccatgcccggccctttttttttttgtacttccacagcttcctaccactgaatctagaaatggaataggtgtcctcttgctttccttgctggtattttccctccatcttccctaaaagtcccaggtcttaatctcgtctcttcaaattatatacactaactacttatcattgccaaaatcccattccttcatcaccatttattaaatagctcccaacttgcactccctctagactattcctgtcttaatttttggcaatttcaatgtacatctaagtagaggatctcccttacaaatgatctctcaatttctggtatatctcctcttacggtttggatgtctgtcccctccaaatctcatgttgaaatgtattccccagtgctgaaggtggggcctggcaggaggtatctgggtcatggggcagatccctcatgaatagctttgcaccattcccttggtgatgagtgagttctcgctctggtagttcacacaagatctggttgtttaagagtgtatgttacctccccactctctctggcttccgctcgagatatgacgtgcctgctgccccttcaccttccgccgtgatgagaagtttcctgaggctggctgggcgcggtggctcatgcctgtaatcccagcactttgggaggacgaggtgggtggatcacctaaggtcaggagttcaagaccagcctggcctgaggcctcaggaaactgagctcagaagctgagcagatgctgacaacatacttcctctacagcttgcagaaccatgagccagtttaaacctcttttctttttctttttcttttttccttttttttttttttgagacaaagtctcactctgccacccaaggctggagtgcagtggcgcaatcttggctcactgcagcctccacctccctcctgcctcagcttcccaagtagctgggactacaggcacccaccaccatgcccggctaatttttgtatatttttagtagagttggggtttcaccatgttggccaggctggtctcaactcctgacctcaaccacctgcctcagcctccaaaagtgctgggattacaggcatgagctgctgtgcccagtcaaacatcttttctttataaattacccagcctcaggtattcctttatagcgaagcaaaaaatggactaacccacctcccttccaaggatcttgctatctatcccttcttgccctcagctactcactcccacagtcatataccagatctcatcattagacaattgtaatccctacacaatttagttccatgtatcctctctctaaccactattcctcatctttccaggtcattctctctagacccgaattccaacaacccttcaaccacactggtaccactaatctacagattacatcttctttctactataccttgatgtgttcctgaatatctcccgaatcctcttcatccagtttaatttcaaggtccatcattataatcattttcttacatactccctcacctctcctgccccattaatactgtcctagtaaaatctagctctctacccactccatgcctgcccctatgctgctgtaagtagccagagaaacacatataataaatgcattcacacaaaccttctaacatatcatataatattgtctgatgtcttcctactagaatgcctctcaggcaggaattttttttttctaaactaatttattcactgaaatatcccagtgcctagaatagtgcatgttaaatagtagaatctcactcaacatttgttgaatgactgaataggagttccaaaatagagaacacagcatatgggaggggaaaaaaatcagtaacaaaatcattcaagaaattttcccagaactaaaggatgggagctcctagaattgacaggggcccagcatcacacatgaaaacttcaaatcacatgactatcttcaaattacaccagaatgctagagagaaagagaataggatacaagcttccacaaagaggagaaaaatagatcacaaatcagaaaagatcagaactcaaaatgttcatgaaaactcaacagccatgctcgaagtcacagcacaatgaagaaatgtccttttaaaaaatcttaaggagaaccatggcaactcaggattctctacccagccaaactattttaatcaagtgagagggtagaatgaagacatcttcaggcctgcaaggtcatgaaaaattaacaatccacaaaccctcttctcaggaagctactggaagatgtaccaaaataagagaataaataaggagaaaggcatgagacaccggaaaaagggaacccaacctaaatcacatgcaaagaaaatctccagatgccaatgaagggtgaccacatctatgtaccgagagggcaagtcactagtttagaaagggacaagtcagatgcaccaagattcaacaaactggaactgaaataacaccagatgcatctgaaaatactgagtgggattaatctactcttggagattctgtggctaaattgatgatagaaaaccaagcaaatacaaagaaaaaccataacattaactttagaggaaactaatagttctgagggagatgatcctagaatgcaacctggctccactgtgtgagtagtgtttagagggtcctaatgacacaagcaggctggaattacactgttcctttattaggaggatataagagtggaaaataagtatgtgtgtggcagggacaaaggatgaaaaacagctaaatcctcatcttccataaaaggatgtcaatatagaatgcctgaagcagaacaatcaagatgcaacataagtatkttatacagagatacaaggacagtacacaagaatcagctaaaagtatttaacagaaatggtcaggggcgaggtcagaggagccagggcaggggactgctgtgttcataacaagctttgtaaaaaactatatgactccttaaactatgtgtccttaaaaaaatgttttaagaacagaaaataacaaagaggtaaaatatgaattatctatccttcatatctcacttgagtactgatgtttgaaagaagcatatttttttaatgaacatttcaattagccagtattttaccatgtaactttgttaaaattatattacactccaataagaatgcctttacctgtgacagtagttcttccttctctccagcaagttttcgtagccttacatctaaaacaaatgaaaaagatcataaactaaatatgtgatgatatagtacataaacaattaaaaatttttcaaactcataaacagctaatattatctgataaattacattacttacagctctgaatatctaaagaaataaaggtgttaatagcattacagaaaagttcttaactatctaaaaagtatttccacacaactgatatttatcagggcaccaaatccaacatttgttccccacagcagtgatttgccacttaaagacaaacagaagtacaaaggaggtcatttccttgtttcaagctttcactagtagacagacaactcaaatgtcaagtgtgttcctaaaggctgagcccttagcgggagagatccaaatatgtgaaagaagatggggtaagagcaggactgggcaaaggaagctagagaagagaaaagagaggagcataatgctggaagaagcaaagtccccaaaagctagtagggagggaaggggacccactccaagatgtgggcagccaggccaggtgtggtggctcacgcctgtaatcccagcactttgggaggcctaggtgggtggatcacttgaggtcaggagttcaagaccagcctggccaaaatggtgaaaccacgtctctactaaacaaatacaaaaattaaccaagcgtggtggcaggcgcctgtaatcccagctactcgggaagccgtctgaacctgggagatagaggttgtaygttgcagtgaactgagatcgcgccactacaatcctgcctgggcgaccgagtgagacttcgtctcaaaaaaaaaaaaaaaaaagatgtgggcatccatgggtrgatctgcggcttggtggcagcaccattagggctcactcctagcctgtggaggtttgactcttcccaagcctgcattaaaataggccccttcagctgaggagataccatggttcacttaaaaaagcagctgatacctcgccaaccactaccctctgtaaacagggtcatagccaaataaagattttggtttcttctgcaccttccaagcagatctgcctgcttggacctgcagacgagggaaaaaacagcagggaaacactctgggctgcctatagccagactctcgttccattctccagatctctcttgctcacccagcatcctgttttattcaaagtgccctacaatcacatttctggaatgcacattagagaatgtgcttactaactttcaaaatgtttttcagtttgcttcacacttgtatctctcactcctctaagaagcttacacatatatgaaaacaagatgaaaaacaaaaaaattgtttttttttaaaataaaagtgagctaatgatacagtatctatctgtgccatttttcttcctctagagtagatttctttgtggggtcaatggatgggtgactttgatttctcagacagaggtgtcagcaactttgtggtttcctggagagaggtgtcagattctcaaagggttaaatttaagaggtttagactttaagagtctgggaagccctgctctggaagtcatacttctctgatatctttttggtcatctgtttcttggcttaagaaatgtggtggaaaagaggtacagaaccctggggtaagcagtggaacataaaaccagatgttccaaggatgagaaacttataacacacttgagaagtctcctgctagcctactgctcccctagcacaggtatactagactatctctttgcagaacagtttgtagttaagtaaaaaccgatgtgtataggcccatagtacttccatccacaggccttacagttacacttattgccttacagtgacccagatgctgatttcccaaggtcaaggatgtctgaagacaatgtgccaatgtgcccagattcttctagttaaggatctacttgagtctcagcccttatgctgtttttgttttccaagctgggatatgaaaaagcagaaaacccaatagggtaacattaatccaagtcaacatagcaaccagtatcttacctaatggcccttctcctgctgactccaagacctgagcagcttcctgagacacaacagtgatggctccagccactggttcatgactgacatcaccattgggagtgccatcggggattataactaagccatgtttctgcaggggggaaaaacccaccatcacaaaaggcccrtatggaagctgtaagctctgtgaggtcactctgcaacaatacatgtttgctacaggtaaaacctggttagaatcagttacatgaaatatagctctgtgtaagaaatagcttcaacctaccaaatctggattagagaataaacactgtagtttgtatttaggctaggaaagatggcaggatgaaaggaaggaagatagagagtaaaacagtgagggacctgaattccaggctaatgctaacatacctctcccgtcttcactgtctcctgcaggtcagccagctcctctctgagcatatctcgctcattcctaaggcaggcaatgtattctttctgtttctctagggcctggttttaggtaaggtagcaagggaaacaatggcacagaaaaagagcaggtgaaaggtagcagagaagtacctaattcaaataagcaaagataaaggcataaaaagcaagaaagcagtcaaaagattggaaacaaacagtcagatatgggaggaaatacaragttacatggatatacatctccagaagagacttctcatagaaactggttctcatgcatcaatttggcaaaacatgtttaatcacatcaagcagggaaataaatcttttccagtcaatgaaaaaaataaaacaggaaaaggaagataaagagagaagccagagtaaaataaagctttccttactgactgcctaagtgcatttttatttggtgaacaaaaaaaaccccacatttcatgtttaactaaactagtttattcaagaatacagttgattttttaaaaaatagttctggaataaaaataactattatacataggtattttaatttaatattggctgtagatttttctccaagtagtgtggcaaaatactcaaataccacttaattcaaaatagttaacctccaaaaggattcaaagatcaacttctgacaacttaattaaatataactgagactcatttggctttctgttatactcccaaaatgtgaaaaacaaaaataaacactgacaaaataaatacagccaagctatgaagagttacagaatatggatttcagaatcaggcttttgggttctggcacatacttgtcctatgcctcagtttcctcactggaaaaacagaagggataatagcacccatcccaagggcagaggcataaatcaaggtaaagcattgcctgtaatgcctagatagcagggacagttcaggagaatcaggttggtgatttcatttgtaaattccctgccatttccttaatctcacaactgtcagctgaggacaatgcagaagcaggaacatactttggtcatcaatgaaaaataaaatctactatgaaaaaataaaatctattgtaaaagaaaataacccagaattaaaaatacacccaaggtaagtagtctatgcaggaatctgattactggcctatttgaaaaagcctttccccaaatatttttgttcatatatttaatgtcttctgttagcattcccattaatccaagaagttaaactatatcaggtaactttcctctcagttcactgggtttggaagtgggacagcgaattgctgagaaattgatagctgaatagctgggcaattcaaaaaatcattataatcctgttttgcaaccaaatagggagcaagtaaataagggatgatagcaactacgatttgtatagcacaaattatatggcaggcactattttatataatttctctcttatacattattttacatttgaaacctctacatatcctgtgaggtacttgtattatccccatttaacagatcagaaaattgaggctcacagtggttatattttttcgcccaaagtcacagtaagtggcaaaaccagaaaatgaatctggttgtttttgtttccaaagcccttaaatagttttttaaatatcacagctctatgaaggccacattatattcccttattgttagcccagatgatgctaggaaaggagtccatacggcaaatcctactctttacttatccaaactgcaatgtcaatatctgacttcttttcaacaatttacattcacactatatgatgtgtctcaagtctgcctgtgaattaacaatgtgcatttctagcaccatctagctagtgttaacactccattatgttaataattaataataactgaaacattgggaaaacaaagcacaacaatactttcccatgtgttgagtgtcactttatggattargtatttttggttactggtatctgcatgcatagttatgtcatgtatcaccacatataagtgggtaaatgatcactgtcacaacatgctctacataaacaacaacactgaataaaaaagacctctgaggaacaggccaatttgaaactaggaattctagcaaatgatatacatgacatttgctcttcttccacatcgtattgcactgggttttatttttaccttcggactttttaatttcctcttcccataattacagatgagaaaataaaatacatcctgtaaattcacccacttcaccacaaagtttgaagactactaaaataccttataattggatcaaatgtattcaagctggatctaaaaccctctgtattacctgaccatataaccactacccttgtgtttgtgtgcaacaatagctcctacagtagattttttttagggtaaaaagtacacgcttgtagagttcaaaataactctttatccctgacctaacctcaaatcctaccacccggaagccaaaaggatgtgtataatgggctgaacttttgggcaaggggttaattctccacataattgtactggggaacaaatatctttggtcagaatggaagtgagtttatgctgggctatagagatacgcaagttcttcatacgcacctattctatacatgggctcctggtgtttagaaccgcagtggagctagaggcaagaccactaatgaactgaactttaacctgggaataatggacatatttcttcattaagttactaaatgtaaatcttaaaaatgaagctagagacaagtagttactgaccatactgaaaatgtgtcttaaaagtcaagggaggaccactgcccttgtattataatgataacaaatgttggcaaggacatggagaaattggaacccttgttcactagtggtgggaatgtaaaatggtacatctgctacagaacacagtataactgttactcaaaaaaattaaacacagaattaccatatgatccagcaattccacttctgggtacataccgaaaacaactgaaggcagagtcttgaagagttatttgaatacccatgttcacagcagcattattcacaatggccaaaaggtagatgtgttgatatatcaacagaagaatgtggtatatacatacaatggaatatgattcagccttaaaagggatggacattctgacatatgctgcaaaatgaaccttgagggcataatgccaagtgaaataaatcagatactgtatgattccacttacatgaagtacctagagcagtcaaattcacagagacagaaggtggaatggtagttgccattccaccaggggtttgggagaagggactgaatggggagttgtttaatgggtacagatttcagctggggaagactaaaaagttctatggtggtgacagtagcacaacaacatgaatgtactcaatgccactgaactgtacacttaaaaatagttaaaatggtaaattttatgttatttgtactttagcacaatttttcaaattaaaaaagagtcaactcgtgattcaataacttggaagaatcttgagggacttatacagagtgaaaagggataattccaaaaggttaacatatactatataattccatttttataacattcttaaaagagcaaaactacacaaatgaagaaaagattagtggttcttagggcttgggaggggaaggggagattaaggctatgactataaaaaggcaagaggaggagaaatcccttatattgatggaaatgttctgtatcttcaccatatcaagggcaatatcctggttgtgatattgtactatagttttgtaagatgttacatttggggaagattgagcaaagaatatataggatctctgttaaatttcctctttttttttttttttttgaaacagggttttggtctgttgcccaggctggactgcagtgacatgatctcagctcactgcaaccttggcctcccggattcaagtgattctcatgcctcagcctcctaagtagctggggcaggtgcatgctctgcaaatttttaaaaatcctttgcagagacaagggtgggtctcactaatgtggccaaacctggcttcagctcctgacctcaagcaatcctctggcctcaaacggaacttcgtgctaggggttccggctgggccctccaactcttaagaggggagggaacttcccacggggtataatggaaaggcctcttaagaggaaannnnnnnnnnnnnnnnnnnncaattggttgaacctgggagacaggttgcagtgagccgagatcacgctactgaacttcagcctgggtgacagagtgagatcctgtctcaaaaaaaaaaaaaaaaatcatagagacaaaaggcaaatggagggttgcaaatggcggagggaaaaggaaatggaaggaacagttaagggggttaatcgaaaagggatggaaaggctttaaagctaggtaaaggtaggggttgcctaacacggtaaatgtattgaatgccactgaatggttaatttaaaaagggttaggcccggttgcgggggttaacgcctgtagtaccaccactttggaaggccgaggtgggtggatcacttgaggtcaggagttcgagaccagcctggccaacatggtgaaaccccatctctactaaaaatacaaaaattagccggacgtggtggtgcacacctgtagtcccagctactcaggaggctgaggcaggagaattgcttgaacccaggaggttgcagtgagctgagatcgtgccactatactccagccttggggagagagagagattccatctcaaaaaaagaatactaaaataaaatattttccaattaaaagccaaataatttatattttaaactgagacatctgaggggtttctatggctggtccaagattatcagtttaaaatattaaggcactcatacaagctagaaatcctgggcctacagatctgtgttaaagaaaattatgtgaagtcctaaaagaagcccattctagacagtgaccagattttaactaaaaattttaaattacctactttgccccacgttttttcacctcttatatttcccaagcaaaaatttaaatcaaatcaatggttcaacaatcaaatttcacttttcaatttcaaatttcaattttaaaatcatagtttcaaaacacctaacagaattattgatttattccccagaaggcttttctaggtttagatggaatttttaatactcagcaatttgaaagtcagagaattatctataaagtagcttttgttctttaaatttttggtctacaaacttttttaaagaaagggtatcactctattgcttaggctggagtgccatggcacgatcatagctcactgcagcctccatcgtgtgggctccagtgatcctcccacctcagcctcctaagtagctggggcaggtgcatgctctgcaaattttaaaattcttttgcagagacagggtgggtctcactatgttgcccaagctggtctcaagctcctgacctcaagcaatcctctggcctcaagcgatcctccgtgctaggattccaggcatgagcctacaaactcttaagaggtaatgtaatcttcccatgtgtatattaatgagagaggtccttgaagtgatgaaaaagactggatcctgctgactactggttgggcttcagaatgttcctaacaacattctgagggtataatccacaggatttcatatccaggcctgtctctcaagagatgttctcagggatctttaacaactattccctactccccctaaccttaagcagaacaagacttttcttacatgttctatttcctctgcccttccctgacaaggtaagcctctggcaactatggctaagtggttcccctactgtagaacagagagctcagccaggtgatgggactgccaatcaaaggccacatgagatgaactggagggaattttttccagcttttggtgtacatggaatctacctgcaaggcttagcaaaacagcaatgaagacatttcgtttatctgggcccttacttgggggagttctgtggttataattacagacagccaccctagaaagtcttacattcctatccatttctgtaattgaattgattttaatctcttcctattttatacaccaaggatttataggatgctaataactttctccccaccactaccctcttcttatccaaattcctgtaacgtaaggatatcaagttaaccacagagtttgaattgaatgcctgtggctgtttctggataagaatctgaagggaggccaggcatggtggctcacgcctataatcctagcactttgggaggccaaggtgggtggattacctgaggtcaggagttggagaccagcctggctaacatggtgaaaccccgtctctaataaaaagacaaaaaattagctgggcatggttgtgtgtgcctgtaatcccagctactcgggaggctgaggcaggagaatcacttgaacccaggaggcagaggttgtagtgagccgagatcatgccactgcactccagcctgggcaacagagtgagactccgtctcaaaaaaaaaaaaaaaaaaaaaaaaagaatcctaagggaatacagagaaacttcctttaaaagttcctacttatacattttacaagcctagtgtttgctgaaaagaagagttcttccaggcacaacgtcaggttttcctatggaagtctctgtctcctactgactcatttttcatactgtgtaaatgctcaagaagaatcaaaaggacaggttttttcaatctctaggttaaattctactgtagtcctcatcaatgagcttctaaccaaagcccaatttcatttcataccccaatttttttatctttccaaagaagtgtctcctggaggtcaaacacctcttttgtcatggtgtctattttctgctgcatgcgctgcttctcctgcagaggaagaggggaagagaagtaataaaagagcagaaagaaaagggagaggaggtttgagggaggaaacaaaaataaagccgataaagaaacttaaccaaaagggaaagtctgtgatgaacaggaaaagcaaaattggtctgccaaaagaaaagatgacattcacagtcttggccacaagattcttattggcttgcccctacaaaagtaagcaaaggaaccaggaataattgttccaaccacagctacgtggcagcaagccagctagaatttctgtgtacatacagctccatatgtatattctttctttgataactgcctttttaccaaacaagaacttacattcctagagagggaaatttaggtttgcttatgaacaaatgatctttcatcttagagaacaagcagttttgaattttattttttaagcagaactgatcattttgaatttctgttagcaaaatctatgacagcaagaacaccatgaattttgtattattttaaaattatattattttgaaacatttaaatttagcatttaacaatccttaaatgacctttctaattaggcaatggtgcttaacaggttttcttcttatgcattattggtaaattattatgtcctcctttccctactcatacattaggtactttaccatggaattttcaattccaaagaccaaaaaacattatttgtaatatttaaagtttttcagcataaccatagatactaacatctaaaagatgttcattctagatgtaaaaaacatctaaaactatagttctcaaagtttgtatacctagcaccctaagcttttaaagaagccacagtgatgaactatagaaatcaagcattatattcttcttaaatgcaattacaattaattactagaacactttaccagtcctaacttaagctattgaatttgagaagcagcccccaaagcaggtttattattttatgtggttggcattttggcacaaaaagataaaagaacaaaaagggaaagaatttcacattattttaaaataccagcaggatacagattctggaaaatatgcttcctaccttatatggagaaaaaccaagaaaattaacttcacatgtaatctgatagatccaaaaggttatctgtatctgcacttgaaatccacaaattctgagtatgttcaattattcttaatgatgacaaaaattaacacgtcttcaaatttaaagtcatttctttttctctattaaatggtttttaaaaatcatttgtagagagacatattaagaggyaggtccgaggggaaagagagaaagagggagagaaaaagaaaggctaaggtctgagtagccaggaatgtggacaagtgtggttgtgagatctctctcctgggatcattaacaatctatgcttcctgacatctctggcgtgtcaacactaacttaacattagatgcctttgatagccacacctagatagtgggcaggatcccccttcaaacttatttccatatttatctaaaaacatcgtctcaggagggaaaaccacatttaaagaaaaaagatgcatgcaatgtagcaggcctgcaaggatgactaatgttttcaaagagttcttggtagactatgcttcattccattcctaagatgttgccagcaatgtggcagagtcccttcgcttgcagaaacctgaaccttcagactaaccattctttacctttttgtacagaacgtatcttgatgtttcttcttttttcatttagccacctgagaaatgtatttacctgagtgaaaatcaaacttattccccaagaatcatgtcccaaaagatggcattcactaattccaaagaataatgttattctataatttttccttttgcccatttcctaagatatctgtaggaaacagtgtgcttaggaataaaagacacaaaaatttctgctaccaaagtggggtaatgtttataggatttatagtattaatttttaagcataatctggtttatgtttgaaaatttktagtgtacagtcaaatataaagagacaaactctgatgcatcttaactctccttccctcccaacacatcctcatcccattcaactcattttttttcaaaattaagtattcccacagttcatgtacatacctcaataagctcatctctttgccgcaggccttctttaagttcttccatcttatgctgcagcacactacacatatgtttctgcctttctaactcctgttattaaacaaataatatcatttacacaggtcatggcacacaagaaatttgaacatacacaatacaacacagaggttaagtatgacctccagaaacatgcccaaactcctgattcatagtaacttagaaaaattgtgtattctatagaaaagttaagaaaattttaaaattccatcttgtataattatcaggaaaacstgaactaatcaatggcaaaattattaaaaacaaaagataatttagtaaagtaacaggttataaaatgaacatatacaattcaatgacattcatatacaaataaaattcaaagaaggaataataaatgcaatatcaaaataaaatcaatattaaataaaaaacatacatgtaaacttacaaaatatatcaaaaacctatatgaggaaaattatataaagcattcccaaaagacagagaaataggattgaataaatggaaaggcataccgtcttcttggattaaaagtctcacaacattataaaaatgccagttctccctaaattaatctatacatttaatgtagtacaaataaaaataccatcaggtttttcttttatcatcatcagagcaagttgatttgaaagaaaaacacaagaaaaagtagccagaaaaatacatactgaaaaagaagaaagccggccttattaggtattaaaacatattataaagcttctataattaaaacaatgttgttatggcacatgaatatagaccaagggagcagaatagagaattcaggaaaaacccacttaaatatacaaatatatttaaaaacaataaaaataagagcatctcaaatcaatgagaaggaaagacttttaaattagtaatgttgggataactggatatccatttggaaaaagataaaattggaactatacctcataccacacaccaggacaaattccaaatcaatcagagatttacataaggaaagaaagccagggagtgaatgggggaagagggaagggaagggagaacaaactgtacaggaataaaagtaaccaaggagtggggcaatctttactgaaaaaatgactcaaaaatccacaagcaatgaggtaatggtacaataaattagactacataaaaataaaaattttgggctgggcrtggtagctcatgcctgtaatcccagcactctgggaggctgaagcaggcagatcccttgagccgaagaattcaagaccctgcctgggcaacatggcaaaaccccatctctataaaaaaaattcaaaaattagccagggttggtggcgtgtgcctgtagtcccaggtactctggaggctgaggtgggaggaccacctgagcctggggaggtcaaggctatagtgagccatgatggtgccattgcactccagcctgacgacggagtgagactctgtctccaaaaaataaatacataaataaataaaacttttgaatggcagagaatctctaaaactaggccaggcacggtggctcacgcctgtaatcccagcactttgggaggccgaggtgggcggatcacctgaggtcgggagttcgagaccagcctgaccaacatagagaaaccctgtctctactaaaaatacaaaattagtcaggcgtggtggtgcatgcctgtaatcccagctactcgggaggctgaggcaggagaattgcttgaacctgggaggcggagattgtggtgagccgagattgcgccattgcactccagcctgggcaacaggagcgaaactctgtcttaaaaaacaaacaaacaaaaactagaaagaaagaaaacactaactgcatagaataataagctacggaaacggacagtttacagaaaaagaaatagaaatagctctgaatatgaaaagatactcatactaagagaaacggaaacaaacaaaatactagcaaaagttcaaaaacttgacaacatattccagaacagaactatggggaaagaaataggccctcatacattttggtgagaatgcaaatggtataatgcttacaaaggagactacagcagtatctgcaaaactacatacctttcgacccagcaatctcactcttcatcatagatacattggcaaaaatacaaaaagacctatgcagtatgttatttctacaggactatttttaacagcaaaacatgacaaacttgaatgtctattaatatagggaactggtagaataaagtgtggtacatccatactgtggaataattatgcagtggtgaaaaagaatgagcaagatatctctatacaacattcataaggtgataaaatctacatgcacgacagcatttatattaacaatatgctactattttctaagaagagtaagaaatacatatatttgtacatatattttgaatgattatatatacatatatatctttttagattaaaaatggctacctaatttatcttcttggatttaaaacatggaaagataaaccattaaaatttaaaattccctaaaggaaggagaaaatagagacagagacagggatagaagattaacttcttcagatatattctttgttaacgtgactccagatctatgtaactattctagatagttacaaaattgtaaaacaaaattaaatttaaaaagcaattcctagtggaaacaattcaagtggccattgatagatgaatgcataagcaaaatgtggtatatatacagtggaatattattcagctttaaaaaagaaactcttgtcacacgctacaacatggatgagccttaggacattatgctaaatgaagtaaaccagtcaagaaaagatatattattatatgattctacttacttatgagtttggtacacagagtagccaaactcacagagacagaaagtaggatggtagttgccaagggctggtggtagggagaaatgggtaattgtttaatgggtacagagttctagttttgaaagataaaaaatttctggagatctgatgtacactaatgtgaatatgcttcacactactgaactctacactttaaaatggttaagataataaatttatcatgttttttaatgataattaaattttttaaaataaaaataattttaaaagtaattccaaatattgaaaataaaatgcagtgaacctaactatacatccagttagaagcgcagaaagaaactatttcaagtaacttctaaaaacaatagtttggccacacacagactagtggcaaaaataacagccaagcaaaacmaacaaaataaaaatcttttaactattttcagtaattaaattgttggtgttaatgttggtattgctattctaggcaacttcggataaagcaaagagaacagaacgtaacataattactatcatccctagaaactttgagaactaggaattgtagtgtaggggaaacaaacaaagatacagatgtaagacagaagaggttaaataaccctagagtcctgcatgtgaactggaactatcagcaagaactcataatgtattttgttgttaaaaacaaaaaaaaacttcacacacatatttcccaaatttatccactgaaaagacccataaacactgacctacttggtggcaatgagcatctctagcactcatactaaaacagaactagggctccttggacaaatggctgattccaggtctggggcagaaaatgtacaagatgagactgggacatcttctgccagaaagcaaagaagctatcaaaaacaattagactcaccagaagtacttgagaatcaacctcaagaggttcacattagccaaagatgggacaattttatcatcaaaaagaataaaagctgcaatgcaactgaagatatcaaatgcttgaatttatgacttcatattgatattttaagagaaaagtaattggtcacaaccaattcctttttttgaaaactcataaagggagaaaatatttgcgaataatatatctgataaaattcttatatctagaatatataaaccttacaagtcaataataataaggcaaaatccaattttaaaatggacaaaggatctgaatagacattttgccaaggaagatatgcaaatagccaataagcccatgaaaatatgttcaaaatcattagtcaccagggagatgcacatcaaaaccacacctattaggatggctagaataaaaaggacagataacaagtgttggtgaggatgtggggaaatcaaaacctgcatacattgctggtgtgagaatataaaatggtgcagccacttcggaaaacagtctggcactgttcaaatggttaaacacagatttatcgtatgaatcagcaattccactcccaagtatatacttaagaaaaaggaaagcatatatccagaccatgagcagtggctcatgcctgtaattccaacactttgggaggccaaggcaggaagattgcttgaggccaggagttaccagcctgggcaacatagcaaggccccatctcttagaataaaaaagaaaaagaaaacttacgtccaaaaaacaacctgtatacaaatgtttatggaagcattattcttaacaggaaaaagtataaacaacccaaatgtcaatcaatgcacaaatgggtaaacaaaatgtagcatacccaaaaaaatggaatattaataggctataaaaaggaattaagtattgatacatggtataacatggatgaaccttgaaaacatcacrctaagcgaaagaagccagtcacaaaagaccatgtattatatgactcctttcatatgagtctagaatagggaactctatagatagaaagtagatcagtggttacttaagactgaggggtttgggggaaaggaagatgatactaaagggtatatggtttctttctgaggtaatgaaaacatactaaaagtaactgtgatgaaggttacacatatatgtgaatatactaaaaaccactgaattgtacactttaaatggatgatttgtatgttatttgaattatatctcaataaagctgcttaaaaataacattaaataggccrggcgcagtggctcacacctgtaatcccagcactttgggaggccgaggtgggtggatcacctgaggtcagttcgggaccagcctgaccaacaaagtgaaaccccatctctactaaaaatacaaaattagccaggcgtggtggtccatgcctgtaatcccagctactcagaaggctgaggcaggagaatcacttgaacccgggaggcagaggttgcagtgagccgagattgcrccattgcactccaccctgggcaacaagagcaaaactcgtctaaaaaaataaaataaataaaatttaaaaaaataaataaaataacataaaataaaataaattggtaatgataaaatcagaacatcccattttgcagcccctagtcaattaaaggatctaagcacacacatacagcctaacagtcagccacacatctgggcctcctgaaggaagacaactgcatcatctatgaagcagactttcaaaaaaaactgaagttatatttgattaagcctctgtgcctaactacctatttacagagaatacagaggaaagggaaacatggtaaagatactatggggacgaaaacggaaaaacttgtaagactgggaaatattaagcaacccagtttcttcaacatatatattataaggagaaaaaacatgaaagaggacctatacatgaaaagagacttaaaagatttatcaactcattctaaggtgtgmaacttacctggatcccgatttttttaagtgtaaaaaagaaaaatcatttatgacattttgaaactactgaaattttaacattgattagatatataatatgaattattgttaattttacaggtgtgaaatggtcttttgattatgctttaaaagagaaacaatgggctgggcaaagtggctcatgcctgtaatcccaacactttgggaggtcaaagaaggaggattgggcaatacagcaaggccccatctccacaaaaagatttttaaaaaacagccaggcatggtagcatgtgcctacagttctagctactccagattacttaagcgtaggagatcaaagttacagtgggctatgatcgtgccactgcactccagcctggggagcagagcaagaccctgtctgtaaaaacaataaaattaaattaaattaaaatataaaacaaaatagttattgtaattccaggaggaggcaccaaagacattttgaaaatttttattaatactgtataattattatggaatggtccttctctactctcactacctgcttctgtaatgaaatacaccagaatgcctgacctctttgtgtatctctgaatataaacattctactttataaagcaatagttgtttagaacaagagagctcggagtaaaggtatgttagagagagatactgtcacaaagtgttctgcatcacagtacgtgaagcaaatttccagggtattaaaaaaaacaatacattttaggtttgaaaagtacaagacctgccacggtggctcacaactgtaatctcagcactgtgggaagctgaggtgggtggattgcttgagcccaggagttcgagaccagcctgggcaacatggtgaaaccgtttctataaaaaaaaatttgtctttaattagccaggcgtggtggtacgtgcctgtagtcccagctactcaggaggctgaggtgggaggatcacttgagcctggagacagaggctgcagtgagctatacttgcgctactccactccagcctgggctacagagtgagaccttgtctccaaaagaaaaaaaaaaaaaaaaaaaggmcaagattaagaaaacaactctatgcatactaaaataactctattaccttctaaaatgatggagggaaaaactaagttggttaaaatagctaattataagggttttctttatttttaaaaatgctgaaggatatttgagacgatggaaagataattcattttagtaatgacccttaaatacttagcatgagatttttactctagtctgctagaagcaaagagccaaagacagataagaaaaaatgtgtgggacagcaaaaaaaggagtccagaggctctaggaaaagcatgatggctcagaatctccaaaaatggcctatgggatatataagaagaatcaaagatatacatatctagcatatataatgctcttcaatgggccactgtcagtccaatatgaaaacaactagaagcctctttttcaccatctaaataccaatcctaaataaacaattttagagcagtttaagattcacagtaaaattatgtttaaagtacagagagttttcatatactccctgtccccacacacgcacagtctaccctattataaacaacccacaatagagtggtacatttcgttctatcactgaaccaacattgacagatcactatcacccaaagtccagagtttacattagggttcactcttggtggtgtacattctatggttttggacaaatgtatccatacatgtatccataataacatgtatccaccattataatatgatacagaatagtatcactgccctaaaaatcctctgtgctctggtctattcatccctctcctccaaacgcctggcaaacactttctaacactttttgaatgtgaccaaaacaggctggaatgggcatttctagtcctcaaggaaagaaattcctataaagactacagtaataatgttggtctcctacaggttatataaacagcttctctccctttattatgtgcaaattcagattgctgtttctaacaatttatcaatatgcacttcctaaattattttctggattttttatattggcaatgtagtagcaatccatttctggcaataatacccatttgacctctgcttgaactgacatcaacccttcaaaaagtctaaaacatatgcttttaaaagaatccaatttgttttctgcagttgtcagagagcaaatctgggccttggacaatgcgttatattctccatctgtacattttaacattacarcttataaacctctaaagaaaacatctttcaatttctgacccacatctccaaattgctgattttaaataactgattaaagacttctatccaattatttagaaaatggattctcttgaaccgttcagaagttcatagaaaaaaaatgaatcatcctattgagagtctttggagctttgcgggagttccagtcacttgtaaccagaagaaataagtaacactgtaattacagtcccaattaagagatagaaaatgamgctaaaacttgagttgtattctattttcagaaacttaacagaagacataagcttttcctcaagaaaatatttttttaaataaaaaaagagtcatccagggcctgatatctcatggtgttctgtcaatttccttgggccattcagttttgactgaaacatcattcctaaataagtatgctgcaatcttccatcactttgtaagtggcaggcttttattttctgccccaagagaaaatacaagataagcattacctttgatttttcttcattttctctataaaattctgccatctgttcytcctgctcttcaataacatccttgagtgtgtctacttggtagatcaaattgttcttctcattgtctaactgtgcattggaaaccatggctttcttgtatttttcttccacttcagacaaagattcytaaatgagagttaagtcatcagtctgatatctaaaatgttaattgaatacatgcaatataacaggaaattatagcactgccacaaacacataaagatgcattttcataaaatacaagcggtttggggaactccttgtttagtaacatgcatgtgaaacaggaagacaataataagccgataatgcctttataagaacaatatgtgctctctgttccccaagaaaacaaaattaagcagcaacatagcctctgaaagatgaaaagaattgcaacaacatatatctgtaagggtcataaaatgaagaatcatcaatattttcagaaattttactcttataattttaataacagactggtgttcagaacrcagtgataccacagaatacagcctctctttacacaggtgaacttcatacgcatttgaattttgccactttctagacagttgtttttagtactttcctgttctgcataaaaatgccaacataaaggtaaatattttttctagcaattatccaaatttcaatcatgtttaaataagcaacacaaaaatgaatattaaaaaaagagcttggccaggcacagtggctcatctctgtaatcccagcactttgggaggccaagggggtagactgcttgagcccaggagctcaagacaagcctgggcaacatgacaaaaacctgtctctgtaaaaaaaaaagtacaaaaattagccagacacagtggcgcacacctgtagtcccagctacttgggatgctaggtgggaggaccgattgagcccaggaggtcaaggctacagtaagcagagattgtgccaccgcactccagcctgggtgacagagcgagaccctatctctatcaataaaacaaaacaaaataagagagtctgatctagtgtcacagttttgaagtaaaaaaaaaaggtaccacaaaatgcctggaacgttacatatctcaaaattttctgcctaaaatagcttacatgtttttttgtgtgtaactatatctactttggtaattactactgcctaatgacttttttaaagctaaaaaaaatgtttcacacaggaaaagtaatcatttatggaaataaatttaaaaaatactagcacaaatgtttatcaatgaaatggaactaacagcccagaacttacatttacaatcagttaatttggacaaaggggtccatgtaactcaatgggaaaagaataaatggtattgggacaagtggatacccacaaacaaaagaatgaagttggactcccacctcacaccatacacaaaaattaactcagcataagccatagatgtaaatgtaagagctaaaacaataaaacgcttcaaagaaaatatggacaaatcttcatgaagttgggataggcaatggtttttcagatacaccaaaagcactataaaccagccgggtgcggtgcctcatgcctgtaatcctggtactttgggaggctgaggcaggtggatcacttgaggtcaggagttcaagaccagcttgaccaacatggtaaaaccctaaaaccctatctcttgtaccaaaaatacaaaaattagccgggcatggtggtgggtgcctgtaatcccagctactcaggaggctgaggcaggagaattgcttgaacccaggaggcagaggttgcagtgagccaagatcatgccactgtaccccagcctgggtaacagagtgagaccatgtctcaaaaacaaacaaacaaacaaaaagcattataaaccaaaaaaaaagacttcactcaaatataaaactttttttttttttcgagatggagtctcacattattgcccgggctggagtgcaatggcgcgatcttggctcactgcaacctccacctcccgggttcacgcgattctcctgcctcagcctcccgcgtagctggaattacaggcacacatcaccactcccggctaattttttgtattttttagtagagatggggtttcactatgttggccagactggtctcgaactcctgacctcatgatctgcccacctccgcctcccaaagtgctgggattacaggtatgagccactgcgcctggcccaaatgtaaaacctttatgctgcaaatgatatgatcaagaaagtaaaaagacaacccacagaatgggagaaaatatttataaatcttatatctgataagggacttatatgcagaataatatataaacaactcttacaactcaacaataaaggacacacaaatcaatttaaaaatgggcaaggacctggatatttctccaaagaggatatgcaaatggcaaataagcacatgaaaacacgctcaacatcattagtcattaggaaaatgcacatcgaaaccacaataagataccaccacactcactaggatggctataatctataatcaaaaatacagaagacaagtgttagtaaggatgtggagaaactacatttcccatatattgctggtaggaacataaaatggtgcagctactttggaaaacagtttgacaattcctcaaaatgttaaatatagtgttaccacatgagccagcaattctattcctagcaatctaccaaagagaattgaaaagatatgtctacacaaaaacttgcacacaaatgttcacagcagcattattcataatagacagaaaagtataaacaacccaaatgcctatcaactgacaaatggattaacaaaatgcagcaaatccatacagtagaatactatctagccattaaaaaaagactgacagataacatgacatgggtgaatattgaatatattatgctaaatgaaagccaatcacaaaagaccacatattgtatgattccatttgtataaaatctccagaataggcgaatctacagagacagaaagttagtgattggggtttcttttctggctgatgaaaatgttctaaagatgggttgtggtgctagttgcacaactctgtgagtatgctaaaaactactgaattatatattttaaatgggtaaattcttatggaatgtgaattatatctaaataaaaatacatacatacatacacacacttttttttttttttcttggagacagggtctcactctgtcacccaggctagaccactgtggcacaatctcagctaactgcagcttcgacctccccagactcaggtgatcctcccatgtcagcctcccgagtaactgggaccacaggcacgtactaccacacctggctaattttttgtagagacaaggtttcaccatgttgcccgggttgatctcaaactcctgggctcaagtgatccacccaccttggcctccaaaactggattgaaggtatgagtcaccacgcctggccacacacacttttaataatgcttcataaaccagaattaagttgtcagggaagatttaaactacgattagaaacaaatttaaccaaaacaaagaatataagcaaagtcaattatacagtgctctaaatgtatctaaatgtatcttactatactgcagactttaaataattctcatccatctgagaggctaatagcaggaaaaaagtcatcacaactcagtgccatataaaaccacatgaacaccagaatttaagatagctcaagtactagatgcatgcacaaaatatataatacaataaataagacataaatgtatccaatgtaatcttcctttaaacactagaccacaaaagactgttttaaacagaagtgtcaggtattttagtgatcttaatctcactcacatagtgatacccatttggaattggttttacttaaatgcttcttttttttttttttgagacggagtctcactgtgtcacccaacctggagtgcaatggcacaatctcagctcactgcaacctcagcctcccgggttcaagtgattctcctgcctcagcctcctgagaagttgggattataggctcccgccaccatgcctggctagtttttgtatttttagtagaaacagggtttcaccatgttggccaggctggtcttgacctcctgacctcaggtgatccacccacctcagcctccccatagtgctgtgattataggcgtaagccaccgtgcccagccttgaatgcttctaagtcaccgattttcaaagtgtgggttccagatcagcagcaacagcatctcctgggaactgggtaaaaatgcaaatttccaatgccatcccagacccaatgaatagaaaatctgagggtaaagtctagcaatctgtatttattaaaagctccaggtgattatgacacacaccaaagtgctgaagccactgtgttaatgtttaagcattgattacctatgcccatatacttctagaacaagccttcacaaccctatgaccaaaattgtcaaccagattgtgagctatctgaattcagggacatgataccttcattgttttattctcagtcacttcatacatcagtcaatttacagctgatggcaagacttacccctacagtctattaactcttgacagttctttctgggattactgaagttaaagctatttctctccttattcttactgtccttctaagaattaaaggcatgggcaatatttaaaaagaacattggccaggcatggtggctcacacctgtaatcccagcactttgggaggcagaggtgggaggattgcttgagcccaggagttgtagatgagcctgagcaacatggtgagactgcatttaaaaaaaaaaaaaagcgaaggggtcaagcatggtggctaatgtctgtcatcccaatgctttgagaggccaagcgggagaactgcttgagcccaggagttcaagaccatcctgggcagcatagcaagactccgtatctataaaaaattaaaacatcagccaggcatggtggtgcacccctatagtcccagcaggcttaggatcgcttgagtccaggagttcaaggtggcaatgagctacgattgtgtcactacactccagcttgagtgacagagcaagagaccttgtctctaaaaaaaaattttaaataaaaaaataaaattttaattttaaaaaaagtacctaagtaaaacataagattttcattggaggtaaaaataaataatacagataaagcaaaagtcttccttgaccacgcgccctccagaggcacaagtgctattggtttggtagattatctttcaggccatttcctatttgtttacagtataaaatatatacccttgacttcatatatatttttaatacaaattatatactctacattttgttctatagcttgccttttttcaatacatcttggaaagttttcagtcactatagatttactattgttatttattgctataactctgtacttaaatttaataaagtattaattttaatagtttttaaaatgggttaatgggtttagtcctttgacttacaaaatcgttaatctttcatgaaatagatcacctaaattttacaattaatattttactgcattttctgggtaatagtacacatgaatatatatacacatatatacacatatatactagtacagcatgggcaaatgctgtattagtaataataaactttcctgataaaaggatggaggggagagtggttgagagcatcccaaaggcaaacataataacagtaatgtcacaagcaatgasccaacatcctttttcaataggatacatcataccaccatgcttggtcaccaatcagacaatcttttctttatttttatgggtttttttccacttcaagtgtcaaggataaacgtaatctgaagtcaagttcaattatattctggcatgaattaggacaagggatctcatctgttcaaatctcaaatctaatctgttcttttgtattcttcaaagaatgcaataaatggtagatctaacatgaaaggaaaaaacgttttaaataaaatgccagtaagaatgcccctgaatcacatgattgctttcctgatacactgttacacatgtgactttaatatatttatttaatgtaccgatttgtttgatccaagataatttcaaaagtcgtatctctaaaaccttaaaagagagattaaatcctgaagattaaaggagtaagattaaatgagaacatcaactatttcygtaattcttctgatatttactgacaaactcatgctgccctatcagcaacttgcaggcttccctcatgggcacttcccattggacttctcacctttttgggtcctgagtcttactctgtttctcatggaccatatcacttgcatgaagagtttggctgatagtggcgctacttcaaatcatgccagggaagatgacaaaacccttgcccatgaaatctatgctttgtcctttggatatatcctgagtcacccttctaaatgtcttgctttttgcttttttagaggtgtagtgtgtattttactttttttgtttgtttgtttgtttgtttgttttgagacagagtctcgctccgtcacccaggctggagtgaaatggcaccatctcagctcactgcaacctccaccttccaggttcaagcaattctcctgcctcagcctcccaagtagcttggattacaggcgcctgccaccatgcctggtgaattttttgtatttttagtagagacagggtttcaccatgttagccaggctggtctcaaactcctgacctcaggtcatccgcccacctcggcctcccaaagtgctgggattacaggcatgagccactgtgcctgccctgtagtgtgtattttgatttcaaatcaggacatacatgtgttcaaataaacttctggtttcttcataacaggaggcttgaacttcagaatgacatgtgaggaaaagaagagcatgataaccaaatgctatgtacaaccaaactgtctgcctcacacatttatattgaaaaatgtcagtgatcctttctgggaaaagataaagaccatttacatttacctccaaattctttaaggcactagatctgtgtcatcttttttgacctataggttaaaaaaatccaagccaaaagaaaatataggcctcatgccttcatgttccttcctccaggggggatatttataataatggtgtctcagttgctacttcctctcacatttaatactgactgagtttggtaacagaaatatgcaacactttttcatttagcgtggaagaaattttgaggtctaattctcaataaaaatattcttagtatttttttaggtgtttgaccaatttaattttgtatggctaagacaccacggatatgcatgtattttacaaggttttaaaactgtaaaggaggctgggcgaggtggctcatgcctgtaatcccagcactttgagaggccaaggcaggaggatggcttgagcccaggaatttgagaccagcctgggcaacacagtaagatcctgtctgtacaagaaaaataaaaaagaaaaaaaaaaaactgtaaatgatatcttctgcggaatattcaaaaactgtactacacatttaaacataagcagagattgaaagttcaccattcctatgcactgcaggttaagcacatgcttgaaagacaaacactgttagtaaagctatgtgcagttggttaacagaacttgcaaagccaccattgccaacacttctgcatacagagcatgcttgggctgcagaatgggccctgatacctttagttctttaagcccctgcatgtatctcccttctacatcctgtatctggtccttaaggtcatagatatcctgcaggacataggaatgaaccattgcataaaaccatgcacaaacgtatcttaaatcgcaaaggattcagatgaaatgtgactcacttttgtatrttccagactaaaagcagagaaatcaaagtacaaaaacataactcccactcccaaccactgaaaagggcaaataggtcaggggatagtgggactgggggaaggtctagagtaatcaatctaatgttaaatattttcttggcattaaattctgttaataacagtgtagcaaatggggacagggctatatatggaggaaaaagctatataaattataatatttaaaatcatacaacttttaatattttataaatcacttaaaatttttttagcacaatgcttcacctagaactagtaaaatatacagtaaattaataagaggtggcaaattttaatgattcatgcaaaagttttttaaaaatataataaatgaatatgaacaaagttttctttcaatgacttggttactggccacaattaacttgagagaaagggagtaaagggagggaagttaaacattttgaacagaatgtcaaatgagatattctatcctgaggataccatttaaatgatgagaaaagcacttgctccaaatgttactataatccttataagaaaagtgaaacaggtcaaattttaaatggaaaatactgtttccctgtgtctgaccttgttatataaggtctattctgaatgctcgatttatgtccgaaataactgcacagggccctaaatacaattctgcaattacaagcaggatcaattattaaaggctgattatacacatttttrgtattatattttccctgcctccttcattgcctctccagtaggtttgactgtcttttacttatcgattcattcaatacacatttatgaaggacctatttaggaggcagatggtaggatacaaaaataacacttccttcaagaaggtcattctctcaaggaagaaaaaacaagcaacaagtagtatgacaaaagaaagctaagtctaaggctggaaggccttgtcctctcatatccttttgtcccattagaatgcagtagctaaaggcaagagtttatcttattcaactttccaccctggcatttatgtctggtacatagtaagagctggtaagagctcaattaatactgtcaccttcaaaccaatggccatgctggcctaggtgctctccttctctgccgctgttgcaagcctctctatcctcccctaaccccccaacccattttcacaagtaagactccttttccaaccctaccgacaatttatttttttttttgagatggattctcgcactgttgcccaggctggagtgcagaggcacgatctcggctcactgcaacctctgcctcccgggttcaagcaattctcctgcctcagccycccaagtagctgtgattacaggtggctaccaccatgcccagctaattttttgtatttttagtagagacggggtttcactatgttggccaggctggtctcaaactcctgacctcgtgatccacctgccttggcctcccaaagtcctgggattacatgggtgacaaatttttttttaaggctagtcaagtgaagcaatgaaggtggagaaggaacaaataaatctgtaaccgcttgtgatcaattacttgtaaacattactgcactcagactagcccctacctacaatcttagtcaccgcctgtcctctacctcccctccagtgaagaggggacctccagtccaggcaagctcatccatctgagtcctggactctcctctcacccacgcaggtattttgatctgtcagttacccctctctccttcctcaaccttcctcctctctctactggttcaacccaaccaaagaaaataataatcactctcacctttaaaagaaagctaaaaaccttttcttaaatttctctctccctaccaattgcccaaccaattcccagtctctcgtattcactccagagcaagtttctcatattttctccccttgcagttttgacttgctcacctcatcctcactgttgaaccacagggttactgaacttctggcctgcaatgcttcctctgactgtgatcaaagttattttttaagaatgcaaagcagatagtattgctctcctatttaatatcccacagttgtcagggtaaaactgaattcctttcaggctagcatacaagatgctttgtgatttggcccctcactacttttccagccttctctcttacacgctactattcttcacttctcatgccaccctctggcaactttgctatacaggtagctttctgggttgtctgaatgcatctctttgaggaagccttcccccttcaattactttccttggttaatttttatttttccttcaaactttagctcagagtttgtcttttctgaaaagccttttgttacctcttctcctagtccaatttaaatgatgctttcttgaattaccttaacagccccattcttgctactaccattgtataacaccacctggttttattggtttgtatcagtttgtcttccctatgaaaaagggaaatcctgaaggccagaacatattttgcctcttaaatctccaaggccaagtgctcaataaatcttgaatgaacaaatgtatgcaatttctctcactatcccctgcctcacaaacagcaggttcagcaaataaaatatatattttttaaagttctctttttccaagtaaaggggttaataaggatggagacttaatgagtcaaataagcttttcattatctcaggtatttctgttacccaaatattattacacttctattactatgaaaaactgagagataactatattcaagcagctgaataccatcaaggctcaaaagactaataattcccacaatctagttctttgtacactcacatattttccatttaaaacatggccagttgtttctgagagaattacttttacatacattacaaagtgggttttttttggcatttgtaaattagcagaaattccaacaccattaaatttacaggaaagaggacagaaaaaagaactatctaatctccttcctttcaagctctgaaacacttgagtcacacttttgtacagtacttattttttaaaaagaaatcatattccttctttctactaagtcacattaaaggttaaaagttccagtatattaccaagtcaaaaaactgcttttaaaaagaaaaccaaaaacttcagtttacccgcaattcacttaatgaagtgtctggatctattaagctgctggtgtccccacttcctcgtctggatgagtttccacttagaggggttgttgctgaggcagaatttcgagatgaaggctagaaagagaaatatgacccttctaagtctcatttctttaaaaatatgtttgctgtggaaactraaaacagggcagggtggttgggggaagatgtgggtttcagatgaagaagttaccatgtgtaatcaatggtcaatttagattggctttgcaggtatccaggtatacagagaagggcccaagcatactaagcaaaatttcatgacacaaataccttatcaaaatctataattcgtaataaccaaaaagaaaatcgtttttatgagggttattttctaagtttatctttgctatcctgtaaacaatactgaagtgagcacatcagattaacttaaagcagttttagaattttataactgatatgctaatcagcacttcccctttttaatttctgaactgcttatcaatctcttctttctctaatactctgttgagttgataaaggtgaagatactatttgcagcagagagtagcaacactggatatcactatgaatgtagactgttcttcccaaaattcatttaaacgtgagattatgctattgattaataaactgcatgaatctgtgctgtccaatatacttgcgattagccacatgcagctactgagcacttgaaatgtggttagtccaaattgagagttgcatataggatacataccagattttgaaggcttagtgtagaaaaaagaatgaaatatatctcattaataattttatatttattatttttattattttttttgaggtggagtctcgctgttgcccaggctggagtgcagtggcacaatcttggctcactgcaacctctacctcctgggttcaggcaattttaatgcctcagcctcccagactgaggagtagctgggacaacaggcacgcaaaaccatgactggctaatattttttttgcatttttagcagagacagggttttaccgtgttggtcagactggtctcgaactcctgacctcaagtgatccacctgccttggcctcccaaagtgttgggattacaggcatgagctacctagtctggcctagtaattttatattggttatatgttgaaatagtttggatatttggattaaataaaatatatcacctaaattaattttacctgctttttactttttaaatgtggctaccagaaaatttaaacttacatataagttcgcatttgtggctcgcattacatttctactggacagagttaatttatctttcttgggtatagcataaaattaatcttgataaatcatctccctgactttctaataatactttcagaagaaagagactttaacacaaagcaaattctagaaaggagttattttacttcaagaaacaatttatatatataaaaggaaaaaatatctcagagtttgtcaccaccattcctaaagaaacttcattttcagtgtttactggcttcttctcaggatcaatttctagaggaatgaaaatcaaaagagcagccaaaagctaaagaggtgacattcaaggaaataaaatgcagtgcctcttctcttcccagggcctcacatgatttaactccgaaggaattttggagggtcaaggacaggaaatagatgaagggaggaagagcagctacatcagaccaattgttgtaaaataaataatgaacaagttacagatagcaagtttaaytgaccttgagaatttcccttaggaatttacatactcactcttgtataattttcagcatactgtttgtcagatttttcatccaactagaaaagaacaaagataaaaatcagtaaagatgcttagcaagttgactttttttgggaggaaaaaagtgatcttgagttttccaagttcaatgatgtttgaagcctaaaaataaacatattaaaaatgaaattaaaattccagtttaacataagataaaatgtcagcaactttaatttttatcctaagggagacactgagtaagcaatctatgtttactcaaaagtttagaacttttgggtaaattttctgtttaaggtatttaaaacacattaaagaaggctacatataaagttttagcactgcaaatgttaatacaaaaaaagcttgtacatatcaaaaagaaaagtctgataaaaccaaaagcgaaaaacttttatttctaaacattattaggacacaggacacacagataaagactagtacactcagccaaaaaagttcagattagattaaagcatgttaaatatgtcaccaaaatattttcccccacatcaaggattttttgttttctcagtaatacatgcacatgaccaaaaaaaaaaaaaaaatcaaacagcacaaaagagtatgagtagggctctctccctaccatgccataccctgaccaccagtctctaatagcaaccaaccacaaagtctttaaaaaaattctagtaagtgtcccatatatgttctacatcttctttttccccttaccaagtctcagagatttgagaaattacttcatctttcttcatagcatttatcactccctgacactacggtatttatccatttatttattgtctgctctctttctataatgtaagctctatatcagtatgttcttttctgtactcctagtatcaagaatagtgtctggcatagagaagggctcaaaatttgttggatgaatgaataaatcataccccatctatactaatagacttccctcatttattttaaacagcttcatagtagcctgttatctcaacttgccacaattaaattaacctatcttctgtagataggccttaaggttgtttcagacagtatttcaagaagggaggtaccttaaaagtctagtccaaaccctgagttttatagctaaggaaaaagaaattcagaggtgacagattttgctgaaggttgcagagctgaatccaacccttagttttgtaaattttcaattcagtgttcatattgtttacctgaatatatatgttattccaattatcaccaggagaaaaaaggcacatagggatgtaactaaatgaaaataactccaactcctacacaaaccttctagacccaatctagagaagagatctgaaaaccttctcagttaattattaaaacatgaaacatcatttctggctctactcagaacacttcaccctaacttccacatatctgaaagtttttagtgttctttttattacccacacttatgtttataaatattctttattatgatgatagtattacatcagtaatataaacactatttttagacatttaactctttgttacttcttgctgtaaaaactctgaaaaagaaactaattttagttcattttaatttttaaaacaacatataaatgtttcaaagcaggtaatgacagcgattgaaatgtttttttttttactatactttaagttctagggtacatgtgtacaacgtgcaggtttgttacatatgtatacatgtgccatgctgctttttttaactttaattttttttcttttttttcttttttttgagacagggtctcactctgtcacccaggctggagtgcaatggtgcgatcttggctcactgcaccctctgcctcccaggttcaagctagtctccttgcctcagcctcctaagtaactgggattacaggcacccgccatcacgcccggctaatttttttttgtatttttagaagagatggggtttcaacatgttggccaggctggtctcgaactcctgacctcaagtgatccgcccacctcagcctcccaaagtgctgggattacaggcatgagccaccatgcctggcctgaaatttgtttttaaatactatattgccaattattgccataaaaaggaataatccttttacacatctatactgcattgcccaatatttaatgtattattcttcaagatgaaagaaatattatatttgaataaactgccttatcttcctgagtattttccaactcttttctgctaatgtgttaaagagaaaagcacacagcattcaaaattaaaagtcttctaagcttatttgaaatccttcctcatacccacttctcacaaaaatgacctccaaaatcatccagtttttaatagactgtccatggaataatcttatatttcagaggttgcatcactgaactaatccatcacaatgttgactctattgctttcaccatcttctgagagatcccaattgtcgcaacccaaactgatcatgcaccaaacctcggagattgtcaagccagcaaaaattacccaaagcaaccatgccatagttctcttattttggctacactaacttggcaagttctcacttcttagacttgtactatcttgtgtgctatcttccatttagacaaaaacctagctgaaacttggtattctaaaagcccaataggatccaacagccaagagttctacatggctgcaatgcaataacaagctaatgttcataatgatgatccagagtctgccagatccagaaaaaagctttttaaacagaataaaatttaatcatatttaatatattaagctgtaaaactgtagtttaataaagtatttacagtgtagtttcttcaatgcagtcattggatcttgatcttttgttaatttctaatttatatatatactaacttgataatgctactcaaaaattgtttgaaaaaatatctgatttccacaaccacagaagggaagacatcaatcaattttaacaatttcctaaagcaaaactggctaaggattccatttagaaatgggtttaattattaacaatcagcaaaatttcagttttgcttaaaaaacatttacatttgtttgctttattgtagcctgacttacaaaacagaaataaagccaatgtagaagaaaataagaggctagaacccccaaaaatattatataggcttgcagaaacatgacctggcaccctttctcagcacctcctagctcagaagttataaactattagcctacaaacatatttagtacacaacgaggtaaccagaaaatgtcttttaaaattctgaattcgttgccagcatttaaaaatcataatatttcatgttgaaatatttccaggtcaccgttttttgaaagtgggaggggagggaggtctatcaacatcaagtcccctttgtattcctctacaagatgagttggactacagcatacccttaaaaagaaatactactagagaaagttatttgctccagagagaggcccagaaaatactgtaggcttttccaggaggcaaaattaaggataaggtactgatatgtaaccatttaaaaatacacaaatcacctgtaatcccagcgctttgagagactgaggcaggaagatcagttgagcccaagagtttgaggctgcagtgagctatgatggctccacagcactccagcctgcgagacagagcgagaccctgtctctttaaaaaaatatatgtatgtatgcgtatatatatacacatacatacatacatgtatacatacatacatacatgtgtatgtatatatacatatacatacatatatgtatacacatgtgtgtgtctgtgtgtgtatacacaaatacatataaataaaccagtagcttgcagactataaaataacaggggttagccagatttgtaaatccctgttctagagaactttttccttatgttaaagagttacagttaactagtaggggcagggggagattttttaaactgtcagcactttcacttatatgtaagtactaaagtaaatcatcacaaaataaatataaggaagacataactattaattcagatattataaattaagaggctgacagaattcagtttttaagagaacagatgtaaacagtaagtttaattgtccatacttatgggggaaaaacggggattgctaggcaatttaatataaagggcaatatttcaggggaatgacttggaaaccagtcttctaactttgtatgcagagagagttattgattagacccacaccaagatgatactgttgcatagccagatttgagaaccaatgatctggaatgcttaagaaccacacataaaattatcttctagaattaaaacagttcagaaatagttatttaaatacgatcagtgaaatgctaattataaataattatttcttcatttaaaactactgtctaacgtttctattaagaaatgttggctgggcgcggtggctcatgtatgtaatctcagcactttgggaggctgaggtgggtggaccatgaggtcaggagttcaagaccaacctggccaagatggtgaaaccccgtctctactaaaaataaaaaaaattagccaggcgtggtggcagacgcctgtaatcccagctactcgggaggctgaggcaggagaatcacttgaactcggagggtgggggttgcagtaagccaagatcgtgccactgcatgccagcctaggtgacagagtgagactccgtctcaaaaaaaaaaaaaagaaagaaatgttggccagaagtgatggctcatgcctgtaatcccaacactttgggaggctgaggcaggtagattgattgaggtcaggaattcgagaccagcctggacaagacagcaaaaccctagctctacaaaaaatacaaaaattagctgggcgtgatgacacacgcttgtagtcccagctacttgggaggttgaggtgggaggatcacttgagcccaggaggttgaagttgcagtgagctgtgatcgcactgctgcactccgacctggacgataggtctcaaccctgtcaccaagaaaaaaaaaaaaaaaagaagaagaagaagaaagaaagaaaaatgccacctctcaccccctccaaagtgcttgacaatcagtacaatcagtatagccttggtccatgggcaaaacaacactaatgccagcaagagaggagaagcgtcagagagataatcaggctgttattttgagatgagcaggtagatcctaagttgttggctggagttcattcattaagacaaatgccccaaggacaatcctttcctaaattcagttcctgatgaatgtgggagcaatggataggcacacttcttcagaacaatgccataatccaaatatttaaaatatattcagattgttcctggttagtacaaattagtgacactttactaagtgctatatttcattattcaactttctaagtctacctatcactttatagattcactaaaatcaaaaaggaaaatactttttttaaccaataaggaatgtctgaataagggctaggtattagatgatactaaggaattacttatttcattagtgatgataatgatataagagatctgaaaaaatgttcagttacagatacatattgaactatttattgggaaatgacatgacatgggatttgctttagaataactcagggaaaaaaaggagggaagggggaagaaatcaatgaaacaaaattggcaaaatattgataattgttgcagatgctgatgggttctatgcggagatttttccacagagggggaaaaagtttttttttaaaaaagaacatattaataaatacattccaaaacagagcaaatgtgtttgattttaacatgttcaaacaattcttttttttttttttttttgagatggagtctcactctgttgcccaggatacagtgcagtggtgtggtctcggctcactgcaacctccacctcctaggttcaagcgatattcctgcctcagcctccagagtagctgggattacaggtgtgcgcccccacacccagctaattttttttgtatttttaatagagacagagtttcaccacgttggccaggctggtctcgaactcctgacctcaggtgatctgcctgttctggtctctcaaagtgctgggattacaagtgtgagccaccatgcccggcccaaacaaatatttcttaagacaataaatcaagttcccacttttattataaaatagctaacatattagctgttagtcacaagcctgggacaacataaccaaccaccccatgcaatacactcacgctggacaaatctgggatactgatatcatccacctcagagacaacacttcccctacgattggagcgactgaaataatcagcggcagatacctttcggtcagaaaaaaaacaagatgctttmaaggttaagaaaaaagaaagaaaaaaataagaacattggccaattagggaaaagttttttaaaattttgatgggtgataaagtaccaagaaataaaatgaggaaactgctgcaattaacctactcaaaaaaataaaaaagaaaaggggttcctaaatgaaatcacagctctacaatcagcttttttactcatcttaactagagtcctatgctacagagaacatttacttcctgaggaccagcaaatctctcatgtttaagatatttatcaccctgaacagaggcatttctaggtcagtatatacctctactataattctcaaaatttataattcattatagctatcaactctgttaagaatatatatgctgaatgcagaattatttgcagggtgtttactgcaccttttctcagtttacacagttcccctttttttatattcccaaagaccaggaaatgtaagacaaaataatgaaggaaataaactataccggcctctttttagttccccaaacacaccagttctccctcaccttaggccttggcactggcctagaacgctcccctcccagctcttcaagcaactggctcctcacatttcaggtctcagctcaaaggtcagtttctcagagaagcatytctaatcaccccatccaaagggtaacccacacacatagacccctccaggttccctatcacattatctgttctcttcacagtccctgacatttctttctttttgtttctttactagcttattttccatctctttcacgaggatataaattccataaagtcagaaatctagtctgactggcttaaaatagtattcctagcacttaacacagggctttgaatacaacaggtactccacaaacatttatttaattttaaaataagtgatttttttttaacctcattcatcatctattccttacttcagctgactgtttgccttgctttaaaatacttctcaaggaagggaattcagaagcccatccacagagataaaacaggcttacaagtatgaagttttgctaaggactgataaaatcaagcaatggtatttttattcacaataataataataatgattgcatttatagatattaatatttattggcacctatttgagaattttgataggcattttctatatagtattccatttaatccatatattaaacctacctacaaagatagtattaacatccccaatgtacaaataaagacactgccatttacacactaacaggtagtagaagtggatacaagcccaagcatcattatttaaagtccctgccctttccactccactgcgttccaaggtgtttttaggtgttgtggcatattatttctccttcagttgtgagcgtgagcattagttgctttgctaaggaactaaaacggctttaattaaataaatgaatgtatggtaacaaatctctccaacatttaatgttccccttctctatgaaaactcgggtttataatctttcacataactcatgttaaatggcctatttttcttaaaggaattacagcctcttatgctctttattctagctctaagctgacataccatccggaacaatgtattttccaaatcaatttcttaaatataacaaaaatgtcatcagttttctgtaaaatttaaagcttcattaaagaataacctgaaattatattatttgtattctaacatagctatttgttgcctctacaattattatccaattgaatgtctaagactagaatttttaaattttgtcattagcaattcttaagttcacaagtctttttttttttttcttttgagaggcacagtctcactttgctacccacactggagtgcagtgatgcaatcatagctcactgcagcctcaaactcctgggctcaagcaatcctcccacctcagtctcccaagtagctgggattataggcatgagccaccctgactggattacaggtcttaacaggtggataaacactggttaaatctaaatacaacaatatagaaagcaattaatggtaacatgatttgtaatccatagttatgagttttatacaatatggaaacattaattttgctgaagaaatttgtctttggtgaactgcacacacatgtatgtgcataaaacagcaacaaagaagaaaaagtaaaaacttttcaaataatgattcactcctaagagatgtaaaaaggcaaattattaatgaaagcttgcacagcccacagagaatatgtgttctcaacatgttttataaggcaaaatatttatataactaaatttgaggaaaatgctctttttgtcaaatgcaaacttcactttccaacagacttcatgtgatcatgcattgctgtcatttaaaactcatcttatttctttgcatgcaaatcatgctcaccacactctcccttcgtccacgactggcacgatcagaagacacaatgcttgcagtgtcatcgttggtaaactatagatattaaatgcagataatgaaaaagatgcaattttgctatggtgttacctcattataagtacattaaggaaggttttgagatgcatatgaataactatataagcagcataattggtataatatagtgggcaccttatatattaataaaaaagctggtacaaggcataataaactgttattaaaaatcaggagacatttccaaaaagcacaaataaagtaaaaccttatattttatttaagttacattaaagaaagccaggagcggtggctcatgcctgtaatcccagcactttgggaggccaaggtgggtggattgcttgaggtcaggagttcaagaygaacctgaccaacatggtgaaaccccgtctctactaaaaatacaaaaattagccgggtatggtggcgggtgcctgtaataccagctactcgggaggccgaggcaggagaattgctggaacccaggaggcggaggttgcagtgagccaagatcgtgccattgcactccagtctgggtggcagagcaagacaccacctcaaaaaattaaagaaggggaggtgcataagtaagccaaccaaaaccagctagggatttcatactttttaaacctctgggccctttgggatcccatcaggggtcaacaaatatacttaatgtttttgtttgagagagaaaataaaagaatattttaaagcaaaacaatgtaagtcaatgacagaaattcctacaacaaggacaacgaagtgatggttcttatttcctttattcattcctatgcagctagtggagatgttgctaacatcaccctacatggctctgtcatcttcttgctttaccagccaaagactcatcttcgatatgtgtagtttatctccattctaacatcactaagaaaccattctggcatcactaaaatagttattctaaccccaacctgcaaatgaaatacgatctagccagcctataaggacaagatcctacatttgactgaaaatataagctgggtacagtaatacacacctgcagtcccagctactcaggaggctgaggcaggaggattacttgagcccaagagttcaaatctagcaggggccacatagaaagctaccctctctaaataaaaattaaaattaggccaggcacagtggttcacgcctgtaatcccagcactttgggaggccgaggtgggtggaccacctgaggtcacaagtttgaggtgggtggaccacctgaggtcacaagtttcatgattcacaatttaccttgcagatttacccatgtaagtacacaaaaatatacttggataagaatggtcattgtataagtgtctatagtagcaaaaatatgacaatctaatgtccatcacagggaaatgactatttttttttttttttgagatggagttttgctcttgttgcccaggctggagtgcaatggcgtgatcttggctcaccgcagcctccacctcccgggttcaagcaattctcctgcctcagcctcccgagtagctgggattacaggcatgtgccaccacgccaggctaattgtgtatttttagtagaggtggggtttcaccatgtcggtcaggctagtctcaaactcccgatctcaggtaatgtgccctcggcctcccaaagtgctgggattacaggcgtgagccaccatgcccggacaggaaatgacttttaaaatgtatacttacgcactaacagaatatattgccattaaaaagaatgtgctaatatgaaactacctctaagagacatgaagtggaaaaactaagggacacagcttacttgtttaaaatttttatcaaaaaaagaaagaatgaaataaatttataggtgctgatacagaaagctactttaaataaagaaaatatattgaggagcagtatgtaatatgacccatttgcactcaaaataaagagcactcatacgtgcataaaatatctctgaaaggttattgaagaacagagattacatttggggaaggaaaatggggaattttactttgaattttccttaactaatattatttttataaacttttaaaaatactctagaaagattaggtaattataattgtcccagttttgtctttcgtataacaattttttttaatcagcttgttttatttcttctcctttcactgcactgatagaagcgctggcaagcaggtgaaatggctcaatgtgcagaatgtaaagatagaaaggagaaacacaggatagtcaacctatacaatgaattatcaccactgaaagacaagaagttctacacaaatgaaaattaaatataaaaactttaaaaattctaatggcactggttagagactcatttaagaaattacatgctaagtcacatttatagagaaatcaccaattattaggacaaattagtgcttgagtttatgtactaagggaacayctaatccatgcacaacraagtgaatcacaccatatcctcaatattctaaacagtgagtacagattaacgcaacaatcaaaaatttctacaaagcatgcagagactagacagctcacccctggactgcttcgggctgaacttattcttgatgaataataactgcattcagatggctataaagtttccaagaagaaaggttttacaacaatgatcacctcattattctaatgagaatacattagggaccatttacctaacttgcccctggttctcaagataaaggtaactgttattcagtggtgtagaactctacctcatccccaccctcaagatccaccagcccttggctagagggagcgaagaggaaggggatgccctgagaagtgctgctcagaacttcttcaggaggaactaatgaacaagaaaagtggtttttctatgcatttccctaatacttgaaatcatgatttccagcaggcattttatcacagcttgggtgagagtcacaactggctagctcaatgacttgatcacagcttagagagtaattccaggtcagattaaatgactttttctttgtatatttttcttttttattaatttttgactttttctttgaaagtaaactgtgcccacccacatttccctcctcttcaccaccttcccctatttagacttacagttcgaggaccataagggttatataatccaccattgtacaatgatgcctaaggaacaaaggaaatatcacttagctatttagcttcaaggttgttttgaaaatgacttaatgttttcacaatactcagtaccaaaaaagttttggagaatgatataagtgtatagcctcccagaatgaaaaccctgaaggcggtaatactcatttatatgcaaaaattgctatcaaccttgcacttcattttttaaaaaacacccctggttacagtattttctttcaccatcatgttatgaaactgggagaattaacgtgtacacatttatcttctcaaaagaggaaacagagcaggaaaggaaactgaggtacaaagagcattttgcctactactacaataaaattaagttataaaacctcaggatcccagtccactagaacaggccacaacacaacaaacagcttgaaagcaacaaattcacagctcacacattacacagagctactgcttttacttttctagtcagcttgctttattagatcctagtatcagaggccaagatcataactgtcccaaagaaaaacaatatcctttccataagcagccatctcacaaaagtatgtgagtgtggtaggactcaagcaaatctatcttctctagataaaaaaaaactgattctaagcaagggctaccaacagccctctgtgaaaggaatatgttcatttttaataccctaaagttgtatattttaagcacaggcagcacattctgcagtatacatgacactaaaatcatgtgtccttaactattttggagaaaagctgtcaagccatagagttagcaccatgacattgaccccaccagcastgcacacactggaagaggaaaatacaaaccagactggcacttctcagcagaccagaatttgcartaggagaggcctaagaaaaaagtgtattattaaaccccaaaaaaagcaactggtagctctaaaggcagaacattcctcagaaagtactaaccctgtcactcttayatgttgccagagggtcactgtacagggaagaagactgctaagagacaaaaacaaaataaataagcaaaaacaaaaacaaagatgaattggtctcaccatcatgaatgcagaggacttaagtttatgattttatactccataattcattagcaattcctgagtgcttaaggtagttaagaaacacaagaaataagaaaaacttaagtaattagaaattgttttgaatattaattgtaagggataagaaacagctggaacagttttctatgaattataaatatgtttatgtcccattggtcttcgagcattattgttaggatatggaatggcaagtaagaaaacactgagggaaagagggtcatggtaccgggagtgtggaaaacagtggccacatcccactcacccagttcttatgatattttcagtgattttatgaccaactcctaattggcttagactgatttttggagaaccagataaataagctccaagttatctctacaaacactcttttccaaatagattagaaaacctgttcttcaaaacaagccatggacaaagtgccttagttgaattagataaattgtactagtcaatgaatccatgcactaaaagaacacagcatgtttttaaaggaattaaatcttgcttttcctgatgtcatctgaggacatacttttcaagttttcaccaaacccaatcagagatgaaaaataagagtacttaagttgcgtgtgcaggttttttaaacaaaattattttaaatgtactgtgtgccatacacttaatgtgtcttaaatgtatgatgtgtcaaatgcctttaaaaaaacaagagattctaacattaaataattacattcttctcatgccacgtgtttacatttttatatgtaagcttttttaaaagggtacccactctgaagtatatggatgcttacaacttattttgaaatgtatcaaaaactaagatgaattgatggttagagggtcaaatagataattatgtgataaaggaaatataatgaattatataatctaaatgataggtatgtgatgttcactgtattattccttgaactttttttgtacatttaaacatctttatttaaaaatgtctttaatggtactgatttataaacatgatgactgaatagttcccgttgtttaaagagactcccacagactatataaattcagttaccaaaaactagtatatacgtagccatttacagattagttacagctagtcaaaatgcaaaatggggagatyagaaatatgttaaaagtgaatcaaacacataaagccaaaaaagtttagacaaacccgagtgtagtaggcagaggtgggtttgctatgtctaagactgctatagtttctctggtcaaagtagaggccactctgcaaaaagcaaaattaaacacatttttcttaggctaaatgttaataacctaacaacacacaaaggcaaaactgaacacaaaaaggcaaaatatgatattgccaaatcccttcttctccaaaatgtttttaaatcatcatatcacattaagtcaaagtgacaattatttcaagcccctaaaacaaagacattactaaatttttaaatttaaaaacaagacaataaaccctcagagaaaatggaatgaaaacaatttattctcatgccatacttaagaaagtccttgaacactcctggacaactgaataattaccagttttacaatccatctggcaaagccacagaagttattaaagagctatgtatttggttccaaacatttcctagtcccattacttgtcaaaataaactgacaaattaagttaccaaaatgaaagagagagtacgataaatatggtttgatctaaaacacttacggcaggttcatttatacaatgtacaaaataaacaatagtacacattatagctaattgagggagagaaaaccatctataaaattcccttcccaacttctctagccaacttttttactcaaggttaagcaaatttaggcaatctctgacttaaagactccatcagtgttgacagtggagttgaggacatccctactcccaccccatccctaccacccctagccctgccttcccacaccrctcctcactccccactcacaccctcaactaggcacctaaggctcacctctccccagagatcccaagaccctaccttccagggcctctcgttaatttcctccccattacattctcccttctctcctcccttgtaccaaccaaagccttccaaccctctcccsgttcaacccatgggaaccctgaattagcaaggagttgggactgcacttcctttgccagtactgttgcagcctaacaggaaatgggtgtttccaatgtaccaagtgggcattctggagacattattttcctcacagaaatttgtttagcagccgggcactgtggctcatgcctgtaatcccagaacttcgggaggcagaggcgggcagatcacctggcaaaaccccatctctacaaaaatacaaaaattagccaggaagagtggcacatgcctgtaatcccagctacttgggaggctgaggcaggagaatcgcttgaacctgggaggtggaggttgcagtgagccgagatcgcgccatgcactccagcctgggagacagagcgagactccatctcaaaaaaagaaaaaaaaaaagaaaagaaaaaaagaaaaagaaaaaagaagtgttgtttcacaaagtgactagaataaagagtatattaattctgcagtttaattacattataggttaaagagttttcagcaagctagtatggaaactttgccattacatatttattgaagaaactagaaaatgcattccaagttcccaaaacacaaacttttagaatgaaacctatttgtgagtttagttacggcccataataccacaactaaatcaattcaaattcctaaaataaggatgagaatcttactaaacctattcttgaggtatattccaaaggacaattaataaatgaaaatacttgttaatgagcttcttgtgatatagtactaactctggctgctagggtttgcatatgttaatactaaaacttgcaaatgaaaacaaaattatttttaaatttctgataaatcatgtttcagcagattatcaagtttcaataatgtcctagtagcacaccaaagcaatcataatccttaagttcctaacagtacttcgtgaattgtgatatgagagacaacagaactaaccagtaggtcttyatgagaatcagaagacctcttcttcattccatgagagtgactgtaagaatgattctggaagtaaatattccaagttaacttcaatgattgcatagcgaagttatgaaaataataaaattcatcttcaaattatatacacaaaggtctatatgagatacacaatagtttacatgcaatttatttcccaaaggttagtaaacaattcactgcactttactagctagtctacctggcctctctacacatctgcattcctccctcacctccctctgtgccaagcatctgtgtgtctggccagctaaagaaaacttgattagaactaagaaccaggcagaatatttgtggagaccttcacaccacacttgagtccctctgacttcttttttttctttttcaatagaaacagggtctcactctgtcacccagacaggggtatagtggtacaatcatggctcactgcagcctagaactcctggactcctgccacagtctcctgagtaggtaggaccacaggcatgtaccactacacccagctaatttggggttgggggaacaggtagagacaatgtcttgctatgttgtccaggatggtcttgaactcttggcctcaagtgatcctcctgcctcaacctcctgaaatgctgggattacaggcatgagacaccactcctggctaagggtataggtaacaagataattcatttccttctatagtcttccttacctaaaggtcaaaaagcaatcttttggaacaattaaaacaggactgagagaacaaagaacatgacattaaactgtcccagacagtactcttaacccaaattagtgaatccacagtatgtaatgctcaggaggaaaacaaccaacatggtatggattgcccagcataccataaatggtcaccttataaaagggtcccttgaagacaggattgtctcaatacctaacttttcctaggagtacacagccaagtacatatggggaaattaaggctagcaatactactaaataggtaaattggtagataagaaatctaatctaggtacgtactacttgcctgaaataagagagtgtggctagaagtgccctacctatcaagagccaaaggcaacagactgctctaggtaaaccatctcacatatatatagctgtattcccaatcaatgattaaaaactcattttacttttttttttttgaatatgcatctttttatacattactctgaatattttaagagatgtctatgtaatttagaaactcaggcaacctattgacaaaatattaacccaagaaaaacaagctataacttaaattccttggttaatgacataccataaaaaactaaccaaatcaaaccaaaatgtttggacataactgatgtcttaggtgtcctctaacactactggatgttttctatctagcaacttcacacctgccagctttgtgacatatgacataaaacacaatttgggcttgtgctcaacatgaagacaagtttctaacagtgttagaatgacaatgagtatatgttaggtgggtggctcatcattttaagaaaagatatattactaccagctgggcatgatggctcacatatgtaatcccatcactttgggaggccaaggtgggaggatcacttgagaccaaaagttcgagaccagcctggacagcatagcaaaaccccatctctacaaaaaaaataaaacaattagctgggcatggtggcacatgtttatagtactcgctactcagaaggctgaggtgggaggatcccttgaatccaggagttcaaggttgcagtcagtaagctatgattgcaccactgcactccagcctggttgacagagagggaccccatctttaaaattaaaaaaaaaaaaaagatattactaccaatcctagtcctcaatagataagaataacttgtgtctaattctgaaatcctaaagaaaaaaattactattcatgccacaaccacaaaacattagctttttgctttgttagtcacacattttccccaaaagttcataacaaagccatgaaagttagtcatattctataattagcatcaacagatgtttataaagtaaaattccacatataacacaaagtcatgtgctacatactaatgatgaaagtcttgatgatctatccttgaacatatcatactgggtttcagcaaaacatgaaagttggtttgtttccaaattcagaaatataaagaagagaagaagtaatatttgaggttattttaaaaatccagcactattttaaaataaaaaattattaaacatgaaagctaatccagttgaattaaaaaatattcttcctcctactttttcctagtataaagtattgctaaactgtatgtatattcaaaactgtatgtttatttttcttttaaacaacaaaattcataatcagtaatagtgatatgattcaatctcagtacactayagcacaaaacatcctaagggagcctttaaatacaagaattaagcattctaaagtcaaaaatgctttttaagaaaattattatcacttttaacatcatttcctattgtttgaaaaatggcaaaagcaaaggatgaacaggcaatgaggcaagctgacataacaagcatggtcaagcttacaaaagaacaattgcagcaccaagatggggaacattcccttggatctgcttgtgaacaaacacctaagaatgtccttcctcaagaaaatgccgatttctcattttgagaaatctggtcaatgtgtgaactgcacagtatacatacaggtgtgacactgaatataaatcaaagaaaaatatacaaaactcgtaagaccagaacacccacatttcatgtaggatcctttttaaaagtaagatatgtaataccacatttcaaatccagggaagaaaaactaaatagtaactacatagatttatggttttcacacatcgtttcttaagcattctagtttatatttttaagctgtctacccagaaagtcatatacaaaacaaataaaagcaatgaacaagttcctcaggtagtttaaatactaattgtttgataaaaatatctttcttttccaactcttatattcatttaaaattttaagcaatactattcaaaaacccaatctaaagtaacgttttcataaggataggttgcaattcatcagtagttcataaaatcaacttagtagggtcaaccagctttttttgagacagggtttcactcttttgcccaggttggagtacaatagcttgatcatagttcaccgcaacatcgaactcctgggttcaagtgatcctcccacttcaggctcccaagtacctggaactacagaactacaggaacatgccaccatacttacctaatttttttttttttaattttaggagatggggtcttgctatgttgcccaggttggtcttgaactcctgggctcaagcaattctcctacctcagccttccaaagggctgggattacaggcagaggccaccgtaccctgccctcaaccagcattttaaaaactaaactagaagagaaaatattagagggtgttgtgcaaagtaagtgcaaatattattttgtgaaacttttgtttcaataatgtattttctatacttttacatatatacaaatccacatgcatgaatcttcatgtgtatactgacttatggtgtaaaatgtatttcttgttgtagagatcacaatttttaaaaagcttaaaatatattagaaaatcaaagtatataatctagttctaataagacattaaaataatagttcagtcagaataaagcccttccattcatgcctaatgaaatggtcatttacaaaaaacattgcagaaacctcaaaaaataaattccataagtatcagactaagtggtaccattttaccactggtataaattcattgaaaatgttattgtaataaataccaattttattggagcaaaatatctgtaccgcatgcttttyttatattatcctgaaactaacagaaaacmcaataaaaaatattattattgcatgtgtaacaaaatcttgttacaaaattttytaaaatgcgtaatagtatgcatttaaactgtgtagtagtaaaatgtcacttaccatggagagacacttccccaaaaataaagttgcttctctatagaaatttytaaattaaaaaaaatctaacccttttgtttaaaaaaaaaaaaaaaacctccatgaccaaaacatattactcaagtcacacattctagcagataagctattccatcctccaaataaggtaagttcatggaaaagagtagctgtctttcctcttatcatcctctctatagcaccagtggcattttacacaggcataggatttaacaagccaaactggaaataacctgtttcaattttcctttyccaaaatataatgtagaattcagctggtttaaaaaaaaatgttgaatctatctggtaggaaaatccataatttgggcataccaatttctactagaacaatgggcaaacaaaaaaagtcaccccaataagtaaaagttggcctttatattgttgtaaagaaaagaaagattcatcaaaggaggtaaaagtgaaaatagtaagggctcatttccaaatttttgatgctataaccatagagaaaaaagaaaattttttttaactttaaaagttaaaaaaaaatccaaaatttgctattgtaatcttttaaagaaattttaactgtcaaacttgcctgaaagttttcattaggaaacaaactagaaagaaagtacatacagtgaacaaagttcagcaagtgtcaatctctattagaatgtacctattactcaaatatcaaggacactgaaagtcaaaagtgaatgcataacactaataccacacattttcctgggctacacaccatagtgtctttccttttgggtgtactggctctactccaaagtgtcccagttatatcctttgatgggttcttcaatagaattaaacagtgtaatagtaaataataaaacacaaaattgtaagtatattttaaaaattaaattcattaaaattataccaaggctactggtatataaatagtaactaaatacatgcaacagtaaaaatctccaccaatgagaaaaggcaatgtatccctactgctctgattcaatcaagatcactttttcttcgtttttatgctgtggcacaatcaacgctcactgcagcctcgacttcccggacagctcccacctcagcctcccaactggctgagaccacaggcatgcagcaccacacccagctaatttattttatttgtatttatttatttttagtagatacaaggtctcactactttgcccaggctgatctcaaactcctgggtgattctgctgcatcagcctcccaaagtgctgggatgaaaggcgtgagccaccgtgcctggccaagatcacttcattttctaattttggatctttaccttactgtcttcttgtatttcaatgtataaagcaatgaccaagcagctactaatgttctgcactattaataatccaatcattatacaaaactaatagacacagattgtttcaattctaaattcctaactttgatttaatcttccctcccccaatcctaccattcacagtcttgaactacctttgctgtttttatttttatacataatgtctatagcactgacaccaacatttccagcccatatagcttctggtaagccacctttcaaaaagatagtatatgaaagttaattggacaaaaggagaaacctaaagtcctaagaatgcagcataagaccataaatatatccacctcacattcaggtactgctaatgttcaaacatcaaatactacgttcaraaagtattagacctcttagtacacggccttaagtttttaaaaataactggctgagaaatgcataactccaaaattatatagcaaaccacaaggaaatttaggtcagtgtttaggccatctacagaggacaaaagttgtctaacaattcagcttaatggaaaaattattttaaaagcaaataatttgatgaaaacttagaactcwcaatattatttgggtaaaacagaaaaagttttatctcaattatatttcttttaaatgaaattagtagtgagccttcagacttgtttccaggaaagtctaaacatttaaactgtgttagatgtgcactcacagagagtaatgtactagaatctcctctaggatgtaaaacttttattaatttttacatttatacattgacgtttttaaatactgggagttttattctatcccatagtaacaaattttcaaaatcaacataatgaaattaaatactggagttatatcttaaatttgtttaatgatacaaatgccataaaaataaaatcatcctgattatatacattctggtatatagttattatcggtttaactgcagattccttttttgtttgcagatttgttttaaaggcccccaaatgttcaaattttgctggttctacctttaagttaaacaaatatataatcaaatttcctaaggccacatacaaatttataaataaccggcttaataacaactgtgtgaaaatacacactgcgaacattatamtgaaaagcaaatgaaaaagccataaatacaagaagaggattattttcacagcctttgagacttaactttaaagcttttattgactgactccctgcatgattctttacaaaatatttattytaatttttattttgagacagagtatcactctgtcacccaggctggagtgcggtggcacgatctcagctcactgcaacctccgcccacggatccaactgattctcatgcctcagcctcccaagtagctgggattacaggcgtgagccactacacctggctaatttttgtatttttagtagagacaggggtttttgccatgttggccaggttggtctggaactctgaacctcaggtgatctgctcgcctcagtgtcccaaagtgctgggattacagatgtgagccaccgctcccggccttttcaaaatatttaaagagaaaaaaacaaagtactatatctccagggagaagtatgatgaattcactattaaaatttttctactgtaaaatcatttataagctgccaattatcttagatttctgtaaagatctgttaatattctttttttttttttttttttgagatggagttttgctcttgttgcctaggctggagtgcaatggcgaatcttggctcacggcaacctccgccttccaggttcaagcaattctcctgtttcagcctcccaagtaactgggattacaggcatgcgccaccacacccggctaattttgtattttcagtagagacaggtttcaccatgttagccaggctggtcttgaactcccgatctcaggtgatccacccgccttggcctcccaacgtgctgggattacaggtgtgagccaccgtgcctggccaatattcttaaaaatctaaagttttataactaaaatattcctgatttagtaaccagcttagtaacttactctaaaaagacagtacattacattcaccaagaaaaataaccagcctggagaacattcaccaagaaaaacagccagcctggagtttatatttgtgaatataaacatgtcaataactagtatgccagagcacactcagtttattagagtctatttttatcatttatacaaggtagaaagaaaattacagtcagggaaaactaacaaatagagactttaacatgaaagatcattttactgattaagaaaactacatggaagtatacatacagcattgtaaccaaaatgcaattgtaccctaaaagctattaaaataaaaaaaattttaaataaaataaaatggaaaaaaagaaagtatacatacagcattatcaatgtgcaaaataaaagtgctgctttaaggtgtaaagcatacttttttaagacagaaattagggtcttggcataatacaagggtttttaaggagcaacttctccttcctcctgacttataacaatccatgcaaaaaacaacctggggcattctataaaatgttaatcaaaatgtcaaagcatgataattcctatacatattcagagaacttttcaaatcagttgttcaaattttccacataataaaattacaattaatcatccaagccccaaagctattttgcatttaattgtcattttttaagatatgaaagtagggaaagtctgaaagttagaaccaaacaaatgttattctacaagatcaatcttaattattttgtgatacttttccaaaatcaaaggtccttctatagaaaaagagattrgacccatgttaatagattaaagtattcatgattttagagttgatttacttatgacaataatttgaaagaaagcatcattttccaatgaaaggtctttgccaatattttatacttcttttaaaaacgcaaagaaatacaggaacattgtcagattgtttaggcaacattaytgaagaaagctcacacgtaagctttgtattgtgtagacaagttaaaataccaaccctgtgactgccaacacttcgaatggacaatgcatcctcaactccctgataaaaatraaaataaacacagtaaaagtttgtgagtgattacattaagctaatgaggaaaagtattagaggcaagtgtataggttattacaaaccagataaggacgatggtgactggaccggtgggaatacctggccctttccgaatcttcctgggaaaggagaaagtacatggagagttaatcactgaatagacagttgtttatcagaacaactgagcaaagagcagtcagttaacagcacagcaacaactcctgagagcaggcaggtttggataacttatcttaggggcagccacattcgtgtgtgtgtgtgtgtgtgtgtgtgtgtgtgtgtgtgtgtgtgtaagtttcaatatagcagtactagttttctttctttttttttttaattatactttaagttctatggtacatgtgcacaacgtgcaggtttgtaacatatgtatacatgtgccatgttggtgtgctgcacccattaactcattatttacattaggtatatctcctaatgctatccctcccccctccccccaccccacaacaagccctatgtgtgatgttccccttcctgtgtccaagtgttctcattgttcaattcccacctatgagtgagaacacgcggcgtttggttttttgtccttgcgacagtttgctgagaatgatggtttccagcttcatccatgtccctacaaaggacatgaactcatccttttttatgcctgcatagtattccatggtgtgtatgtgtggggcggtcacattctttggttggaaagaaagtagaaataatcttggcaatgttcctattttatcaggcgtatgtatgtcagaccacttggaatggtctgtataagaccaagagagttcaatataccaagataaaaatgtgcaagtatacttaacaaagagaacttgagttcagcattaaaaaaagacattaatctattttttcattgtgatcatcagtttatgcaggtaggaagaagtgttaacattatcactgatgtattttaagacagtatatgattctaaaaatacttggattataattttgcacttactgtaaagattttttttcaccactctaagaactaactgaaacagagcctgattgtgttgttaatatgaaaaactacttacatctagaagtaattacatatatattttagagttggtcaagttatctcgaataatgccataagcagatttttaaaaaaaaatgattgcagcctaacagttgactaaattaaatgtaattctaaacttttccacatttagctattagcaatggagcattaaggcctgagtcatgtgagataaaatggctagtccctaaaacctaatcatctcaaacagtaaggaatttctgatctttcagaatttcaagtccaaagtgttaaagtaatgtgtgctgactgaaaatctatacattactgaccaactgggttcatagcttatcaatgctgtatttttgcaaaatgaatcaatgcctcaaaactccctggttgacatctgctgtgactgatgcccttgaccaaatgtatgctgaagtctgtttataagcactactatgattcaatttctaatcaggtattctgatctttaggaattcrtcactgatttacatttgttgttgttgttgttgttgttgttgttgttttttgagacggagtctcgctctgtcgcctaggctggaatgcagtggcgcgacctcagttcatggcaacctcagcctcctggattcgagcaattctcgtgctttggccccctactaagtagctgggaccacaggcacccaccaccacacccggctactttttgttttagcagagatggggtttcgccatgttggccaggctggtctcgaattcctgacctcaagggatctgcccgcctcggccttccaaagtgctggtattacaggcatgagccaccatgcctggccactgatttacattttttattatgcaatagacacatgtagtctgcaagaagccaagaaaatttcttccctttctttatcaaccacgaaagttttgggggcatgtgtgttagcctagaagggcaggtacagcttagtaagtggtaatcagttctaggctacttagtttggttagttcaaaaagcctttactataaggtgagttaactcaacatgcctcttccaatattatttgaggtactagggtaaatacggtttaatgtctaatcttccctttattctagccttttttccattccatctatcacacagagcattttcaaaaatctcacctaaagagcatatcccattaaagatgcagcaaagacagatgaagtcatactttcaattatgccccttatattaataaaaacaattataaattaaaataccttattaagtattgatacatagtacctctatatttaaacagcttttcttgctccatttgaaaaattggcctaaaaagacttctgaaaactacagaataaaatataaacccccatacaggtcagttaatttggacaragagtatagtttattccacagtcacaaactataccttaaataagcactgtccaatacaactttctctgaccatggaaatattctatatttgtgctaatgtagtacccactagccacacgtggctactgagcacttgaaatgcaactgagaaaccaaattttaaattttatttaattttagtcaatttaaatttaaatttaattacctacatggggctaccatacttgacagcacttctctaaacctatttgacaaatgtgtttacgtaaaactgtaaggcaagctcaaggcaaattttaattataccaaaaacgttcaaaacacatattctactaagagcctgctaagtaggaccactctcatatagaaaggcaaaacatttgggtcatttttaattacttctaccttgaatacttttgcacagtggcaaacatgagggaaacagaccctggtagcaacgatataaagtgaccctggtagcaattctatttttaagagctagaagagtccttagagatyatctagtctgaccccttcattttgcagtaagaaagttgcagcacagaaggattaagtaagaatctatgagatcataaagctgagaccagcatttagacgtttttattcaccagacaactgaactgtaaagataacatcctatactggctaaatttccaccaattacataagaaaaaaagaaagaaagaaaatggcaaggtattctggtttttactcagagattcttccttctctggaagaacaaaaagcttcatttgccaggtatttctagagcactatttatattgccaataggtttctcttgaagaaattataccagtggacaaagataacagattacagcaaactgtgttcttaggtgccagttacaaggtgtatccctctattccacagtgaggaaaataatacatcgtcattatcccaaaagtccttattagcactaaagcactaaagactggacaaacagtacaacgccttaaaaaaaaaagacatgtatttgttcaaaatgctgttttgatacatttaatgaaaatgaaatatactctttgtttttaaacgttcacctgaagggaggatgaatggttctattaaaagaaaaccacagtcccatgaatatacctggccatcttttctgtcaacaaatagtatttgttactaagttgacaccaaagtcattccttcagtttcaaattagaaggaacttcaaaaaccgtatttactcttcaagacatgcatttactctttcagaatcaccactgattaagaaagacacccagtttaaaaatagaatcattgggttcatggaaagttgactaaactaacactaatgggaggcccaggaaggtgtgggtccttttcttcctggtcctttcaccttccagcacattaccaggtgtggcactctctcataccttcaaatactggttctgccaatgactatgcaagttatttacttcaccaattctttataaacatgtctataaaattgagacagtaatactgtcttataatgtgaaataaaaacctatgtaaaaagccctagcacagtgctgatatacagtatgcactcaaagttggactcatttctgagcttccttccttttcattccctattcatgtcccaacatcacactcccacccaaaaaaaggtattataattaggggaaattacaaatataggaaaatttccttccttctagtaactgacaatcctattgtggattgtgtgtgtatgcatcatttattttactataaacattagccatttatattttgtattgtaactattacatgccaacttctccttatgggctcacagataaagcagccagagagacaaagataaatgagcagaagaatcagtttaatttttttctttttttctttttctttttatttattttgtttaccttcaaccaactcacaccaaagaatcagtttttttkttgttgttgttgttgtttgtttgtttgtttgagacacagtctcactctgttgcccaggctagagtgcagtggcacaatcttggcttactgcaacctccacctcccaggttcaagcgattctcctgcctcagcctccctgagtagctgggattacaggcgcccgccagcgtgcctggctaatttttgtatttttggtagagacggggtttcaccatgttggccaggctggtctcaaactcctgacctcaggtaatccacctgcctcggcctcccaaagtgctgggattacaggcatgggccactatgcccagacccaaagaatcagttttaacagggtaaaagcaagtgtcagaacgggttagaagtgataattattcccatctgaaaagaaatgccactttctctgcaggtccaagtcctgcccataaatcaagacttggattagtcactacctgaattttaaaactctagcccaaaggtcacccctttcaatgaaaatctagcgtactcactgcctaaactatacaaatttcacagaggtttaaaaaaaaaaaagatttggctgggcgcggtggctcacacctgtaatcccagcactttgagaggccgaggcgggcggatcacctgaggtcagtagttcgagaccagcctggccaacacgatgaaaccctgtctccactaaaaatacaaaaatcagctgggcatggtggcgggcgcctgtaatcccagctacttgagatgctgaggcaggagaatcgcttgaacccaggagacggaggttgcagtgagctgagattgtgccactgmactccagcctgggcaacaagcgcgaaactccatctcaaaaaaaaaaaagaaagaaagaaagaaagaaagttgcttgtttagcagcaatcagacagtggttcttaaccctttaggaattacagactactttgagaatctgacaataaaaatacctgtgggcatttcccataaaaataattacatttgaaagtctgcagtagaatttaaggcttcatatccctctcccaagcctagtcatataccaagttaagaagccctgtaataggagacagtggggaacttaccaagcctaaaaaaaagttcaaatttaggaatgattcacattatctaacattttactgattcacaatttgtttttatagctaacaaatttgagagtagtggtagagaatttaaaaaggacctgaaggagttgatataataagagtaattttcagaggaaatgaaaagaattacttgggtcatctttcaatgaagaccatgtggacttatttttttaaaaaaaaaggggagagagaaggggggaagaaaagaacaaacccataaaaagaaaacacacattcattttctcactctttcttgatcaggagcattcatgagatgaaggtgaggatactgactacaacataaaatggcaggactccaagtatacctctggtccactatagacagaatagacactctgacctttaggttcacacaggccaaacactcctactttgcaaactattagttaatgttttacttcaagactgcattatttcagcaattgatcacaacatgcaggacaggcaatactggcctaccagccacttctgaatctgtccccacttccgatcaaaggaatgaagagagtactagaaatgcaaaaatttcataaaccaaatagtttctaacatattgcattctccaaaaaccttaaattaatcatacacattttccctaaaaaacaatgatagctgactcaaagttacacattcaaaatacagaaaattagtaagctaaatatgttcaatagtaagagatgcatgtttccctgtagttcagagaactgtaaatagaacttacatttaataactgtctcattcacttatttatttatttatttatttttttgagacaggatctcacttagttgcccaggctggaatgcagtggtgccatcatagctcactacaacttcaaactcccaggctcaagtgatcctccacttcagcttatccacttattattatatttagtataattttaggagtaaaaagacaacggattgcaacacttcctcttcaagaactgcattccatatttgaaactatacatgaggttaaaagaaaattagcaacatgtcaattgttagtgtttttcttgagctgtgacaatataaaatatttacattgctttttaacctgctcacagaaaattcaccaccaaaatcaaaagaaagtgtttaatactgtcccataggcttttgccccttcatactactacaacatcaaaaatatttattatgggaattttcaggaccaagtcaatgtcagaaaagtaaaagcatatttatttcattttaatcagcccaatttccatatgcctattcttaaaaatttttttcttgttttcctttctgataaaagtatactgaaagtttgtaaattatagaaaagtatagaaagaaagaaaaaccaacaataattccaccatagacaaactgcagtattaataatcacttccttctagtagttttttgatgctatatatggatactggtttttgtaatataaaattggggtcctacaaattttattgttttggtttgcttttatctcatattcttacatattttcctctattattaaatatgttttaaaattgtaagtctgaatgactttacagtgttttactatatagatatcataatataattaatccaaattttaggacaattaaagctatactacactttgtcattgctaaagctacyttagctaatgtaagtgaagcactcataatactagtaacttataacaatggacacgataatagctataaatgtgtttgttgttactacttaaaacaaatatcacatttaatttgctggcacagaatggcttgataaaatacatacatcagtttatactattttcaatgtttcaaaggaaaccagattcacatcagaataaactagccaagtactgattttgggggagacaaatatgaaattagggttattccctcaaattacctctttttgttgtcgttccagttctctcatgcgtatatctcttgcttctgcccgggcagcccgttttgctgccagccttgcctctgcctgaaaagtaatataaaactcagctttatacaacaaaaacaaaaacaacctgtacaccagatttgaaaataaagaaygggacattaccacgcaaaaggggtgggcaggasaagatattatctatcagcaagcaagtttgattgattgttttaatcaactcttataaactcatttctttctctagttcctaagtctttcctcaaatccgggcctttacctttaacttcttgtttgattacacactcaacacatttcatacagtttgttatatgcctctccaaacttactctttttccagaattttttccccattgattcaatcatataaactagaaacttcagagccaacctctctttcattttggacactgccaataatcagtctccaagtactgacaattctctaccactgagtctctatcaaacccatctcagctttctttattctcactgttcctgctcatttcaggaactcttcatctccccactccccacctctgttttaaaattgagacagaattcacatatcatcaaattcactatttaaatgtatacaattccgactggatgcagtggctcaggcctgtaatcccagcactttgggaggccaaggcaggaggatcatatgaggccaagagtttgagaccagcttaggcaacatgatgaaaccctgtctctactaaaaataaaaaaaatagccaggtgtggtggtgcacacttgtaatcccagctacttgggtggctgagacaggaaaattactcgaacctggaaggtggaggctgcagtgagctgagatcatgccactgcactgcagcctagatgacagagtgagacgctgtctcaaaaataaataaataaatgtatacaattctgtggtttttagtatactcacaggatgtgcaatcatcatgactaattccagaacattctcacaccccaaaatgaaacctggtacccattagtagtcattccccattaaccctttctcccagctcctggcaaccactaatctactttctgtgtccatgcattcgcctattctggacatttcatatacatggaatcataccataggaattcttcatctcttgcttacagttacctccaaatccatctgcctacttccagaatctgccttataatttatcttctacatggttatatgatggacaaatcagcctttcaaaatgtattatttctgatcacatcattccactgcataaaatcctccaccaactccttattacttatggttaaagcaaaaattccacagaacagcacaaagggaggaacagaaagaagaaaggtaaaactgaaataaggctcctcacagtcaggtccccaccttacttccaagtccagtagttccccccttatctgttgtttcagttacccatggttaaccaaggtacaaaaatattaagtggaaaattccagaaataaacaattcataagttttaaattgtacgccattctgagtagtatgataaaatctctcaggacgtcaatcatccctttgtcgagtatatccatcctgtctatgctacccatttgttagctgtctcagttatcaaatcacagtgattgtgttggagtaatcctcattttatttaataatggccccaaagagcaagagtaattctgacaattcaggtatgccaaagagaagccacacagtgcttcctttaagtgaaaaggtgaacgttctaccttaatagaaaaaagaatcatgcactgaggttgctaagatctatggtaagaacaaatcttctatccatgaaattgtgaagaaggaaaaagaaatttgtgctagttttgctgccgcacctcaaacggcaaaagttacagccacagtgcatgatagttaagatggaaaaggcattacatttgtaggtggaaaacatgaatagaaatgtgttctgattgatggcaatcaggtttgctactatccacagtttcaggcatctgctggggggcttggaatgtatctcccatggattggaggggtggggactactctacttgctccacgtgtactgggtgcatcccatctctctccattcctggactctattgtgttctgttacgcctctcttcacaaactgtttggcaggagctgttctcctttctcttattcagtaaaatattaccttctatgaagattctccccagtccctctttcataaagtaaggctctatacccatgtctctattgcggctttattatgttgtattaaaattccatgcttctctcaccccacaacttttatgcctcaaggtctgctaaaaaaaaacaaatgaattgcagggcataggtcacagtatcaaggaaatgagataaggaaatagcttaatgtgccacatgaaacttagaaatcttctgtctgctttctatatggtagtggaatggtttcctctgtccttggtcacatcctaactctgattcagactatcccctctgataactatagttgttgtcttcccatgttgttatattcgtgcccaagtctcatagtaagaataaactcaaccaatgtttaaaaggatctactacattaagcaattatgctaggtgctgaaaatacagagtaaagtatgacatctctgccctaaagcagctcacaaagttgaagaatacagagacacaatgcttatgggaaggaagcatgtaggagggagaaattagttttgcctggcaaagtcacagcaggcttctaagaagcagagagagttaaatagttaactgctactcaactattccaattgtggcaatttcccagtctgtgtaactggtcttttaatagaaaaacccctgcaaagtaaattgtaatctaccaaccgtaagctgtaaccactaacaatctagagaaattagttttctcccatgaattttacactggcctccgtcttttcaaaacctatgctctgcttcaagttatctgccttcttcacccctctatgagtagacactagtttcttattagagttttttttttttaataggaaacacttcaaggcttttaagcttaagtagatagcaaatgtattttaaaatcacaaagcatcaaaactttcaaacctttttaagaaagccctatcaatgtgtaggaattttcatttacatgtatattaaattgtacctgaagcctcctttagaaatttaattcaagaatgctaattttatccttctaagatttgtctgtggccaattctgtacaatctatatatactaaaatgagacttccttcataaaacccaacttagagataattaaaatctattctttaataagacatttttaactacaaaaaggaaaggaacagaaagaacatgggcttcagagacacacaaacacccttccctttgttacttagccaactcagatgttacctcccttggagactgtgttgaagagaggccattaaaaccacatgctttaaaagaaataaacaggatttaaaactactttatctggttctttctatacattattactagatgcttgaagcaacatggayaagcaggagtagcaaggagccaacactgattccaacctagtagacgaaatatatgctctataacttattgtgatatattttaaaattatttttgaatagacaattatgggtacataaaacatacttctaggtagttaacactagcatttttacctcagaatacaatcagataaagagctgctacagattcattttaatatacacctcatacatacaaaataaatgggatataacaataaaggacaaccaagatttaactaaattcacagtaaaggctgggcgtggtggctcacgcctgtaatctcagcactttaggaggacaaggcgggcagatcacttgagaccaggagttcaagaccagcctggtcaacatggcgaaatcccgtctctactaaaaatggaaaaaattagctgggcgtggtggtgcatgcctgtaatcccagctactccagaggctgaggcatgagaatcacttgaaccctggaggcagaggttacagtgagccaagattgcaccactgcactccagcctgggcaacagagtgaaactctgtctcagaaaacaaacaaacaaaacaaaataaagttggctaaaacacacaattaccatttgatccaataattccacctatgggtacatatacaaaagaactggaaagcagagacaacatatatttatataccaatgttcatagcagcattattcacaacagtcaaaatgcagaaacaacccaaatatctatcaatggacgaatggatagacaaattatggtatacacatactttggatcattcagccttaaaaagaaaattttgatacatgctgcaacatggatgaatcttgaagacattatactaaatgaaataagccagacagaaaggagtaatattgtatacttccacttaatgagaaacctaaaatagtcaaattcatacagacagaaagcacaatagtggttgccagggactgagggtagggggaaatgggactyactatttaatgagtacagagttccagtactggatgatgacagagttcttaaggatagtggtgatggctgcatgacaatgcaaatggatgtaatgccactaaactatatacttaaatatagttaccatgataaatttcatgttacatatattttaccaaaagaagttggctaatttaaaagtcagaataagatataaattagaagtattcagaagcctaaattatttaaatacttttagagtctttcggctgatatgaccccaactgttataataaagttaatataaaaattcagaaaaattcagaaaaattcaggagttcaacaccagcctggccaatatggtgaaaccccatctctactaaaaatacaaaaattagccaggcatggtagcgcttgcctgtagtcccagctacttgggaggctgaggcagaagaatcgcttgaacctgggagacgaaggttgcagtgagccgagatggcaccactgcactctagcctgggcagcagagcaagactctgtctcaaaaaaaaaaaaaaaaagacagtgaaaatcatgggctttgatcactcccagaacaaatgcattaggttgtatttaaactcacagaacttttaaatttgtagaatattcactgtatcactcaatgaataattaggaatcacataatggacactaagaaagaacttctcggcctggcggtggcctgctccagttcgagccggtacctcactgcatctcgcaagaatttgtggatttgggggtggaaccccattcggaagagcacaaaaaactgctcttaagtcattgcaaagctacagctctggttagccagccacaaagttgtcatgagagtcgtctccacaataccaagagcttgtgtctggcagagccggtatgagatgagacaatgctgtcccacctccgggataaccaggagttttggccagacttttgagcacataccgrgagagtgaggagccagatgacaagcacatactatggcactaagacagattaataaggaacttagtgatttggcccatgaccctccagcacaatgttctgcaggtccagttgaggatggtatgtttcattggcaagccacaattatgggacctaatgacagcccatatcaaagcggtgtattctttttggcaattcattttcctacagactgctccttcaaaccacctaaggttgcrtgtacaacaaggatttgtcatccaaatattaacagtaatggcagcatttgtctcgatattctaagatcacagtggttgcctgctttaaaactatttctaaagttcttttatccatttgttcactgctatgtgatccaaacccagatgaccccctagtgccagagagcacacggatccataaaatagacagacgtaaaagtacaacagaatatctcgggaatggactcagaagaatgccatatgatgctaccttaaagtcagaataacctgcattatagctggaataaactttaaattactgtttaaaaaaaaaaaaaggctgggcacgttggctcacacctgtaatcctagcactttgggagtccaaggcgggctgatcactaggtcaggagttcaagaccagcctggccaatatggtgaaatcctgtctctactaaaaatacacaaattagctgggcatggtggcgtgaacctgtaatcccagctactcgcgagcctgaggcaggggaatcgcttcacccaggaggcggaggctgcagtgagccgagattatgccactgcactccagcctgggcaacagagcaagactcagtctcaaaaaaaaaaaaaaagaacttccaggaaaagagaactaaacatgtactatggtttatgtatttctacattagatacttcctttaccatcataattttgtattatgttcttttggaatttgagaaaagtagatgagatacaataaaaatataaataattttaaaatgagcaaaggatttaaatagacatttctccaaagaagatataaaaatgaccaataagtacataaaaagatgctcaacatcattagtcattaaagaaatgtaaattaaaaccatattgagatacttgatatccactaggattgctatgataaaaaatgtttttcaactgaaaataactaaaattggcaaggatgtggagaaattagaaccctcatatattacaggggtaaatgtaaaatggcacaattgctgtgtgaactgctgaggcagttcctcaaaagttaaacacagtgataccatccatccacctctaaatatgtacctaagagaaacgagaacatatatccacacaaaaacctgtaaatgaatgttcatagcagcattattgacaatagccaaaaagtagaaataacccaaatatccatcaactgatgaacgaataaaccagcgagattatccatacaatggaatattattcagccttaaaaagaaatcgaacactgatacaggatgcaacatgaatgaaccttgaaaacattttgctaagtcaaagaagccagacacaaaaggtcacatattgcatgattcaatttatatgaaatgtccagaataggcaaaaacataaagacagaaagtagattactggttgccaggggctggggaaggggaagatgaggagtgactgctaagtggtatgaggtttctttttgggctgatgaaatgttatgcaattaggtaggtgacagttgcacatctttgtgaatatattaaaaactactgaatatttttaaatggtgaatagttttgatggtatgtgaattatatctcaatttaaattttttaaatagatgagactgaatgcatcaaaaatgcctaagctaaataaatactaaaatatataaaattctaatacataaaacttaatatataaaatgggataaaggggagcttataacctattaataacaagtttggaaaatgctaagttaaacattttttaaaatcagagtccttaataatatgcattatgaatctcaaagaagaggatagaatatatagtatttctcagacttgaccacattactaaataaaccctaaatgatacttcaagggtcatgctccaagaaacacagtttgggaaataatgattaagtaatatatcaggatccaattacaactgtactaaatcttacctttgctcttgatacttataaaattaaactaaattatctgaataatcacctcacaatagaaaacccaaactattcagataatatatctaccatggtttgaccacttacttagcaaggatagatccttattttctttcttttttgggggggtggggggggaggcgttctcattgttcccctcccacttttccccgcgaacatgcagtgccgggttttctgttcctgtgttagtctgttgaggataatggcttccagctccatccatgtccctgcaaaggatatgatatagttcctttttatggctgcacaatattccgtggtgtatatgtaccacattttctttatccagtctatcactgatgggcatttgagttgatgtaactcaaatgtaacccaaaactataaaaaccctagaagaaaatctaggcaatgtcattaaggacataagcacaggcaaaaaatttcatgttcaaaagcaatcgcaacaaaagtaagaattgacaaatgggatctaattaaactaaagagcttctgtaaggcaaaagaaactatcatcagagtgaacagacaagctacaaaatgggagaaaatttttgcaatctatccatttgacaaaggtctaatatccagaatctacaaggaacttaaagaaatttacaagaaaaaaaaaactccattaaaaagtgggcaaaggacatgaacagacacttctcaaaagaagcaatgtatgcagccaacaaacatgaaaaaaagctcaacatcactgattagagaaatgcaaatcaaaaccacaatgagaaaccatctcacgccagtcagaatggtgattattaaaaagtcaagaaacaacagatgctgacgaggctgtggagaaacaggagcacttctacactgttggtgagaatgttagttagttcaaccattgtagaagacagtgtggtgattcctcaaagacctagaaccagaaataccatttgacccagcaatcccattacttgaaggaatataaatcattctattataaaaatacctgcacatgtacgttcactggagcactattcacaacagcaaagacatggaatcaacccaaacgctctcattgatttttaatgtatttttgttatagtaatatcacaatttcttatcaggttttaggtaataactttcctttgctacaaatagcctcctacagcatttgacttctaattcaaaagctaactgagcagcttccaaaaggaaaatcataacaatgagctggatcaaaaaagtgtgtaatgtgtcaaaaggaaatacactattcctaaataagttatttactaataacaaagaggaagtgatatggtaataattctcaccaaaagaatataatttaatgatgctctaagcaattcttataccatattagtttgtggtcagtctgcagttgcagatagagtctgaaacaaagttggcaattaagtaagaaatcccagctggcagtcatcttaaatttccaatatacggcaggaaatgttgccagcgattcaataggtgacgccccttccctttttcttttttctgagttacaacaaactgaaacaaaattgccccagaagttctgttaccagctaacagaattaaacataaaaattccactgcaatgtttcaaaaaataaaacactgaatctgaaccgacatgaaatattgtttccatcaacatttacataccacgtctgaagcatattaactgcatagcccaatgagtatttctataatatagtcatcatatcttcaacattctaattatcctaagtttacattcgaaagattaattataaacttcaatacattataacaagtacatggaactcaagtaacccataaaaatataaagaaaaattaattttggatgcattggatattgtgaaaattgattatataaattggaattatcttgtcatacccaattaaattacagtcatgagatgagggaggaagaaaaggaaaagaaaagcacttagggcacaagcacctgcccagggattatctggcaagccagctgctgaaatgacctgctataaccttaagatcagttttacctagtagctgcggaaacgaactgctataactctaagactagttttacctaccacagtcactcacaaatcagagcatgccagctcccaaaaacttcgctagtgccaatgcattttctttcaaaacaatgcataacatttctctaataaaaacctcaatcttttctttgttctttggacataccaaagaccaatgcagtctgtgtgtatgcccaaattacaattctactgtctcaaataaaatgtgttgttcagagattcatctctatatttgatttctgttgataatatccaactatattttattctaacacactattttagagactagctataacatcttgctcataataaacatctgaaactagttcaatgagtaaacgtctatatctctgtcaaatcggcatttttacaatacatctgtgcaactcagtgttgagaggggatttaccaaacatacctctctggcaatgttactcaaagcttcatcttctgcagaaaatcggtctttcacaggtgttcttttccttccagaagcaggagtccccatcttgtgttcttaatagtcttttaactttgaaagtgatttaactgtgttttcagccctgaagtaaacaaaaacataataacttaaggtatttctttgtgcaattttcatgctcatttatatattcacttttaacagagaaattagtcaccaaatacctcttcccactaccaaattattccaataaattttagaatatttaattttatactaattactaaaactyctacttcttttcactatgctacccacagcaatctgtgtgtattataatattagcctcagaaagctgccatcagcagaaattctacttaaccatttaaaattactatagctgggcagcctggccaacatggtgaaaccctgtctctatcaaaaatacaaaaattagmcgagcagggtggtgyatgtctgtaatcccagctactctagaggctgaggcaggaaaatcacttgaacctaggaggcggaggttgtagtgagccaagattgcgccacagcactccagcttgggagacggagcaagactctgtctcaaaataaataaataaataaataaataactatagttatttctaaaaccaatttccatcccagaatgaaaaacatttcagaagttattcagcctaaacttttagaagaaaatgttcaagaggttttactactaagccttatagttacaaaagtaactttgctttttagtgtaatttaagaaaaattccaattaaaccatgacaacgtcaggcacggtggctctcacctgtaatcccagcacttggggaggctgaggtgggcagatcacttgaagccaggagttcgagaccagcctggccaacatggtaaaaccccatctccactaaaaattcaaaaattagccaggcatggtggcgcatgcctataatcccagctactatggtggctgaggcacaagagtcacctaaacccaggagatggaggttgcagtcagccaagatcacgccactggactccagcctgggtgacagagagagactccacctcaaaaaaaaacaaaaacaaacagacaaaaaaaacccacaaccatataaaagaaaaaatgaaggtttattactctgcaattaacaataaccaacactgtccatgttgttaccaggtactataggaggtgctaaaggtacggtgatgaagaaaactgatatagtcaaatgattaagaatatatcgccaggcgcggtggctcacgcctgtaatcccagcactttggaaggccaaagcaggtggatcacctgggatcaggagttcaagaccagcctgaccaacatggtgaaaccccatctctactaaaaatacaaaattagcaggacatggtggtgcatgcctgtaatcccagctacttgggaggctggggcaggagaatcgcttgaacctgggagacagaggtttcagtgagccgaggttgcaccactgcactccagcctgggcaacaagagagaaactccttctcgaaatataaaaaaaagaatatatctatgaacctgttactattacttattagacctattttaacaaaaggaagaagaaaaacccatccaccaggattaaataataaggatgaaaaagaccatctaacctttggttagatggtatttgagattaaagattaccatgaaagaatgcaacccaaatttcatgccctcttttcttctatacacattgctaagaagtatagctcatttagctaaatattccrtaacttaaaaaatttttgacttgctttaacaaaataaaccagcaaaatttcattacagtatgaatcacaaagaaattctcaagtaagtctgtcctaacacaattggctatactgaaattctaagtgactttaatgtactggaatttagttgattccggctaaataaagcagaactattccaccaaaaagttttctccaataaagattcaggacattcccaacttatctgacaccatttctcattcatcagagctagcttgttattctgtccaccagaataaagactgatgatggtttattacttttacttcactagagaagatatatctggatatgattattaagaactcatttaaaaatggaaacaccagctgggcatggtggctcatgcctgtaatacaacactttgggaggccaaggcgggcaaatcacaggagatcaggagttcaagaccagtctggccaacatggcgaaaccccatctctactaaaaatacaaaaattagctgggcgaggtggcacatgtctgtaatcccaggtactcgggaggctgagggaggagaatcgcttgaatccaggaggtggagattgcagtgaaccgagatcgtgccactgcactccaacctgggcaacagagcaagactccatctcaaaaaaaaaaaagggaacatgacaaaaggtacttcttaatgtagcagctgatatatcccagatacaaatcagaacaactcctgataaggacagaaaacttttctcagaggtctctaatcatcttcagcataattttaaagattattcacttacctaatagtaacagtgtatacattgctggtggaaatgtaaactagtacaaccactatggaaaacaatatgaagatttcttttttttttctttttttttttttgttgagatggagtctcgctctgtcactcaggctagagtgcagtggtacaatctcagctcactgcaacctccgcctcccgggttcaagcaattctcctgcctcagctttccaagtagctggaactacaggcgtatgccaccatgcccagcgaatttatgtatttttagtagaaacggggtttcgccatgttggccaggctggtcttgaactcctgacctcaggaggcgggtgatctgcctgcctcggcctcccaaagtgctgggattacaggcatgagccaccaggcctggccggaagatttcttaaagaactaaaagtagaactaccatttgattcagcaatcccactactaggtctctaccaaggaaaagaagttattatatgaaaaagacacatacacacacacgtttatagcaaaacaattcacaattgcaaagatacggaaaaaacacaagtgctcatcaaccaacaagaagataaagaaaatgtgatatatatacaccatgtaatactactcagccataaaaatgaatgaaataatgtctcttgcagtgacttggatggagctggaggccattactgtaagtgaagtaacatatgatctcacttataattgggagctaaaatatacagacacaaaggcataagaatgatataatagactttggggacttggtggtgggggcaaggacggctgggtaaggagtaaaatactacacagtgggtacaccataaactgcttgggtgacaggtgcactaaaatctcagaaatcaccactaaagaacttacccacataaccaaaaaccatctgtactccaaaaactattgaaataattttttttttttgagacggagtctcgctctttcttgcccaggctggactgcagtgacatgatcttggctcactgcagtctttgcctcccgggttcaagtgattctcctgtctcagcctcccgagtagctgggactacatgtgtgtgccaccatacctggctaattttgtaattttagtagagacggggtttcaccatgttggccagactggtctcaaactcctgacctcaggtgatccgcccgcctcagccttccaaagtgctaggattacaggcatgagccacatgaccgaaatgaaatttttaaaaaaatggtagtggtgcatgcaaatattagccatctactaaaaataagcaacatgcaatgcaatgttccttttcagactagattgacaatttagtgaatgcactatggtatcatccaatatttgtccatcagtcagctttccaaggacacaatgaaagatatttcacagaagcaggaaacaaaaatgtaagcattttctaattccagacacataaaaatcattagagaataaaaatagatttggctggaagtatatcaatagtttaacagtggtttttttaggaagataggattatggatgcattttttcttaattctctaaaatttcaatagcattaaggaaaaagagatgcattttaaaaccaggcgtggtggctcacatctaataatcccagcactttgggaggctgaatcaggagaactgcttgagcataggagtttgagaccagcctgggcaaaaccctgtctctagaaaaattttaaaaaaattagccaggcatggtggcacacgcctgtagttccagctacttgggaggctgaggtgcaagaactgactgaccctgggaggtcaacgctgcagtgagccatgatcactgcactccagcctgggtgacagagtgagaccctatctcaaaaaataaataaataaaaataaaaacattccaatctaaggctcaaaaaataaactagtccccaactggatcacatcaaaattaaacataatatgccatactactgagacactaatctgaaaccacttctggtagcattcttttgaatgtacttctttcttttctttctcctctacccccatgatccattttctttccttctcaactaacaatgcctatgccttagacctgccagagtattcctggaccacagatttatgtaaaaaattattctttcttaaaattgcttccaaacaaaatggtttcaacaagctccagaatagacagccctgagaaagagatgacaggaaaaagcagcacaggataagcaggaaataggaagaacttcctgtctatcttccttattcttcttgtcatatctacagagaacacctaggtttttatatgactgattggccaggtccagttacctttttcagttcacatgatgcagatcaaggactacctagttcaaaggataacctagtacttttaaaagaactgtattatttggaccctgtaggcagatttccttaccaatattagaaaaatgaccagactaggcaacatggtgaaattytgtctttacaaaaaaaaaaaattatccagacatgttgacgaacacctgtagtcccagctacttgggaggctgaggtgggaggactatgtgagccaagggaggtcaaggttacggtgagccgtgataataccactgcactccagcctgggtgacagagggagaccctgtctcaaaaaagaaaaaaaagaaggaaagatgaaaggtttttccgttctcatgcaatctattttctagtaactccaggtcattctgtatcagtgatggaggaaaccttgaaaggaatacgattcttaacatagccagtgggaaacttttcaacaaaatgacaaaactgagaatgtagactcaaaggaaaccttaaataattttgtttctgatcctaaaggacttgcagtaaatttctaccctaaggtttcctcaagaacmcttttcttcaggagcacattaactccttccagtgtttccttggtggtatcaaacaacttaaagaactaaaccttttcctcaattggtaagaacaaaactgcctgtatttttgtcaagtcctttacccacatagtgtcaagttgattttccccagatggttttgtcatgacatattttacttacagaaaagaaggaaagtatcttcaggatcttgcagaatataaaccttccaaaacagacagatatttcaataaggctttgtcttctccaatgagcttctcatataatatacgtctgaaacaataggcattttgccacagtaaaagtggcacttcaatcatgatattgtccacttttgtaagaacagaatgtgcatgtagcatcagtatgtcacattctaaatacaggacacttagaaagttctgtgcctaatctggatcctgatagatagttcttttatatctaagtattgcatcatggagaattcaaaatattgtcctagtatgtctttgcatcacagctgccattacagtgaacgctagtctgcacaagaaaacatttcatagttattcataaacaaatcccagtatatggaattgtccctgaactaaagacttagtgtgactgcagttgttgccacttgacaaaacttaaaatgagaagatccaagttcaactgattgcactaccacttcctgtgttaccctccccactttctaagcctccatctctttatcagtttcactgatataacatggttaatgtgaagctcaaatgaattaagaaaaatccaagcacttaataaactataaagcactccataaatatttaaagcattttgaattaactacctattttgcatatttagcttgtgaaattgacaaaaaaaaagcaatccttttcatacttttaactaaacaaaaatatcctcgatttcctccagcatgcactgtctaatagcattaaaccatgctaagagtttctgctatagtatagaacaatttggaaaaaataaatgccttgactataatcattttgctgtctagcacatgtatacaataaaaacaaaaaaggagaaatttttaaggtactttgtattcaaagtttacttctaaaactgccaagttttgggagtgcagccttacaatggttatgctagtcctcttagtagaacacaagtgacttgaaacagaagatagagatcattaaatgttctatttaaaatatttgcatattgttctatgtaaattttacctcaaaagaaaaaagtcctctacacaaatattaaactctagccaatcatgtgcatgctaaaatatttagggttgaagtgtactgagatctgctactttaaactgcaacaacaaaagataaaatgatgaaatccagatggtaggtacatgagtgttcacagcacaactctttcaatttttctgtatgtttaaaaaaagtttttttttggagacagggtctcccactctgtctcccaggctggagtgcaatagtgcgaccttggctcactgcaacctcggcctcccaggctcaggcgattctcctgcctcagcctcccaagtacctggtacaacaggcgtacaccactgcatttggcgaatttttgtatttttggtagacacagggctacaccatgttagccaggctcatcttgaacccctgggctcgagcaatccacctgcctcagcttcccaaagtgctaggattacagacgaaagccaccatgctcgggctatgcttaaaattttttatcatcagccaagcatggtggctcacacctgtaatcccagcactctgcgaggccgaggcaggcaagttgcttgagcccaggagtttgagaccagcctagaaagcaaagtgaaactctatctttaaaaaaaattttttttttaattttttataataaaatgttggggaaagagtaactgcttaagaaatgtggatgactagggccaggcacggtggctcatgcctgtaatcccagcactttgggaggctgaggctggcagatcatgaggtcaggagatcgagaccatcctggctaacacagtgaaacccccgtctctactaaaaatacaaaaaattagccgggcgtggtggcaggcgcctgtagtcccagctactcgggaggctgaggcaggagaatggcgtgaacctgggaggcggagcttgcagtgaacctagattgcgccactgcactccagcctgggcgacagagcgagactcagtatcaaaaaaaaaaaaaaaaaaaaaaaaaaaaaagaagtgtggatgactaggtgaaaaaaaggcatgggaattaggaattgcaattaaaaatctagagtggaaaaraaaaggaaggcagaggtaatcatagcactgaagaatacctagtagttacatacacattaaaaataaagattatgcggggtgtggtggctcatgtctgtaatcccagcactctgggaggccaaggcaggcgcatcacctgaggttgggagttcaagaccagcctgaccaacatggagaaaccctatctctactaaaaatacaaaattagctgggcgtggtggcacatgcctgtaatcccagctacttgggaggctgaggcaggagaattcctggaacctggaaggcagaggttgcagtgagccaagattgcaccattggactccagcctgggcaacaagagtgcaaccccgtctcaaaacaaacaaacaaacaaaataaagattatggcaggtcactgtggctcatgcctgtaatcccagtactttgggaggctgaggcaggcggatcacttgagcccaagggttcaagaccagcctgggcaacatggagaaaccctgtctctacaaaaaacacaaaaattaaccaggcatggtggcacacacctatagtcccaactacttggaaggctgaggtggaaggattgcttgaacccaggaggtagaggatgcagtatgccttgatcacaccactgcactccagcctggatgacagagtgagaccttgtctcaaaaaagtaagataaaataaagattatgggcaggcagaaaatggctccaaccagaagaggaaaacaaggaaagtaaagggagaggaagacaattaagaaggagagggaggagagagaggggaaaagaggaaggagggagggattacagttaaagacatcaatcctgcaaatatctaaatgagatcgttacataaaatgaataaatcattagcaaaacctacagaaagaatatagaaggtacattcagaaattgaggcaaagtacaaaatgaaaaaaatatatacaggcaaaactggagaacttggcaaaacaaggaaaggcaaatgctaaacacaaactaaatgtcagaagaacattagaaactataatggttaacttacaactcatactttataaagagaaatgcttacaaaggaagagaacctatataattatttctcctacttttatagtcatttgtcctaagaattatcaaaaatatttttaaagtatcatattttgactacccactatcctcatrtctccaacacaactgataatctttccatttcctcccttcatataacatgccagtggttgcatttctttacttggtagttatgttattctataaatgaacattaatgggctatatgttggacataaatctttatactatttcatcaactgtgcagaacccaaattaggaagatagactaaacaattcacttatccgtattttctgagaagcaaaccactttctagtaccattcaaatagcctcctttcttgataccttttaaagtatctcagagatgtatggacatacaatcagagtataaaagaaagggagaccaacaattacatattgctgagagtaggaaagacttaaaagtgtgaaacaggccaggcacggtggctcatgcctgtaatcccagcactttgggaggtcaaggcaggtggatcgcttgaggtcaggagtttgagaccagcttggccaacatggtggaaccccatctctactaaaaatacaaaaaatagccaggcatggtggcacatgcctgtaatcccagttacttgggaggctgaggcaggagaattgcttgatcctgggaggcagaggttgcagtgagccaaggtcgcatcactgcactccagcctgggtaacagagcragactcctctcaaaaaaaaaaaaaagtatgaaataaagcagaaaacaggaaaagactagaagtattagaaagaacaatataagcctaggtagcaaagaaccaaagaatcaagatgaaacaaaaagtaagggaaatgggaacacatgtaacaaggatataatttttcaatattaaaaaaatgcaattaatatgaaggaggctctaaagctagaaattttcataaagtaaaacctatcacatacctttaatttttcccttttcaacaaatatttactgagaatttgcaaggcactatttatatagcactgtcactgccttctcagtaggcaaaagagaatactgggaaaataaaagtaaagagaccagagagaaggtactctgaagcacaaaagtttttattttgaagaagtccaatttatccatttttttcttttgttgcttcttttgatgtcatatccaagaaacctacctcaaggccatgaagatttatttttacattttcttctaagagtttcagttttacctcttatatttaggtccatgatccattttcagttcattttcatatatggtataagacagggatccaacttcacacttttgcacatggatatctatttgtcccagcatcatttgttgaaaagaccattgtttctcccactgaattaccttgccacccttgtcaaaaatcaactgaccataaaagtaagggtttactttctggatacttaattctatttcattgagctaaatgtctatcctatgccagtatcacaccatcttgattcacatagctttgcagtaaattttttaattggaaaaagtgagtcctccaaattttttgttctttaacactgtttggctattctgggccctttacattcccatataaattttagaatgagtttgttactttctcttttttgttttttttgacagagtctcgctgctggccaggttggagtgcagtggtgcgatctcagctcagtgtaacctccttctccctgactcaagcaattctcctacctcagcytcctgaatacctgggattacaggcatgtgccaccacgcctggctaatttttgtatttttaatagagatggggtttcaccacgttggccaggctgttctcaaactcctgacatcaggtgatccacctgcctccacctcccaaagtgctgggattacaggcgtgagccactgcacccagcctgagtttctcaatttctggaagaaaaaaaaaaaaaaggaaagaaaaagaaggggaggaaaaaaaggcagctggggttttgacacaaaaattagccaggtatagtggctcacacctgtagtcccagctacttgcagggytgaggcaggaggattgcttgagcccaatgagtaagccctatgcgcaaaaaaaaaaaaaaaaaaaaaaaaaaaaaaattcacttaaaagtctttaattaagtagttagacctccaggtcccctttccattgctaggctattacctcagcttcaacttcatctcctattctccaggayaccagaagttctagaagacaaaggggctctggggaagggaagggtaagcaatgggaacagggagggagtaggaagtgtgggcttaggtgaaagtatgcattttgaaatgtgggactgcttcagccccctttaaatcacccatcctgctaccaaaatatataccccttttcgagggaggtcaaaattgaccaaccccacctactttcaaaccaagaagtctgtgaaaacccactaactcagaagaataacttagtgaaaataaactacgcagggagaagaaaacttcaaaaataaccatcattaatatcttcagaaaattaaggcaaattatagccatgaaacaagaacaaggggctattaaaatattcagagaacagggtcgggcgcagtgtctcacacctgtaatcccaacactttgggaggctgacgcaggcggatcacctgaggtcaggagttcaagaccagcctgaccaacatggtgaaaccctatctctactaaaaatacaaaattagctgggcgtggtggtacatgcctgtaatcccagctactcaggaggctgaggcagtagaatcactttaacccaggaggcagaggttacagtgagccgagatcacgccattgcactcaagcctgggcaacaggagtgaaactctgtctcaaaaaaaaaaagaaaaaaaaattcagagaatacaagatcttggaaattaaaacatgacagtagaaattaaaaacacaacagaaataatcaattccactctatactcaagagaattgaaaacttatgcccacacaaaaacttgtaacggaatattcacagtagcactactcctaacagccaaaagtgaaaacaattccaatgtccatcagctgatgaatggataagcaaatgcggcatatccataaaatggaatattacctagccataaaaacaaatatattgggcctgacatgatggctcacgcctgtaatcccagcactttggaaggccaaagcaggtggatcacttgaggtcaagaattggagaccagcctggtcaacatggtgaaaccccatctactaaaaaaaaaaaaaaaaaaaagcaaagattagccaggcacggtgggacacatctgtaatcccagttacttggaggctgaggcatgagaatcacttgaacccaggaggcagaggttacagtgagccaagatcgcatcactgcactccgtccagcctgggcaaaaagcaagactgtttcaagaaagaaagaaaaaaaaaggaataaagtattgactcgtgctacatacaacaaggttgaatcatgaaaacatgagaagtgataaaagccagacacaaagattacatattgaataacttcatttatgtaaaatgtccagaayaggtaaatccatagggacagaaagtataacagactagtgctttccacaaagtctcgggtaaagaggaaatggagagtgactgctatggtatgaagtttccttgtaggggtaatgaaaaccttctggaattagggctgatggctgcacaactttgtgactacactaaaaaaccactgaaaaggtcactactttaaaggggtaaattttatgacacacgagtagtacctcaataaaaaaattagttttacaaaactcaggttgggaaataaagttcaagaagtcttacagaaaacagaaaaaaaaaaaaaagagagagaggtagaaaataagaaagaaaaatatataaggttaaagtatcagtccatagggacyaacgttcaaataactggagaaagagaaaacaggctgggtgcggtggttcatgtctgtaatcccaacattttgggagaccaaggcaggtggatcccttgagctcaggagttcgagcctggacaacatggcaaaacctcctctcatctctatcaaaaactacaaatattagctaggcgtggtggggactgaggcaggagcatcgcttgagcccaggaggtcgaggttgtagtgagtcatgttgatgctactgtactccagcctgggtgacaaagtgagaccctgtctcaaaaaaaaaaaaaaaaaaaaagaagagagagagagagaaaacaaaaataaattattaataaaataacttcccagaagttaagaacatgaggtgccagactaaaagggcccagagtgttcaacacaagtcctgagttcacaccaaggtatatcttagtgaattttaaacaatgagaacaaagatgactttacaagcttccacagggtaggaaagtcaggccacacataaaagattaagaatggcttcaagactttcaaaagtaattctggaaacaagaagatgataagagtgatgccttcaaactcttgaaggaaaattatagacaatctataagtagcctataccagtcaaatccctctttttcatacttgattattaaaggcattttcagacatgaaaggtctcaaaaatttacctcttttacactctttgtcaataagctactagaagataggcttcagcaagtaaaactgaaaaaccaacagagagggaaacttagcatacaggaaataaatcaaacacagaagaggggcaaaagggaacctccagaagaatgataggtgtatctcagaaagaaagctacagattggagcaatatgactcaagagacataatgaaggactgtcattaccaaaatccccacagcctttggggcacatccatttaacatgagatgtgcctggtccaggttttcattggaatttagtttgtcttgaccccgtgttgataaagttcctggagcctagatgggctgaagacttatttcacagcacagacatgttttgcttttccttattcttgagagctaaagcgtgataagcttagcttagaagcaaaaccacatagagcaatctactctcccaatcacatttcttctagatatttaccgtagtatcttgtaaacactttagttttgccagattccctgactgtggggagcctgtgtttctccagactcaataacaaactttcccaatgacttatccaaaaaagatcaaggaagactcttttcagcttatcttctgagagctttcatctaatagcagcagtatgtacctttcctttcacagcctcagttgatgcttgctattcagttttccaaaacaaaatgatatatttcttagggatacataccatggcagagattggctcattgttgaccaaggcgttttccctttccttccttgcagttaagtgtagccatttgactcagttctagccagtggaatgcggacaaaactgatgtataccacatcctggcctggcccatcaaactttccatgcaatctaccacagtccctctctttgtcctcgcatctgccagccagatgcaggaaattcaaagtctctgaggccccagtgggtggyagaatcactagctgaaagcagcctgagtccctcaatgactctgtggaacagaccaccactctgtcactgcttttcaactcacagcaaagatgtgagtgagaaataaattttgtgttaaaaaccactgatttggtaattattcattaaagtagttcagcctatcctgactaacagayttagagaggtagtagagctttttggtttttcaaaattaaaaattttggccaaaaatacatgtatggacatggaggatattgcaggcttgagcagagaatggtcccaagagaatgactaatatgttaaaataggcttgtgatttcctggaagggagggggtgccattaaaggatatcttgaggaaacttctaggataaatgtaacatgtaatttcttgacctaggtagtgagaccacaggtgttcatgtattcttcttcctaaaactgtatttttgttttatatttctctatagttcacaactaattttatgcaaaataaattcgttttatagcttataaattgatgttataagctagaatggatggatggatagatacatagatagatgaagactcttgaaaaatctgttggcgcatttagggggaaagcaacaggtaaacagaaaattatgtaaatgtaaaaggcaaattttaactccctgaaaaaacaaagttaaacaagaaaggaaacaagtatgatatacyacatggctgatcagtaaacaatatttatttcattataatgaaaacaccaactattgatttaaaatttcaaaattggaatgttgcagggagggaaagtgggatgaaatagtgaagaaatacaaaataacaataaaaccaccagtaagtcccaccatccgaagatactcctattttaataacattattttttaaacaaaaattggttaatatggcagggcatggcggctcatgcctgtaattccagcactttggaaggctgaagtgggcagatcacctgaggtcaggagttcgagatcagcctgaccaacatggtgaaacccatctctactaaaaatacaaaaattagccaggcatgcatggtggcaggcgcctgtaatctcagccacatgggaggcagaggcgggaaaattgcttgaatgtgggaggcagaggttgcagtgagccaagatcatgccactgcactccagcctggatgacagaaaaagactccgtctcaaaaaaaaaaaaaaaagttcctaaaacatgctattttgtaatcagttatggtagacaaattctaaggtggttccccaccctaatcgcccttcctactgttcacacctttgtgtaattacttcccccatgaatgtaggtgggtcctgtgacttacttctaaccaacagaatatggcaaaggttatacaggatgctactcccataactatgttacattatataagactgtcttccagcctggtgcggtggctgacgcctgtaatcccagcactttgggaggccgaggctggcagatcacgaggtcgggagatcgagaccatcctggctaacatggtgaaaccccatctctactaaaaatacaaaaaattagccaggcgtggtggtgagcgcctatagttccagctacttgggaggctgaggcaggagaatggcgtgaacctgggaggcggagcttccagtgagccgagactgcaccactgcactccagcctgggtgacagagcgagactctgtctcaaaaaaaaaaacaaaaaaacaaaaaaaaatgaactgtgcatgtgagggatctaggttgtgcgttccttatgagaatctaatgcctgatgatcatctgagatgaaatggtttcatcccgaaaccaacccccccacccaccccacccccgtccatggaaaaattgctttccacaaaactgaatcctggtgccaaaaaggttggggaccactgccttataccatatagaaaagttaactcaggggtcaggcatggtggctaacgcctataatcccagcactttgggaggccaaggcaggcggatcacctgaggtcaagagttcaagaccagcctgaccagtgaaaccctgtctctactaaaaatacaaaaattagctgggcgtggtggcaggtgcctgtaatcccatctactcgggaggctgaggccagagaattgctcgaacccaggaggtggtggaggttgcagtgagcccgagattacaccattgcactctagcccgggcaacaagagagaaactctgtcacaaaaaaaagaaaagaaaagaaaagaaaagagaaagaaagagaaagaaagaaagaaagaaagaaagaaagaaagaaagaaagaaagaaagaaagaaagaaagagaaagaaagaaagaagaaaaaactcaaaatggatcaaagacctaaacaaatgagctaaaaccataaaactcgtaggagaaaatatatgggaaaaacttcatgatattgaatttggcaatgatttcttggacataataccaaaagcagaagcaacaaaagaaaaggtaagttggatttcatcaaaattaaaaactctgggcagggcgcggtggctcacatctggaatcccagcactttggaaggcaggcagatcacgaggtcaggagttcaaggccagcctggccaacayggtgaaaacccgtctctactaaaaatacaaaaattagccaggcatggtggcgcatgcctgtaatcccagctattcaggagactgaggcaggagaatagcttgaacccaggaggcggaggttgcagtgagccgagattgggccactgcactccagcctgggcagagcaagactccatcttaaaataacataacataaaataaaataaaataaaataaaaacaaaactgtgtacatcaaagcacactatcaaaaagtaaaaaggcaaaccacggaataaaaaaaaatttgcaaatcacatagctgataaaggattgatataaagaactcctacaactaagcaacaacaaaaacccaattaaaaagataaaagacataagtagacatttcttcaaagaagatacaaaaatggtcacatgaaaagatgctcagccgggcatgatggctcaacatacgtaatcccagcactttgggaggctgaggcaggagtattgctcgagcccaggagttggagaccagcctggacgttgcttgaacccagagttggagaccagcctgggcaacatgtctctacaaaatataaaaaaaaagaggcaaggcacagtggctcatgcctgtaatcccagcactttgggaggctgaggtgggcggatcacctgaggttgggagttcgagaccagcctggtcaacatggagaaaccccatctctactgtaaatacaaaattagctggacatggtggcgcatgcctgtaatcccagctacttgggaggctgaggcagaatcgcttcaacctgggaggcagaggttgcagtgagcagagatagcgccattgcactccagcctgggcaacaagggcgaaactctgtctcaaaaaaaaaagaaacagaaggagaaaagaaaatcagctgaacatggtggtacatgcctgtggtcccagctactggagaggctgaggtgggaggatcattttagcccaggaggtcgaggctgcagtgaggcatgattgtgacactacactccagcctgggtgccaaagcaaaatcttgtctccaaaaaaaaaaaaaaaagaaagaaagaaagaaaagaagagaaaaagaaaagatgcacaatgtcacccatcaccagggaaatacaaatcaaaaccacagtgaaataccaccctattagagattttattttaaaaataatcgatttttttgtgttagaaaacagggccaggcacaagcaggccgggtgcagtggctcacgcctgtaatcccagcactttgggaggccgaggcgggcagatcacaaagtcaggagttcgagaccagcctggccaatagggcgaaaccccgtctctactgaaaatacgaaaattagccgggcgtggtggcgggtgcccatagtcccagctacttgggaggctaaggcaggagaatcgcttaaacccaggagggagaggttgcagtgagccgagatcgcgccactgcactctagcctaggcaacagagcaacactctgtctcaaaaaaaaaaaaaagaaagaaagaaaaaagaaaaaaaaaagaaaacgggaccaggaacaatggctcacacctgtaatcccagcactttgggaggccaaggctggcggagctcaggagtttgagaccctcctgggctaatggagagacctcatctctacaaaatatacaaaaattagccaggcatggcagtgcacacctgtactcccagctactcgagagactgaggtgggaaggaacacttaagcccgggaggtcaaggctacagtgagctgtggtcgggccattgcattccagtcttggtgacagagtgagaccctggctcaacataaataaaaatcaatcaataagaaaacagaaaatagtaaatgttggcaaggatgtggagaaactggaacccttgtgcattgctggtggtaatgtaaaatggtatagccactgtggaaaatagtatggtggtttctcaaaatattaagcatagaattaccaaatgaaatttggtaattatcaaattactagcaattccacttctgggtacatacacaaaagaattgaatgtggcactcaaacagacatttgcatactcatattcatggtggcactattcccaaaagcagaaagatggaaacaacccatctatcaaaagatgattaaacaatatggtataaacatacgaaggaatatttttcagccttaaaacaaatgaaattctgatacatgctatgacatggatgaatcttgaagacatcatgctaagagaaatgagccagacacaaagacaaatattacataattccatttatacgaggtacctggagtacacaaattcatagagtcaaaaagtagaacaatggttaccaagggctatgggcatgaggtgatattgtttaatgggcagagcttgtttaggatgatgaaaaagttagggagatggatagaggtgatagttacacaataatgtaaatgtactttataccaccgaattgtacacttaaaaatggtttaaatgataaattttaagttatgtacacagtcatgtgctgcataaggatgttccagtcaacaatggattacacatattacagtggtcccataagattataatggagctgtcctatacacgtgtgcccttttaagagatggggcctcactatgttgcccaggctggaacgcagtgcctattcatagatgtgctcatagcacactacagcctagaactcctgatctcaagtgatcctcctacctcagcctgagtacctggaattacaggtgcacaccaccatgcctggcctattttctaatcttttatatcatattttaactgtatcttttctatgtttagatacacgaaaatttaccactgtgttataattgtctacagttatagtattcagtacagtgacatgctgcacaagtttatggcccaggaaccacagactataccatatagtctaggtgtgtagtaggctatactgtccaggttagtgtaagtatactctatgatgtttgcttgacaaaattacctaatgatgcatttcccagaacatattcctgtcattaagcaacaaatgactgtattttaccataataaaaatatttttaaaaaaggtcaacagagtaaattttatgttatctatattgtaccacaattttaaaaacaaaacaaactttatttgattgcaaaggatgaatctggcaagacaagaacaatgccctctcatttccttgactgytcacctagatacagcattatctgtgacaagggaaaaaacatctaatctaaagctgaatttttttctacatttagtcctataatccttaggtcacttaactgggatactcactttttaaaaaaagcaatgctatatattcagtttgttcatgatttaagccatttaacagggaaataaatattttaacatcctaatcctctgcatacagtacggtatactctaacttacaaaacagaaagccaaaagatttcttstagctgttaatatatttctacttaggaaagtgggcatgtaaggaacaacatgctcagaacagtaacataaaaattaaatttgcttccctaaagcagtaaagatatctgttatatcaaaagtagttaaaatgtggtaatgaaggaacactaagatatacagggttcaaaatgaaaacaatggaaaaagataatccatgattctttaatgaaggtgtttatattccacctctgagaaagcaccctggtatgtattccaaggcttttcccagctctttaccactttctttcactgctgctttttatttcttttctttttcttttttttcccgaggaggaaaggaaggcagagacagagaagggaaaataagataatgggaataaactgataaggaagaaagaaaaactagtttattttttctcctcacactgaatcctaaatacattatcatcatcatcattctcatcatcataaatgtgaacagctgcaaataactgaaggcaaaggaaaactaaatttcctccagtcacaacctaatctaaagcaaaaaagtgggggkggggaggtccatctgcaggcttgcatctgtaaattaagtttgtatgctgaattcttcaaacaatcttgaccgtaatacaaagctgctgttaaatatggtgacatgaaccttggtctaagggtggaacactaagttctttcaacagctttctagcctaagaagtgacatcagttaaagaactttaaacccaagtgtttcattcactaagtataaacaaatcaaggttttcataagacaccacatagtacaaactaagagtttaaagatataacttcatgatactatayagtaccacaggaaaagcagaatgagaatttgggaagaagctaatttatctatctgaacttaaaataatcctgtagcatagtccattattccaagagtccttttgatcttaacgacaaatacgaaggtctctgaattggactgctattttaactggggccctccctatgccagtaacaataatgctttttccctaatgtaaaacatttgaccgattcttggcaaacactctcatataaccagaagataacatcaatgctggcacaatcctatgctctttcttgtgcacctttttctaaaaactttcctcctggacgggcgcagtggctcatgcttgtaatcccagcaatttgggaggccaaggtgggtgaacgatgtgagcccaggagttagagaccagcgtgggcaacatgcggacaccccgtttctacaaaaaatacaaaaattggccctgtgtgatgatgtatgcatgtagtctcagctacttgggaggctgaggtgggagaatcacccgagcccaggaagtcgaggctgcagtgatctgtgttcataccactggactccagcgtgggcatcagagtgagaccctgtctcaaaacaaacacacaaacaaacaaaacctttattccttagctttccttaataagaggaagaagcaggggaggaggaggtagcactaaaaacttggatcctcggatatacgggctaagtagttgttcaccccaaaacctagccttaatcttctgaaggcaaaatgtcctttataactcccccttctgtgcttgccactgatcctaaaccgcaggccttcctgacttgcaagaggaccaggccagattatggttatgtggtaggttctgtcaggcaagctttgacaaggtctcaaaatagaccctgggcacaagccagggaagctgccactcatgagttccgacttcatcaaactatagcccttcagtatgtaattttttttttttctctctagtgtctctctcatttcaaaaaggcaaagaatcctgaacctcctcctggccacaagtaacctatataacatcaaacctaagcctcctttattctgtttacaaaaactttgcagaataaagattgaatctgtacctccttcctgccttgagaaagtaatccatcaaatagcactctagtttgcaaaaggatttttggatctcaaactccatagaggtttattttattatgtatagattaggatgtggaaggtaaaggaaaaaaggaggtagattatttacttctttcctgactaataatatagtagccgacttatgcagggmaagaatttaaactatacacaatgcttttaattgatactggtcataaaattctgaaacaatcaacctacttaagatgtagccatttaactattatcaaatataaatgcttctatatgacagtaccagtcttcaaaccacaatatttctacttttaccaatacaaataaaattaatcacctgacactcaaatgtttttaagtaccttataaaataatttgcaatattttttaaatggagagatggataaagaatacaaagtaattaagagctcctttccccttccacaagcccaagaaataagttaaattctattataaataaagccaacatgggattgaaatagttttaacttttcataacttcagtctcaatcttacagtcacactttgaaaatacattctgtatagatactaactaatgcaaagacttatatatgtattgttcattacagcagtgtttgtagaaggctaaaaacaacctaaatatctgtcaatagaaaatggtaaaataaattacggaaaatgaataaattatggttcatctacactagcaaggcatgcggtcttttttaaaaaagtaagaaatatgtgctaaatacaaaaagatcttcatatgccaaagataagaatgaaagatacaatatatttctcctagacatatgtgattgaatatggttgcttggattggggggttggggtaaggaaaggctgggagtttgtggtggaaagcagactttcttttcatcatataccaccttttaaaatgttttatcaatttttaaaagtcccataaacatctactgaacccatgaaataagcattctccttctataatgccatttcttccccttccctaattatctctacttttatctactgctctccctaccactaggctaaaacaaatgcatacatatgttccctatgaagtggaattatctcttgacctccccatcaaaataaatgaataatgaactaatgaagaagtataacacatgatcaacccagtttttagcctagttgtttgactcctttgaagtccagcataatttattataagccaaaaagttcacaaggcaagttttgttcaattccttccttctgaagttttaaaagttgagttttattggccgggcgtggtggctcatccctgtaatcccagcactttgggaggccaaggcgggcagatcacgaggtcaggagatcgaagccatcctggctaacagggtgaaaccccgtctctactaaaaaataaaaaataaaaaattagctgggcatggtggcgggcgcctgtagtcaaagctactgggtaggctgaggcaggagaatggcatgaacccagaaggcggagcttgcagtgagccgagattgcgccactgcactccagcctgggcgacagagcgagactccacctaaaaaaaaaaaaagttgagtttcatttatttattcttgagacagggtctcaccctgtctccctggctggagtgcagtggtgttttcagggctcactgcagaactcatgtggtcttcccatctcagcctcacaagcagctgggactgcagggacacaccaccagctaatttttttgtagagacagggtctcactatgttgcccagactggtcttaaactcctgggctcaagcaatccttctgccttggcttccaaaagttgagttttaaatgatgatcacagattatattctttatttgcagactgaacaaagtagtacattttccctattaaaggaccatctctcaatttagatgttccacatagaaagcaactacctaaaaggaaaaagctacgaaacagcctgtattttgcaggtgcaatggatgatgatcctaagataaagacagaagaattttatttccttctgaatgatcctcatcaacattcccagcacactgcaagaattatttttttctatatatcatcaactctgttgcttctcacactaggaacagggtaaacaatccacaaagagttcttcaagaaattgctccctccctcttgctaaattcatttctaataaagatttgtttttgttttgagagacagagatactttgccaaatatattctccatattaccttttcctttcgttaacggagatacttaaatcctgacctaggaaggtttcccttgcatatttacctatcaagactgtcagttacggtgatttccaaaagggattttccaaaagggaatctgtgttcacagggaactgaaactcttaagtcactatttaaattagctggacaaaaatcaaaagcaacattagggaacactctgaatataatggatatccaaagtaaaaaaaagatgccaaaatttagtgaaagaagtaaaggaatttagtaagctagaccaacaggatagacttgccattattttttaactaaagttctttataaatgaaaatcaaggtaaaaatcagctgaactctaacagaaggaaaagaaaaacaagggtaagggtattaagaactctgtgatttcaaccttattttacttaacatttttaaagtcaaaaatgagcaaattacatttcagcaataaaaagctatttctagtttaaagtgaatccattccaatcacaacttcaatacacactttcttctagaacagaacttaataactcatgtagtttcattctacatttttaaagacagaatcacaaaaatgggtgatgctttccactcaaaagactattttgtatagtgcaaattctttcagtgaacattttcataccttagtgatggtagctctcctytccactgacatttacatctagaccccttcatttatcttcccacatctggcaaaaaaaaaagggggggaaggagtaaaatcaaagcaatcacttataaaccaacaaactattctaaattccagcattctgcaaatacttcaacttttatttcattaccattcttcacgatgataaatatccagcaacagacctaacaaaacataatacaacacttcctataaaatgagtaaagaatgccatctcattaggcagatacgaacttaggtttcctctatttcaattttcagattcatagcaatgattcacaaagtgagtgatctaccttcgaaatgaatcacactttctgaaattcttattctacatattataatactaggtcattatctctgcatctgttaaacagagcatgacgttggttaaacagggttagtgctgcaagatattcaaaccacaacaaccgtggagtccctgccaactaattctatttgcaacactgcattctccaataactgcactttttcatatagatttatcctcaaaataaaatgttatcttgaaaaaatattattttaaacactgattaagaacttatacatccataccccgctctccttctctcttgtttcattactacatccacattctcttcccattatgacaacataaaaaaattaagtcacctttatccttacatatcatttttagtcaatcaatccactctacaatttttctgtttatagtagaaacgctgagtcactaaatggaaactcaaagaaaaccagctactaacagttaaggtttaggatacaatatttatctagccatgtctcagcagcctgtatttgtatctcccacggtgaaaaaagtaaagcaaacacttgaacttttttccctctaagaaagaaaaagaagtgggtttccttaggtcctcctgcatgctgctggttactcacaggcagggctgactggagttctgtaacttaacaatctgggtgtcaataacgcctcrtattagtcaagtattaacccagctagcgcctgttaaacccgcgcgatccagctcaggtcaaggaggaagaagtaaaattcccaaaaaatgctacgccctacaccgtcctgacaccgttccctgggggtgctcgtcctgggacagaaccgtagtgtggcgtctaaggaggaagagaaggcgcctagggcacccgaaacggagggacagctgcccaatttaatttctcccacagtgggaataacacgtaccttttccccagcgcggtggaagggtgagcgttagaaatcagacgggatgtctgagaacgccgcaggcagggggcgaccccagcccgggagcccgccgcgggccggccagtccccagggaagcccggccccctagccgaggtcggaggcggcgcggatcccacgggactgcggaggccgggaaaaaggttcccaactccccgctccctgctcccaccgggctggcgggaggagcggcccttacctgtgttagggcgcgcgctgcgactgcgtcgctgtccgggaagggccgaagagctgctcgcccgcccggcgcccgctggggctatgggcgaggggcgcagctggacgactcagtcctgggtccccggccaggcgggcggggatggacgcggcggctcccggcactggcagccggctagtcggtcaggccgatgtgccctctgcgccgcggctgagacagcgggaaccggccccgggaggagccgcagcctgagcggccgactgaggaggcgaaggatgggcggggccacagggtcgacgacccactcacccggaagcagttgtggccgcgactgcccgggagtggcgcttgccgcggtccgggcttgcaccccgctgggcaaagtacccggggctgtcacacggcgagctgagccctgggccggcgggtgaggttccccaagcggcgatgcccctggctccctgttccgccattgcgagccgttagggccaagctggagggagggcggcgaggcgcggctgccggtagggcggggccctgggctgctggcggggcggaggccggaggcggccttgggcgggtggcttctctgggtcccacggttcctgcccaggctcttcgaaccaggaccagtgcgggtaatgtgaattgacacttgttccggttcagggctgccccacccctggttgccccaaaccctgcggcctggtgggcttgggcaagtgggctggagtagcgctctgttaggaaacgagtatgcgagggagggagggtgggtgtggtcgaaatgcccaagcctcgtttcaaaaatgaagacgcatgaccttaaaattatttctggagaagaatgcttgcgcgagaggtgtgggggggggggcggggagcgggatggagggaggagtatagagtcygttaaaaatctgatagacacggacttgttatttattccggaaatatctaacgaggcccaccaggttcaaggcactggggaaggaccagggtcgtgcatttgaaaagcttaccttagtggaatagackggctgaagcaaacaaacaaggtaatgacaggtgtagtatggctttgcaggaaacacacagagtgatgaaaaagattttgtagaygaagcctctggctggataggatggctaaaaaagacctctaggaggaagtgatagttgaggagcctcctgacaaaaaaggcacgaaatacacctaaccacgactttacatacagggactgcagattccagaaccccctgaataagcccactaattccatgttgagcacctgtctctaaagccttctaagggctgtttctgtgctgcccacttcccctgcaatttcagaaggcttgatcacccttacagtttatgggggctggcactgtggcactaatgggggaggttcgagagacagggagaattatacccatcagctttgagagacaaattctttaccttttcactgtttctatgtcactatatttctcagagtcatgagtaaacattaaaactatgatttttacgttggcatgttgtgatctgaataaaatgattaatgacatcttttgccaaatttgttgaagacaaagtgagaggatctattcagatgcagtacctgaataataccaaaaacccaacacgtattaaatattaacgacataattaatagattgtctggataatacattagattctcttgcccttttaatttttctccttagccacttgttttgattcatgcaaaccagcagaaatattttgcattgtgtttctgggaaaagggactgggaggtagctaacacttaatcaccttctatttacacagcattgtgcttccagtattaggactaaccttgagatatgggtatcattatacccactttagtaacaaagacattgagattcagagagattgtgacatacctaaggtagcaaaactagtagctggaagagccaaaatttgaactcagatctctctggccctactaaatgcatcaccataaattatttcatgggcaatctttccctgcaccttaattgatttatttctgccaaatgtatgtgttcctagatctttatggaatattctgacatgggaatgcccccaggtctgtgaggactggcttctctggggttgtatcaatagatgaaggaaaattttgcagttgtttatacagtttggggggttgaggtggtacaatttgtacatttttgttcctttcatagcaaattcttcagttttctttgatgaggccaagcaataaattttttcctttcttaagagcaaatacttatttttgtggttttcacaaaagttgtctttcacaaacacggtaatactgtgtttcacactgcacatctctaagatgtgaaagatcattagttcaaacattaaaagtaggataccacttttgaaagcctaatatttgtattggtaaagtgtgtctggtccaggcacaatggctcacacctgtaatcccactactttgggatgccaagacaggtgaattgcataagcttaggagttcatgaccagcctggggaacatggtgaaaccttgtctctacagaaaattagctgggcatggtggcatgtgcctgttagtctcagctacttgggagacccaggtgggaggattgcttgggcccaggaggtcaaggctgcagtaagatgtgatcgtaccactgtcctccagcctgcatgacagagcaggaccctgtctccaaaaaaaaaagtgtgtctgtgtgtgtgttagaaacatttttctaattttatttaactccttacaagcctatggaaacctggcaatgtaattgtcttttactgtgtatatttgttttaagttctccttctaagaattcctatctagatttattttttcatgttgttatttttttcttttttactttttatttggatataattattaaaaagttgcaaaaatagtatagcggkcatgtgtagtatttgcccagtttaccctattgatatcttacatatctataataccttattaaaaccaggaaattgacatactacagtctttaggtttttaatttatttttatgtttcatatcaaaaagtttccattttgcagtaattcatttttattatatttgacttggcccttcctctcctaaattagcaaatgttaataagcttgtcctagtgctcatcttgaattacaagtttatttttaaaattatctgggtcaacacaattgaaagtgatttatttgtaaggtggttgctttctctggtcatactgttccatgtcatcctgccctaataaacctgcaacattatacaacttgtgtgtgtatattttaacacawcttctgaccactgcagttttttcacagattgttatcaaaggaaaacagaggaatacaagactcgtcatttgactggattttttaaaaaagtttytaaacatctaactgtcaaaacaagaatactgggtgggcatggtggctaacgccttgtaatccagcactttgaggggccaaggtgggcagataccttgagcaagagttytagaccaacctgggcaacatggtgaaatcctgtctctacaaaaaaaaaaaaatatagctggttgtggtggtccacacctgtagtcccagctactccagaggctgaggtgggtggagcacttgagtcctggaggtcaaagctgcagtgagccatgactacaccactgcaagccagcytgggtgacagagcaagatcctacctcaaaaaaaaaaaaaaaaaaaaaaaaaaagaatgctgtggtttgttggttagtgtgcaaaatctcacttatggctaattctggttctacatggattctcctacccagggcactcaccctttactccaccagagaataaacagggaaaaaatgaaggctaaattactttgttcaatcttagtcttgaggaaaggttgatgaaaggggaaaatttgggactttgtgtaggtatcaattatgttatgagcacctaatcactgattatcaagtgacggtttttctgcattatgtacttactataaatgagtaaaaaacatccttcatattatagcttatttaacaaactattatttatctgctgtgtatcagcagataaatcaagcacccaattaggtacttgacacagggacaaaacaatctctgctcttaaggagctagaattccagagtttctgttgatatatatttttttaatgttaagctctcactatgtgctagataatttgcaaatgctagacatccgacgggaagcaaaaacaaaaatgtttctttttcttatgaaactggtaagttagacaatctcacaaaagtacctttaaaatytaacaggtattacaaagggtaggtatgtgctgccatgagggcataaaagcattgggacttgacctaacctgaggtatcagaaatgccttctcctgggaatagatgtttcaagccgagatttaaaagtgcctcagagtataaactacatgcagaggtgggggaaagcaagaaagcacaaatagacctcatgatagaagcaacagagtcccagggactgaaatgagagaatgtgagatgagtctggagagttaagggtccaccattcagggtcttagaggctgtggtaaagattctaatctttgttccgaaatctgcaaaccaatcgagtttttagtgagagcaacatgatcagatttgtattttcaaaagaccactctgacttcaatgttaagaattcattcatgcatagtgtcatgcacctgtggtcccagctactcrggaggctgaggcacaagaatcgcttgaaccggggaggcgtaggctgcagtgagtcgagatcatggcactgcactccagcctgggccacagagtaagactttgcttcaaaaaagaaaaattttttaaaaagaattcatttttggccaggtgtggtagctcacaactgtaagcccagcactttgggaggccaaggtgagaggattgcttgcgcccaggagtttgagaccagcctaagcaatatagtgggaccccatctctacaaaatataaaaaaatgaaaacattagccaagtgtggtggtgcgcacctgtagtctcagctactcattctttaaataaatgcatcctgaaggcctgctatagaccaaatcctactctgcacacagagcacacggcagtggacaacagacaaattccctatctgtgaggatcttacatacaatatacaaatcataaataagataatagtgctgtaagaatattggaacagggtgagaatgaaagggtagggtggagttgctattttataagcttgaatcctatgaaattactgatttttaaaaataatttttgacctgagaatgacattacaccttaggtttgaatggttcaatccagttgtgtgacattagggtcatatggttcaacttaatacttggaagagtcagaactaatgaggtgatcgaaagaaagagaagcaagccatgtaaatacctgggagaagagcatttgaagcaaaggaacagcaagtgcaaaggccctaaaacaaaaatgtgcctgccatgtttaaggagcagtaacaaggctgaagagtaaaggacaagtgggaagaatggtaacagaggccagatcatactggtgaccatggtaacaaattggcttttctccttttttttttcccccttaagacagggtctcactttgtcactcaggctggagtgcaatggcgtgctcatagctcactgcagtcctgaacttctgggctcaagtgatcttcctgccttagcttccttagtaactgggactacaggcatccagcaccacgcccagctaagtttttttttttaagagatggtatttcattatgttgcccaggctggtcttaaactcccgcccgcaagtgatcctcccacctcagcctcctaaagtcttccaaaatgctgggattacagacgtgagctatcacgcccagcctggtttttcctctttgagtaagctaagccgtgggagggttttgagcagaggaactacacatctgccattatttaaaggagtattctgttaatggtagaatataagtggtggatgcagaagtgattgctgtaaaattctttcaactttgctgtgtgtttgaaatttttcctaataaaataatagtttaaactggttattgtgaatagactttaggggagcaaaggtgagagcaggaagaccagttaggctataacaataattcaggtagcagtggaagtggtaggaagtggttgggagcagatgtggtgtttgaattacaagtcagtaattcagaggaaataccaggtaggaaatacaaatgtatgaatccacctaaagattaggaaaacaaggacaaatgtcttgagaattaaaagaaaatgctcagaagtgtaccctaaagcctcttactcatgcttttgttctaggctggttttggttgtagatagttatcagttattatatactgccattcagattatttatatgtattactgtccacaactcacttgtgttctaaagggttttttttaataatrttcttgtcttcccaagcagattacatgctttttgagaaaagatctatttttttgtatacaccccgcaatgccatattcctagaaggcattttcaatgttcacagaataaaaatatttgaatacagagcttttcatgtcttttgtttttataaaacatcaattttcttataaatgtttaatttagacacttctgaaaatgaaggtagagttagaattttcaatctgttgcaacttatgcccatttcaggtcagacaaataaagagagagccttctggggggtaaaaaaaaaaaaaaaaaaaggcccaggtttgtgcctgtagtagtaatgtcagctacctcaggaagcttgagcccaggagtccaaggcttatatggcaccacaattgtgcctgtgaatagccactgcactccagcctgggcaacacagcaagatcctgtttcttttaaaaacaaaacaaaacaaaaaaaaccccaatcagcttttctccatattggcttatactcagacttcatcatgtggcaacaagacagttctcaaaaactttagttctatattcactccagtccaagtccagcaagagatcccttccagtagctcctagattcactgaaccaattaccttgctacagtaatttgttaaaggatagagagttaccttcccatcctttaacaaattactgtagcaaggaaaactcttgtgctatgattagccaratttgagtcatatgctttacctstggtccacccaaagatcatggactataggagaggagtggttcccggaagaacaaaatggagtactgtcaccaaaatatagaaatggatactgatggtgaaaacacaatgcttactacaccaactaactsaaaggcctatgcattgtttcttccttaagcttttgaaagaagttagtcactgccatggcactcactttgaatctcttccaattccacacacaatactgcattttttcccctgaatcatcaggcagtcatatattcagttgccattgaaaagtaaatgcatgattatgaaagttaaccagctggaagggtcagtatttcagtacatcacttttcaggacactcccaactggtattgcaggtagtttcttgtccttaaaattctttcctgttgtcaagctacctgaaacgtatttgtcctcrataccctaggggcagggtggctgataactaaggtgcctgggaaacacttcagaagcaagtgacaatgaattggcttaagaagccaattcatcttttagatggatatttatactgtagaatcttgaaaggaaaatttatctacagatatgtctgttttcagtttcttttcctttttgcactaacaagttattttccccacatgacgtttaatctaccttacaaaacatttttaacattttagttcaaaatttgcttcagaaaatggatgactttggtgtgaaacgattgttgactctattattctagaatttgggatggcgcctctagtttgctgcttccttggacaccaaacataacattctctgttctaggacgtgcttcaagtcggtcatgagactggcagaaaatcaaaccaaactaaatgaatggttgttgaagttaatctcccatcctggagctgygcatgccatggagtagccagcttttaacaggcacaatcctgatcaaaatcactgctctgtggtcctgctcatcagaatattatggaaactagatttaggcctggtttcyttaaaaatagatgtgataatgaaataatcatgtattatagccattacaatttctattgtaggagaaagtggataatgttttaacgtaaaacagtaggttactaaacaatatgttctagatgaacatttaacatttttgttttaattagccaggcatgtgtgatgacctacgcctgtagtcctagctactcaggaggctgagacggcaggatttgcttgagcccaggatttcaaggttacagtgagctttgatcacatcactgcactccagcctgggtgacagagcaagaccccgtctcacaaataataatacaaatacagaaaaaatactagaaaacacacccaaatgttaagtttaaggaatggaactatcagttattttattttatttttattttcaaaaatactcaaacgtgaaatataccacatctgcggccgggcacggtggctcacgcctgtaatcccagcactttcggagactgagccgggcagatcacccaagttaaggagtttgagactagcctggccaacatggtgaaacgccgtttctactaaaaatacaaaattagccaggcgtagtggtgcacgccggtaatcccagctacttgggaggctgagacaggagaatcatttgaaccaaggaggcagaggttgcagtgagccgagatcgagccattgtactccagcctgggcgacaagaacgaaagtctgtctccaaaaaaaaaaaaaattgtctgttactgctatggtctgaatgttgtgtcctgccaaaactcatatgttgaactcctaacccccaaggtgatggtattagaaggtggggccttcctgaggtgattaggccatgacagcagagcactcatgaacaggattagtgcccttataaaacaggcctaagagacacccctccctggtccataatgtgatagtagaatgagaaaacagctgtctatgaggaagcagatcctcaccagacactgaatctgctggcaccttgatcttggccttctcagccttcagaattttgagaaataaatttcagttgtttataagccacaaaagctatattttgttatagcagtccaaatggactaagacaaataccaatatgacagaatcaaaataaaaaactmaaaattaaatctaggctgggctgtaatcctgtaattccaatgatttgggaggccaaagtgggaggatcacttgaacccaggaatttgagatcagcctgggcaacataaggagacctcgtttttacaaaaaaatgtttaaaaattatgcgcgtatggtggcacgtgcctgtagttctagctacctgggaggctgaggcaggaggatcactagagctaaggaatttgagattacagtaagctatgatcgtgtcactccagcctgagtgactaagcaagaccctgtctcaaaaaaaaaagtctaattatgcttcttactgctcaaaaccatggtagatttctctcttgtcttgcatacattttattttattttattttattttttttgagacggagtcgctctgtcgcccaggctggagtgcagtggcgcgatctcggctcgctgcaacctctgcctcccgggttcacgccattctcctgcctcagcttcccgagtagctgggactacaggtgcttgtcaccacacctggctaattttattttgtatttttagtagagacggggtttcaccatgttacgcaggatggtctctatctcctgacctcatgatcctcccccctcgaccttccaaagtgctgggattacaggcgtgagccacggcgcccagcctttgcatacatcatttattcttccatttaaaaaaaaaaaagcatgtacagggctgggtgtggtggctcacccctgtaatcccagcactttgggaagctgaggcgggcagatcacctgaggccaggagtttgagaccagcctgatcaacaggctgtagtagaaaccccgtctctactacaaatacaaaattagccaggtgtggtgcatgcccataattccagctactcgggaggctgaggcaggagaatcgcttgaacccaggaggcagaggttgcattgagccgagattgcgccattgcactccagcctgggcaacaagagcaaaactccatcttaaaaaaaaaacaacagcatgtacagattgtacagatgctaggagtaaaataagtatacagatacagatgtggttactgttcccccagaactaactgtctagaggagatataacaagtaagctaacagaaacaatccagtatgtcacagtcaataacagggtttcatgcatcctccatcaaaatacctaaaccttcttttacacatcaaatgctggctttgatagctaagctaccaagcaagtgaaactcacacgcagtggtagtgactgtcagtcattgcttcagtttaagcagcatccctgtggttgtccacatggtatgggagtgttcagttatttgagtagtgttcaattattggaatatttatttgctcttattttatgaaaatgcagatgcaaatactagttataggaaaagtaggtcttataaatgtaatctgaatgacataaaaatggaaatcactagtaggggtgccagagcagtcaatctttagcctcaatcagacaccaaaaattcattaaataaaagccagtaaactgagtaaaggaaaaggagaaaatcagagaacaggtagaaaatcctggaaatattgttaagtatgtttagagattttggtcttacattttggttcttcaggaaaatatttctctttaaagcaaaggaagtttattgttcaattttttttttttttttttttttttttgaggcagagccttgctctgtcacccaggatggagtgcaaaggcgcgatcttactgcaacttcagcctcctgggttcaatagattctcctttctcctgcctcagcctcccaagtagctgggattgcaggtgtgcaccatcacacccagctaattttttttttttttttttaagacggagtcttgctctgttgaccaggctggaacacagtggcgcgatcttggctcactgcaagctccacctcctgggttcccgccattctcctgcctcagcctcctgagtagctgggactaggggcgcccaccaccacgcccggctaatttttttttattttcagtagaggctgggtttcaccgtgttagccaggatggtgtctatctcctgacctcgtgatccacccacctcggcctcccaaagtgttgggattacaggcgtgagccactgtgcccagccaatacccagctaatttttgtatttttagtagagatggggtttcattatgttggccaggctggtcttgaactcctgacctcaggtgattcacgtgcctcggcctcccaaaatgctgagattacagatgtgagccaccatgcctggcctattgatagatttttattttattattaattttttaatagagactgggtcttgccatgttacccaggctggtcttgtactcctgagctcaagcaatctttccacgttggcctcccaaagcacagaatgtattttaaatcacttatcacaccaatgatgttaaaattgacaagttcataatgatactaagaaaataaattcaggccaggtgcggtagctcacctgtaatctgagcactttgggaggccaaagtggggggattgcttgagcccaagagttcaagaccaacctgggcaacataatgagactctgtctctacaaaaattttttaaaaaggaaagaaattcactacttgcctatagaagttgccatggcaagttgctaattatatggtaatggtaattggtaaataaagggaaataggccaggcgcggtggctcacgcctgtaatcccagcactttgggaggccaaggcgggcggatcgcctgaggtcaagagttcaagaccagcctggccaacatggtgaaaccccgtctctactaaaaatacaaaaattagctgggcatggtggcaggtgcctgtaatcccagctactcgggaggctgaggcaggagaatcgcttgaacccaggaggcagaggttgcagtgagccgagatcgcgccatttgcactccagcctgggggacaagagtgagacttagtctgaaaaaaataaaataaaataaaataaaataaaaaagggaaataaccaaacatttgttctgcctttgttgtacaaattgtatttcagggtagccaatgagttttaaaggaaaagtccttttgtataaaatattttcaactaataaatgtaaaagaaatgataggccgggcgcggtggctcacgcctgtaatcccagcactttgggaggctgaggtgggcagatcacgaggtcaagagattgagaccatcctggccaacatggtgaaaccccgtctctactaaaagtacaaaaattagctgggcatggtggtgcacgcctgtagtcccagctacttgggaggctgaggcaagagacttgcttgaacccgggaggcggagattgcagtgagccgagatcgtgccactacactccagcctgggtgacagagcaagactctgtctcaaaaaaaaaaaaaaaagaaagaaacataacaattgaatatagtatgtggatctttatttcataatccaattatttaaaaataaatttctgagacaatgggcaaatttgactataggctggatattaaattatattaaggaattaatattaattacagattaatatttctgtcagtgtcttaatgatactgtggttgtgtttttgaaaacagttggcctggtgtggtggctcatgcctatatcccagcaatttgggaggctaaagcaggctgattgcttgagcccaggaggaattcaagactagcctaggtgtcatagcgaaaccccatctctacaaaaaaatacaaaaattagctggtcgtggtggtgcacatctgtagtcttagctacacggaagcctgagatgggaggatctcttgaggctgggaggtggaggttgcagtagcccagatggagtcacagagcaatagagtgagtccctgtctcaaacaagaaaatggaaaaaaaaaaaaaaagtctttttctgttagagacatatactgaattatttaaggatgaaattatacggtctccagtatttccttcaaaatacttcagaggagaggaagtggcagcacagaagattaggagagagtcaataaattttttttattatttttttttgagactgagtctcgctctgtcgcccaggctggagtgcagtggtgcgatcttggctcactgcaagttccgcctcccgggctcacgccattctcctgcctcagcctcccaagtagctgggactacagacgcacgccactacgtgcagctaatttttttgtatttttagtagagacagggtttcactgtgttagccaggatggtcttggtctcctgacctcgtgatccgcccgcctcggcctcccaaagtgctgggattacaggcgtgagccaccgcgcccggccagtcaataaatattaaggcttagtgatgggtacgcgggagcaggggaggagcataataccatttttttttttttttttttttttttttgagacagagtttcactctgtcgcccaggctggagtgcagtggcgcaatctcggttcactgcaacctctgcctcccaggttcaagctattctcctgcctcagcctccccagtagctgagattacaggtgcgcaccaccacacccggctaatttttttgtattttttagtagagacgggtttcaccacgctggccaggctggtctcaaactcctgagtgatccgcccacttcagcctcccaaagtgctgggattacatgggattacaggcataagtcactgtgtctggcctttttttttttttttttttttgtatgtttggacattttcgtaacaagaagttaaattttaaataagtaaataaataaaggctttaatgcaatttatgtctgcacttggcttatgccctggggaagagactgaatgaatgaatccaaagaactgtaatatcgggatccctgtaccacttggttttgagtgctcttgtctaaatgtgtaatcctgaggaaaaaggcatctcccttccttttttagtggaaggcttgaaggaaggtgtaccagtatcagccccagcgaggacacaaatctcaatccaagtcatttctttcagatggcctatgtgttagcaagagatcacagtattggtagctggaacttgggtttgagatgggctgcaattatttctgactggggctttagtagacataaggatactgtgctgaaatcctgtggtcagcagtggaagttgacaaaaggcatggcttttcaagggtataactttgacaaagatattgctttaaaacatttcagaatcagcagtgacaccgggctctcagcttctgcagcagctagggtgataccttccagagcaatcagctgtggttgtgaccactgtgactcctaagcttatcaggggaaggaggttgagctaagaggggagaaggaaaggtctagattttccactaatctaggcacatgcagcttgagttgacaaatgaaaggcatccttatggtgagatgtcttatgttcctcagctgatgaagcaggatttactcattacctgttcttgaattgtatgattttagtattatattttatggaaacaacttttgactatgattcagagatgtgactagagtatctctgccactcccttgtcacttgtgtcatcttgggcaggttgatcttctttaaattaagataataagaccttgcctgtctacctccatggttgttgtgaggatcataagagataatatataaaactataatttttgtaaactagctgtataaatctaggcatcattattattgtaagtgactaagtgatttacatcttaaagccccttattttccttgattctatgttaacaataaatgtttaattggtgtgctataaaattagatagttccaaaacaactacaaagaaatttagtgtatagtatgatctttctacgttctgcagtgttacataggaattcctgggaataagaaaaattttatccagttgctattttatagttatatccttgactgtattctcatcaatttaggagacaaataagttacttatttattccataaatagtgccaattattttataatctcaatttaagaagtcaatatttattatgttcaataatgtataatcaggccaggcacagtggctcatgcctataatcctagcactttgggaggctgaggcgggtggatcatttgaggtgaggagtttgagaccggcctgaccaacatggtgaaaccccgtctctactaaaaatacaaaaattagctggcatggtggcacttgcctgtagtcccagctactcaggaggctgagccgagatcgtgccactacactcaagtctgggcaacagagcaagattccatctcaaaaataaataaataaataaataaataaataaataaaatacaaaagtaaacatacaaaaattagctgggagtggtggtgtgtgcctgtaatcccagccacttgggaggctgaggcaggagaatcacttaaacccaggaggtggaggcaagatcgaacactgcactccagcctgggcaacagagcaagactccgtctcaaataataacaataataataatgtataatcaatcagaagattagagcggaagttggtaaagtgtgccccatagaatgaatctggccactgtggcctgaaaactaagaatcatttcgacattttttaaatggtctttttaaaaaaatcaaagaagactatattatgacatgacacctgaaaattatgtaaaattcaaattgcagtatcagccaggtgcagtggctcacacctgtaatcccagcactttaggaggccgaggcaggtggatcacctgaggtcaggagttcgagactagcctgaccaaccccgtctttactaaaaatacaaaaattagccaggcgtagtggcatgtgcctgtaatcccagctactcaggaggctgaggcaggagaatcgcttgaacctgggaggcagaggttgcagtgagctgagatcccgccattgcactccagcctgggcaacaagagtgaaactctatctcagaaaaaaaaaaaaaaaaaaaaaaaagggccgggtcgggtggctcacacctgtaatcccagcactttgggaggccgaggccggtggatcacctgaggtcgggagttcgagaccagcctgaccaacatggagaaaccccatatctactaaaagtacaaaattagccagatgtggtggcacatgcctgtaatcccagctactctggaggctgaggcaggagaatcgcttcaacccacaaggtggaagttgcaataagccgagatcgcaccattgcaccgcagcctggacaacaagagcaaaactccatctcaaaaacaaaaacaaaaattgcagtgtctatttattaagacatggccacacccattcatttatgtaccatctgtggctacaacagcagttgagtagttatgaaagaaaccatgtggtccacaaagacgaaaatatttactacctggctctttatagaaaagtttgcctccccttagactagacgattcaaagggatagaaataaaaatgtttttctaagttgctagctccctgttagtataaataaacctgggatacaggtactcaaatgacgcatatttcaaaaactcagttatggttttttaaatgaaattacatttaatttttttttttttttttttttttttgagatagagtctcactctgtctcccaggccaagctggagtgcagtggcataatctcagctcacagcaacctccgcctcctgagttcaagggattttcctgcctcagcctcccaagtagctggggttacaggcatgcaccactacacctggctaatttttgtatttttagtaaagatggggtttcaccatgttggccaggctggtctcaaacaccccacctcaggtgatccacccgcctcagcctcccaaagcgctgggattacaggcatgagctaccgtgcccggccaattttttttttttttttttttttgagacaggacctcactcttgttaaccagagtgcagtgctgcgatcttggctcactgcaaccactccttcctgggctcaagggatactccagcctcagcctcctgagtagctgcagatatggttttaacatgcaatgaccaactaagccaattttaagaaattaaaagccaattttgtttttgagacagtctcactttattgcccaggctggagtgcagtggcacaatctcagttcactgcaacctccatctcctggttcaagcgattctcctgcctcagccccccaggtttctaggactacaggtgcacaccaccatgcccagctaatttttatatttttttagagacagggtttcaccatgttggccaggctgatctcgaactcctgacctcagatgatccgcccacctcagcctcccaaagtgctgggattacaggcatgagccatggcacccggccacgaaaatcttatttacaaaatgtaataaataaaatatgaataagtataatgcaattaaataatttaaaaatttcccattttgctcattgatggtggcagaaaaaaagagaattgggattatattagttctctgactaacacacaatagaaactgactctgactaagggaagaaggggtttattggaaaaaggattcttgagtagttccagaactgagggaagagatagagatcatgacctttggaaggacaggaaactgggaagctccaggtccttaccagcaggtgaccctgggcctgctctcagggcacatctatgagacttcaagaggctttcattggagtttcaagttttatggagaaataaattgatgggcccagtttatggccacgtagccaaagggagggaataatgtgattggtaacctccctggagtcccatggttgaaatggagaaggaagaaaggagaggtaagtaggattaagggatgccaggccgaggagaaccaacagatgtgtgcacagcttgtcaggaaacatgggctataatctcaacttcaccaaacgggtgaatatactgggcttcagtattatgttcaatatgtaataattatatattagtataaaacgaggggcaaaagacccatctgccataaaattattcattggccacagtgcagaggatttggtttttttgagttaaagaattttttttttttcttaagagacaaggtctcgctctgtcacaccggctggagtgcagtagcactatcatagcttactgtaacctcgaattcctggcctcaagccattgtcccgaatcagcctcccaaagtgttgggattataggcatgagccaccataccaggccaagagctttgtatattcatatacagaattcataaacagttcacctgatatacagaattcataaacagtttacctgaaccaacaagaaaagacatcaaatagtgcttgacttcattacttattaggcagatgccaaatacttttctttctttttttttttttttttttttgagacagggtctcactctgtcacccaagttggagtgcagtggcaagatcatggctcattgcagcctccacctcccatgctcaagtgattctcccacctcagcctcccaggtagctagaactacaggcatgtgccactgtagccagctaatttccttttatttttaggagagataggttttcgccatgttgcccaggctggtctcaaactcctagtgatccatctgcctcagcctcccagagtgctgagattacaggtgtgaaccaccatgcccggcctagagatacaaattaaaaccaccatgagataatactgcgtatctactagaataggtaaaatgaaaaagacagacaataccaagttctggtaaggatgtggggcaagtggaaatttcatacattgtttgtttgtttgttttgggacagtctcttgctctgttgcccaggctggaatgcagtggcatgatcttggctaactgcaacctctgtctcccaggatctagcaattctcctgcctcagcctcccaaatagctgggattacaggcatgcaccaccacgcctggctaatttttgtatttttttagtagagatggggtttcatcacgttgaccaggctggtcttgaactcctgacttcaggtgatctgcccgcctcagcctcctacagtgctgggattacaggcatgagccactgtgcccagcctactttcatacattgttaaaagcagtatcaaatgatacaaccatgttggagaactcttcagcaatatacactaaagctgaacacattcatgccccagaatccataaattccacttctacttatgtacccaggcacctaaaatactcttccttaatgggtttaggcctggggccacaaactcaaatgcacacagaaagattctatcatatgatcaattgtggtagacagtagggagtgtcaaggactgtggttaaactggagagctccctattaagattatgttaaaaaaaaaaaaaaaaaaaagacagcctggccaacatggtgaaaccccatctctaccaaaaatacaaaaattagctgggcttcctggcaggcacctgtaatcccagctactcgggggccaaggtaggagaattcgttgaacacaggaggcagaggttgtagtgagctgagattgccccactgcattccagcctgggcaacaaagcaagaccctgtctcaaaaagaaaaaaaagagaggagttcttatctatacctgtagccattctttccaagggctcattgcactttgtgcaggtcttcagatgcaagaagacagccacagctgtggcacactgcaaacgcagcaatcaaggtgaacaggcggcccctggagatgatcgagctatacataccaatatatgagctgctggaaccagttctgcttccagacaaggagtgatttgctggcatggacgtgtccatgtgaagggtggtgatcacatggcctagatatatgctatccatcagtccagcctcaaagccctggtgtcctattaccagaagtatatggatgagttttccaaggaggagatcaaagacaaagatcaaagacatcctcatacagtacgaccagatcctgctggtggctgacctccaccaccactaatccaaaaaattaagagacgctggtacccatgcttgctaccagaaatcctaccaataagcccatcatgagaattggggtttacttgtataataaacaatgtttgagagatttttaaaaaaacagagatgatccttttgtagttcatgagcatgatgattgggtgttcctgcccacgtgtgagatgagccaccctcgaaccttgttaccatgttgacatattacctgactgacgtgagaaaaacaaaaaaaaaggagattatgttaagtgcctgggaaatactcttcttactgaggaagaaacacctggccagttgtacatactggccaggagagcattttcagtaaaagttattcaagtgggtactatggacaccatttggtataacttcccatcactcttgtacactttcctctggaaatagccctgctgccatgtctagacttcaaggttttgcctctctctcaatggctaattgctcttgagtggacaccttacccaagccaggagcagtggattctgttggtgctctacccagatctccttgactaggcagtgcaccatcccccagctgctgtgaatgttggctatgaacacctcacaggtggctttgctattgaatcatcttcccaaaaatgcttgagaaagtatgttctccccctcgagggagaggaacaccattgcttcaaagtgggataactcagtcatgtcattcactctccaggtcccaccaccggatcaggctgaggctaggcttgcttagctctgtctcctgtaccaccctgcttccctcactcccttaatggatttctcctgagagcactctccccgtacatcacaacagaatccctctgcctttggggaacccaagctaagtcatagggcccatgagatccttttatcccaaagaaccagagagcctgggcacactgaaacagaatcatatcaatggcaacacaaccatgaactcctggtgctcagtttcttcccttgctgagctgtggttatccagctttctttttgatttcatcaaagcccacaggagcttcccaataatcctcctttttgtttaagtcagccaaagtttccttttcttccctgaaaccaatataaccttaactaatgtgatgggtaaccaaggcctgacctaacgtggctttggaaatatgacccaatactttatgggacaacctcagttggaatcctgagggaaaaattaattsattgcccttcctatccctaggcattagtaactagaaatgttgctgggatcactccctgtctttaatcctccaggaatttgccttgctggggagctaatttgttactcatggctgttttcctgagaccttgtgattccctggaggcacaggagttaaattacttccactggccgtcacacccttgcatcttttgttgtttccagtactgtcaggaaggctctaacatctctctgagccttcttgtttctgaaaaatgcttttcttcatctttgtatttctctgtgtgtgtatacatgtggtacatttgcacacatgttaggaaagtagaaggaggtcgggggaagtcagaggaggagtggtcagatttcagatcactgaaccatgggttataaataaagggtgacacaacacaagcctgattagttccactcagaattgctcactgattcatcagaaaattgatccttctgacctagacactcctctctcaatagtcaaaggcagcttttgtttgagtcagtaattgtgcctctataggaattttatggagtttagcccaagaaaacgttctatccaagccaaatgtgggtatggtagaatactattgaagatattaacctacattctccgattggcatgtcctcctcttctttccctccattcaagcagccatgtggtctcagggagacatgccgcagagagaagaatgaaaagttgacaagtttttctggcttgtttctaataatagatgccataaactgatagttcactgatcttcgaacacccacacatgagtgccactgttttggcccacacagtacttttttaaagtatgatgctgttcacatgaggctcagctctccaggtcaccacagtccccagcattccttattgtctgtcacaattgacattacctgcctggcctctttctgtgtgcacttgattctgtgaccccaggcttaaacccattaagggagtttatattaggtgcctaggaagcaaacattctttcctcttaggaagacccggaagattaagagagggaaggtttccctcttaagaggaaaaaccctagggttatagtcaataatgagccagggcctcttctttgtatcacagagagtggaaattctggactctcaggcccggaacrctggggtccaaatgcctgaggagatgggggagttacggaaggagcagtactcccaagacaggatagaggcaaagaggcacatgtgagggtctcgagtcacagtgaggaaattctccctgcagccacccattaagtccccttctttttcccacatgattcatccaccaaacagatacttagtaagagttcactgtgttcactgtgtgccagcaatgaaccaacatttgtgggcttttcattatgtaatctctctctctccatccatccagattctgaactatttccaagaaaatgtcaccacttgctttacctcctgaggcaccttgaatacccctttgccttgaatgagagagagaaaattgtttttccttcattcatataattctggaatgatagctctgaaaaagccatgagagctgataaaggcctcctatctccgagaaagaaaagaaattaagaagatttggtatctttggttcaccactgtatccctagcagtgtcttgaacaatgcctgacacatagtaggttctcagtgtttatttgttgactgaatgagcagctaagcagttaagggcagagtgggtcccagttgccacatgtcctcaatctttatccaggctctttcccaaactgcaggttagcagagggaaagccaatgtttttttataagagccttcttttttttctgtttgtttttgttgtttgtttttagagacagggtctcactcttttgcccaggctggagtgcagtggcatgatcatagcttactgcagcctcaaactcccgggctcaagcaatccttgtgctgctaaattaaaaaaaaatttatatatatatatacatatatatgtgtatatatgtatatatatatataatatatataaatggagtctcactatgttgcccaggctggtctcaaactcctagcctcaagtattcctcccaccttggcctcccaaagcactgggattacaggtgtgagccacggcacacagcccccataaaggctcttaataagaaactaagagggaaaaaagaatcgtaacgggagatttaatggcagtgacagttttcagaagtgtatatgaccatggtggaagtctagaagaacctggcctaatggagccagtcttgagctgcaattcttttaactaattctcccagaacctcttgacttagttgctttcactggaaaataggtgtattctgggggttaaaaagttctccagggaaagcttcccacttacctcactgtcttggtatcccgctcttccacccaacatacaaacatgcagctggtcactcagccagtccctaaaacctgttaattggcccatagtttggctccgagcaaacctgtggacttaggagcctcagctcttgcctcccaggagtttctcaactttgggggaaggtaacatatgtgctctgaagcaagcacaatgatggctatgacaggcatttcgcagcacacgtttaaataacaaccctaggtgaggcaggtcagtgagaggccatcaatagggaaaatagcagtgtgaatctaaggcttgagagaagggagagaaggctgtggccttagtgtccagcctgctcagcatcccttctcccctcttctggtagcagcacttttttttttttttttttttttgagggaaggtctcactctgttacccaggctggagtgtggtggcacgatcttggctgactgcaacctccacctcctgggttcaagcgattctcgtgtcccagcctcccaagtagctgggattacaggtgtgcaccaccattcctggctaatttttgtatttttagtagagacggggttttaccatattggccaggctggtctcaaactcctgacatcaagtaatctgccctccttggcctcccaaagtgctgggattacaggtttgaaccactgcgcccagccttgttgcagcactgtaattatcctttaagaaactgtccccaactagttgcatgtgggtggacttggcggaactatgcattttttttttttttttttttttttttgagaccgagtctcgctgtcttccaggctggagtgcagtgcgcgatctcggctcactgcaagctccgcctcccgggttcacgccattctcctgcctcagcctccagagtacctgggactacaggcgccggccaccacgcccggctaattttttgtatttttagtgcagacggggtttcaccgtgttagccaggatggtctcgatctcctgaccttgtgatccacccgtctcggcctcccaaagtgctgggattacaggcgtgagccaccgtgcctggccgggactatgaattaaagtgctgtggtcgatgggtatgtgtggcccagagacccaaactaggccattcacactctctcttccaaggatttgaatctttttttttttttttttttttgagacggkgtctcgctctgtcatcgtccgggctggagtgcagcggcatgatcttggctcactgcaacctccgcctcccgggttcgtgattctcctgcctcagcctccggagtagctgggactacaggcgcgcgccccgaccctggctaatttttgtatttttagtagagactgagttttaccatgttggccaggctggtttcaaactcctgacctcacgtgatcctcctgcctcggcctcccaaagtgctgggattacaagcgtgagccaccccacccggccgggatttgaatcttgagtacaggaacataagggtggaaaatctatcccggatggaagctctctgaagggacctcccattaactcctgctacttggacacctcaggtcccctaactgctcttcctggggcctgccggctcagattctgtaaattctgtgagctttcccatatcattccaataaggtcttttaagggtctgcttctgtgattggcaacctgagaaccctgcttggtacaacaagggttcctggaaaatgtaggaacgtgaactggcatgagtagctgaaaaggatgcagaacttatcccagtccaggagaacatcatctgtaaggcctctccagaactctgcttggcctaactcaaggggagattccaaagggggaggtatgagaagttaggagggggatgtggagtggagccagagtggactggagggtatggcctttctcctagagcagaggttcacacaatgttgttggatacactgctgggccgtagtcgtgagagctgcagatggaggtagagccagccaacagacaagttggcaggatgcactaaaaattggagctgggcctcagaagtgggttatgctggccaaatatcatctgtctagtgtgtccaggcagcaaagagttgggaaccattactgaagaaaaacaagagccgtggaggaggggattgtttgaggatgcagtaattgcaaagaatagagtgaactctttggtcagcctgggtttgaatcctagctccatcactgatgttgtgtggttgattttcttacccttaaatggtccctacctcaaattaatatggtggctggcacataataagcactcaataaatgatggctgctgctattattttcatcaataacattttatataaatccacattgttaattagtaattattattatttccagttaaacttcagatttaaagccatagattatccctgcatgcatacccacccacacacaaaacacacagttatattcagaaatacccctggggcccaatctgaaattacagactaataaatcctagacaaagctaacaagatataaaagcaatgatccaacaggcataaacttctaccactaggttaaaagagaaatggtgatctatgactcagagctgtggaatagtcagggacccaagtgactggcaaaattgggacaataacctgggtttacctcctgttctgacaagacccttggaaactggatgcagatgcagcccagatgctcaaacaggagtgtgatggtccatgaagtacccagtgagtctgaggaaatggacctgaaaatgtcactgtattatgaaaacaacttcatttatcactcttcgagaagacagtgatggggaaagtgctggcctgggacttgaaaatcctagagtccaccaagggtctattaggacttctggaaagtggttaatcctctcaatgcctgggtttcccctatcagtagcccctgaccatggcatgaacgttcctcctccaccttgtgaatattgcccattctgtctgtaataccataatctcacgctttctccacctcatcctgatgctctcaggatctctgaattttaaacacaaatatatcctcccccacagctgacattttatcttcaaggccaattggcacaaatatagacatagccattgtgttatcataaactgcaggtgggtcttttccttaggatattgaagcatagggatttattwatttatttatttatttatttatttatttatttattggggatggagtcttgctctgttacccagactggagtgcagtggctggatcttggctcactgcaacctctgcctcctgggttcaagcgattctcctgactcagcctcccgagtagctgggattacaggcacccaccacaacacctggctaatttttgtaattttagtagaaaaagggtttcaccatgttgaccaggctggtctcaaactcctgacctcaggtgatccacccacctgggcctctgaaagcgctgggattacaggtgtgagccatcgagccctgctaaagcatagggatttaaactaaaaggccacacttccaccacacactgcaaggtaggagggacaaatattaacctcatttcacaggcaaagaaattgaatctcagtgaggtggggtgacttgcccaagatcacaaagctgggaaatgttcagtcaactccacatccaccttatctgcttaaattccagggttctctccttcataatcagctatgtcttaggcaactttatgatctccaggttatatggtctctgagggatcttctgggctcagggacttgggaacagtcccctccaggtagaggggaatccttggggaaagcctcaggatgtagctggaaacatcctaagagatatttggatcgtatcagtgaacaagacaccaagagctccatctctgtggaatttacaacctagtgggagtaagagtcaataagctataaaaataacaaatacagagattatataagatgttaaaaggttataagggctacaaagaaagaaagaaaagggaatgggaaatgggtatcagaagtgtcaggctagaaggaaatgttgcaattttaaatggggcagtcaggaaaagtctcattgagaaggcgacatttgaacagagacttgaagatcagggatggaaccacaggatatctgggcaaagaggattctgggcagacagatgagccagcacaaaggccctgaggtggaagcattcctggtgtgtacagaagacagtaagcaggacagggtggctgcagcagagtgagctggtggtggagagaaaagtgagaccaatcatgtagggactcggggaccactgtaagaactttgacttttactctgagtagaacagcaagccattggagagtcctgagcagagaaaggactgacctgcctcatgttttaaatctggctgccgtattggaagtagattggaggaaaaaaaagtggaagccctgggacccaccatcatgaacaatcggggagaagacaagaggccagcaaaggaatgaacacaggtagtaggacaaaaactgtagtgtatgttttcctggaagccaaaatgacgaaagtctctcaaaggagggagtgggtctatttagcccccttccaagactacaactgcagtgagtgttccacaaagcatatcaagtcctttaaaatccttgaaaaacttcctactaccctcaggaatagcccgaagcaattatcaggacttgtcaagcctttctgagctgaccttgcttgtctcataccaagcgcatctctacctgaagcatttgcagctccccaaacatggggtgcttgttcttaacactgagcctttctgtagttcttcctttgcctggaaacttcctgtcaatccttcaggtcttggctgagatgagacaccccctttcaagtcttcccctgctctgtgctccatgaacatctagtgcttactccagctggagcatctagtgcatctacagctggaacatctagtgcttactccagctggagctaactgaaaagatatattctcccccacctttaagaaggtactttgtaatattctcccacacccttaagaaggtactttgtaatattttccccctgcccttaagaaggtactttgtatgcctatcccaaacctataagaactaatgataatcccggccgggtgcggtggttcacacctctaatctcagcactttgggaggccccgaggcgggtggatcgtgaggtcaggagatcgagaccatcctggctaacagggtaaaaacccatctccactaaaaaaatacaaaaaattagccaggtgtggtggcaggcgcctgtagtcccagctactctggaggctgaggcaggagaatggcaggagaacctgggaggcagagcttgcagtgagccgagattgtgccactgcactccagcctgggtgacagagcaagactctgtcccaaaaaaaaaaaaaaaaaaaagcactaatgctaatcccaccaccctttgctgactccttttttggactcagcccgcctacacccaggtaaaataaacagccttgttgctcacacaaagcctgtttggtggtctcttcatagggacgcatgagacatttggtgccgaagacctgggtcagcgggactcctttgggagaccagtcccccatcctcaccctcactctgtgaagagatccacctacgaccttgggtcctcagaccaaccagcctaaggaacatctcacctattttaaatcgggtaagcggcctctttctactctcttctccaacctctctcactatccctcaacctcttttcctttcaatcttggcaccacccttcagtctctcccttctcttaatttcaattcctttcattttctggtagagacaaaggagacacattttatctgtggacccaaaactccggcacaggtcacagactcaggaacacagccttcccttggtgtttaatcattgtggggatgcctgcctgattattcacccacattccgttggtgtctgatctccgtggggatgcctaacttggtcattcacccacattcccttggtggcaagttaattgtagggacaattgctttggctgctcacccacattgcagcccagggctgctcatgtcaccccttctctccgtgtctctaccctctcttttctctccactttcctggggggcaagcaccccccaccccttctctctgtgtctctgccccttttccactttcctggggggcaagaacctcccaccccttctctccgtgtctctgccccttttccattttcctaggggggcaagtaccccccaccccttctctccatgtctctgccccttttccactttcctggggggcaagcacctcccaccccttttccactttcctggggggcaagcacctcccaccccatttccactttcctgcgggggcaagcaccttcttttcaagggcctgtttcccttgcctccataactgttgtgagtattgacagccaggcttctaaacctcttaaaactccccaactctggtgccaacttggacaacattctttaatgaactcctttttagttatcccacctgcccagctcgcttattagttcaaaacattgtaactaaattatctgcttccctgactattcctgggttaaagccacacctcactactgccttttgccccagttcaatgcctcctgcacatcctctccttgtatctccccaccttaatccacaagtgtaggacacctctactccctccttggcgatggatgatgcaccccttaccatcctattaaaatctaatcacccttaccctgctcagtgccaatatcccatcccacagcacgctttaaaaggattaaagcctgttatcacttgcctgttacagcatggccttttaaagcctataaactctccttacaattcccccattttacctgtccaaaaactggacaagtctcacaggttagttcaggatctgcgtttatcaaccaaattgtcttgcctatccaccccatggtgccaaagccatatactctcctatcctcagtacctccctccacaacccctccataacccattattctgttctggatctcaaacatgctttctttactattccttgcacccttcatcycagcctctctttgctttcacttggactgaccctgacacccatcaggctcagcaaattacctgggctgtactgccacaaggcttcacggacagcccccattacttcagtcaagcccaaatttcttcctcatccattacctatctcgacatagttcttcatgaaaacacacgtgctctccctgctgattgtgtctggctaatctcccaaaccccaaccccttctacaaaacaacaactcctttccttcctaggcatggttggatactttcacctttagatacctggttttgccatcctaataaaaccattatataaactcacaaaaccaaacctagctgaccccatagatcctaaatcctttcaccactcctctttctgttccttaaaaacagccctagaagctgcccccacactagctctccctaactcatcccaacccttttcattacacacagccaaagtacagggctgtgcagtcaaaattcttacacaagagctgggactgcaccctgtagcctttctgtccaaacaacttgaccttactctttttggctggcccccacccccatgactgtatctctctgatccacctgacattcactccatttccccgtatttccttctttcatgttcctcaccctgatcacacttggtttattgatggcagttccaccaggcctaaccgccactcaccagcaaaggcaggctatgctatagtatcttccatatctatcactgaggctaccactctgccctcctccactacctctcagcaagccaaattcattgccttaactcgaacactcactcttgcaaaggaattatgcatcaatatttatacagactgtaaatatgccttccatatcctgcaccaccatgctgttatatgggctgaaagaggtttcctcactatgcaagggtcctccatcattaatgcctctttaataaaaactcttctcaaggccgctttacttcccaagaaagctggagtcatacactgcaagggccactaaaagacatcagatcccattgctcagggcaacgcttatgctgataaggtagctaaagaagcacctagtgttccaacttctgtccctcatggccagtttttctccttctaattggtcactcctatttactctcctactgaagtttccacctatcaatctcttcccgcacaaggcaaattgttcttggaccaaggaaaatatctccttccagcctcacatgcccattctattctgttgtcatttcataacctcttccacggtaggttacaagccgttagtctgcctcttcaaacctctcatttcctttccatcgtgaatatctatccccagtcctccactcttgactccctcttggagtggatagatgatctttgctgacaggacacattccaacactttcaccctgatgaagtcctattctttacttttatactcactcttattcttgttcccattcttattgccaccctctacctctccccagctatctccaccacactatcaatttcactcactctctcctagctatttctaatccttctttaacaaacaattgctggctttgcatttctctttcctccaaaatcaccaaggcctcaatttactcactgctgaaaagggaggactctgtatatttttaaatgaagagtgttgtttttaccttaatcaatctggcctggtatatgacaacataaaaaaactcaaggatagagccccaaaactcgtcaactaagaatataattatgctgaacccccttgggcactctctaattggatgtcctgggttctcccaattcttagtcctttaatacttgtttttctccttctcttattcagaagttgtgtctgtcatttagtttctcaattcatacaaaaccacattcaggccatcaccaataattctatatgacaaatgctccttctaacaactccacaatatcaccccttaccccaaaatatttcttcagtttaatctctcccactctaggttctcacaccaccccaatcccacttggagcagccctgagaaacattgcccattatctctccataccaccccaaaaatttttgccacaccaacacttcaccactattttgttttgtttttcttattaatacatgaagacaggaatgtcaggcctctgaacccaagctaagccatcatatcccctgtgacctgcatttatacatccagatggcctgaagcaaatgaagatccacaaaagaagtaaaaatagccttaactgatgacattccaccattgtcatctgccctaccctaactgagaagatatattctcccccgcccttaagaaggtactttgtatgcctatcccaaacctataagaactaatgataatcccagcgccctttgatgactcttttttctgactcagcccacctgtacccaggtgaaataaacagccttgttgctcacacaaagcctgtttggtggtctcttcgcaaggacgcatgagacagcatttactatgctattgagattgcctgttgaacctttctgcctcctccaacagagaataagtttattgaaggcagagaatatttatccttcacgcagaacttgaaaaaacagttataattttttattttttgagacagagtcttgctctgttgcccaggctggagtgcaatggcaccacctcagctcactgcaacctctgcctcccggattcaagcaattttcctgcctcagcctcccaaatatcttggattacaggcacctgccttcatgcccggctgatttttgtatttttgtagagacaagatttcaccgtgttggccaggctggtcttgaagtcctgacctcaggtgattcacctgcctcagcctcctaaagtgttgggattacaggcgtgagccaacacgctcagccagtatttttgaatgaatgagaaaatacattttgggacatgcttgggacatgttgaattgaggtatttatgggacacagaaggcagaagcatctggtaagagcagtggtgtgctggtaaatgtttatcaactggctctcagtggaaaaagttccgatttgcagcatttgttgaattccacaacatcaacactcccaccgttggtattcaagctgccaatgtggcattgctaaatatagagttgagaagagatgtgcactgttggctctcacaagttggtgtgagcaggctccagcacaccactgcctgtgggtaggtggatttaagggtatgaggttcaggagtgcaatgtgggctggagagatggatttggtggtcatcttcgaagtgatggtcattggagctaggggaacagcaagataacccaaggagttggttcagggtcaaaaggagagaacaggaatcgaatttgatgcaaggccaacattttaggtagcatgtggaaraggagcatctttgaaggagaaagacgtgaatgaaaaaatcattcaggagaacaattcaggagaaaacctgaatgattttctcattcagacaggaagacctgaatgagaaaatcaggagagccaggtcagaacagtgtcaaggaagtcagagaataggaattttcaagaagattcttcccatcgtaaaaattatgcagagagatgcagtaatgcaaggtctggaaaatatctattaagtttcaaagttagcaggttattattacttaaccagaatagtaaggagagtggccagagtatagagaggaaagtgagaagagagtgtatatggtcagggatggtggcattttgggtgttgtattagttacctattgctgcatatcaaattactttaaaacttagtagcttaagccgggcccagtggctcacacctgtaaatcccagtactttgggaggccgaggcagatagatgacttgagggcaggagttcaagaccagcctggccaacatagcaaaaccacatctctattaaaaatacaaaaaatttagctgtgtgtggtgacaagtgcctgtaatcccagctcactgggaggctgaggcatgagaatcacttgaacccaggaggtggaggttgcagtgagccgagactgtgccactgcactctagcctggagcaagaccctgtctcaaaaacaaacaaaacaaaacaacatagtagcttaaaacaaaaataaacattaactcagattcagtgcgtcaggaattcaggagaagcagatctgggcagtttagacctggggtctcttatgatgttacttggggctgtggccatctgaaggcttgaatggggctagaggacctcatgtggttggcaaactgctggccattggcaggaagcctcagttcttccccatgaggacctctccatagggctgcttgagtgtcctcacaatatggcagctggtttcctccacagtgaatgatccaagagagaatggcagaagaagctgyaagtgtctttaatggcctagtcttagaagaaatgcaccattacttctacatatcttgtcattcacacagactagccatgattcagtgtgatggggatgatacaagggcatagatatcaggaggaaaagatcatagggggccatcttggaggctggctaccacagatggaggcaagggctggtaggattgactggcctcagggttgcaaacagaactctgatattaatctgcttcattgaatcactggtatatttcggttccccagtagaggtgttattcaagctcccagtgctgggacatctttctgtagactttgaggttggtgcaggaagaagactagcagtgtggataattttttctgtgagaaccataagccaacataggctgagcctaatgtgtggcctcattattgaggctatttcaaatacagactccctytcttggaaggtacacaatgattgggcctggaaattgtgcagtcagatggaagtagcatcatgatcagaatgtaagaagcacattttytytgaatcaggataaacctcactgatcagggcttacctctttctacctctgagattctttttttttttttttttttttttgagacagagtcttgctctgttgcccaagtgcagtggtataatattggctcactgcaacctccgcctcctgggttcaagcgattttcctgcctcagccccctgagtagctgggattacaggtgtgcaccaccatgcctggctaatttttgtatttttagtagagagacggttttgccatgttgcccaggctggtctggaactcctgacctcaggtgatccacctgcctcagcctcccaaagtgatgggattacaggcatgatccacctcacccggccttcagtttcctttttttctaatagtaagatacaaatttgggggaaatgtttttactttctcagttttgtgtatcataaatctataagggcttataataatggacataacacctatcatcatggttagagtttggaatcaaatttgtggaaacggctgggcgtagtggctcatgcctgtaatcccagcactttgggaagctgaggcgggtggatcacctgaggccaggagttcgaggccagcctggccaacatagtgaaaccccatctctactaaaaatacaaaaattagcggggcatggtcgtgggcgcctgtaatcccagccactcgggaggctgaggcaggagaatcgcttgaacccaggaggtggaggttgcagtgagccgaggctgtgccactgcactccagcctgggcaacagagtgagactctgtctcaaaaaaaaaaaaaaaaaaaaaattctggaaactagaattttctacttaatcacctgtgggacgttctctgctgctgccatcttgtggccacttggagtaataacattcacagtgtgcctttggtcagtccagtgactcaccagatgatgtaggaaggtcctctggattctgtgtaaatatttccgatgacaggtttccaattattctacaagacaggctatacctatggtgtaaagctttgcttattagaaagttctttctgaaactgagtcaaattctgcttttattccatttctatacaattctttttctactttctaattttttttgggggggggtggggacaggatcttggtctgttgcctaggctggagtgcaatggcgtgatcatagttcactgcagcttcaaactcctgggctagctcctagctagcctctcaagtagttaggaccatgggtgtgtgccaccacgcctggctaatttattattattattattatttttgagacagagtctcactctgtcacccaggctagagtacagtggcacaatattggctcactgcaacctccagctcccaggttcaagtgattctcctgtctcagcttcccaagcagctgcgattacaagcgtgcaccaacacgctggctaattttcgtatttttagtagagatgaggtttcgccatgttgcccaggctattcttgaactcctgaccttaagtaatccatctgcctcagtcttccaaagtgctgggattgcagatgtaagccaccatacctgtcctgcctggctgatttttaaaattattttttgtagagagagggtctagctatgttgcccaaactggtcttaaactcctgggctcaagcaatcctcctgccttggtctcccaaagtgttgggattactggtgtgagccactgcacccagccctctaattctaaaaaaaaaaaaaaaattgaaggcagctgcttatcatatttccctaaatcttttttcctaaatattttagcttctttatctctccctgaatgattcccagagccttcattcatcatccaggatctgagacagggatgctggtgcaagtgatttactggggagtggccacaggggaaacctgtagggaagccagggaaacaggatgggcaagagggcggagctaagcaaggatgcagtttagccagagaccagcccagcctgatgccacggggagctctggatcctgagtggtgctacagagtgagtctcaccttgaggcaaggggttcagtcttgtatactgtgacactcagtcattggctctgggggtgaggggtgttcgaggaaaccttcctgagtgaagtggttcccatttgggcaagggcagttctcaggagggttagcagctgacgctcaacagcatgtgggaaatgggtgaccaggaaagaggatctgtataccttctgctcatatctcatctcagtcattatagtcagaccaggacccaaatatcccaggtgtagtctgaagtgtagtattcaaggaatccaggccgagcacagtggctcatgcttataatcccagcactttgggaggccgaggcaggcagatcccttgagcctgggaagtcaaggctgcagtgagccaagatcgggccactgcactccagcctgggtaacagagtgagaccctgtctggaaaaaaaaacaaaaaagagttcaagagattcattatatcccattctccttagtcctgtattaacagtccaggcttacatttgggttgtctgatcgaaaccccaagatatttttcacataaaattgctcccaggccaagtgtcttccatcaatgcctatggcatggtgataccaaaagcaaaagcaggtaaaattgtattcctttaaattttcctcttgtcagtttggactcacattctagctaactgagccctcattgaatctggattctatcatctaatccaggactctacgctctgtcttctgcagacttgatccgtgtgtctctttggtaactttcaactcccttgtctgttcattacctttgggctggtcatctctgtttgtttgtttgtttgtttgtttgttttttaagatggagcctcgttctcttgcctaggctggagtgcagtgacacaatctcagctcactgcaacctccgccttccaggttcaagcaattctcctgcctcagccttctgagcagctgggactacaggtgcatgccaccacatctggctaatttttgtatttttagtagggatggtgtttcaccatgttggccaggctggtctcgaactcctgacctcaggtgatccacctgccttggcctcccaaaatgttaggattccaggtgtgagccacagcgcccagccagggctggtcatctcttaatatctggctgtcactgcccctgcctgatgatatctgttctgttgctgtccgcagaacagcactacagagggaactttggttgaaaatggccagcagcaagcctgaggccagggccatagaaagagagccatgtttatttcagaaacatgagtctgaaataagtagacagcccggaacctaggtggttaagtagttaatgttatgtgaccaatatagaaaacttgagactatcagctcagtagccctgagccttctcataacttgacaggttctgggaaggtatctgaaaataatttaagaaatgtattctggccagacgcggtggctcacgcctgtaatcgcagcactttgggagactgaggcggatggatcacctgaagtcaggagtttgagaccagcctggccaacataatgaaaccctgtctctactaaaaatacaaaaattagccaggagtggtggcacatgcctgtagtcccagctacttgggaggctgaggcaggagaatcgcttgaacccaggaggcggaggttacagtgagctgagatcgtgccactgcactccagcctgggtgacagagcaaaactctgtctcaaaaaaaaaaagagaaaaagaaatgtattcaaccaatattcaactcatttaaatgagttgtagagtggtatatgattaccttaagctttataatttgcagagaattatacatcatctaggataacattttccacatatccaactgcaccatcacttgcagcatcagacccagaggaggcaggtagcatgatgccttctccctccctccatcagctycaaggctcacacatcgaactggccctggggcagggaaggtcactcctcckctgaccctgactgaggtgttgagacagtcttttctcaccaggcctccattagcagaagaagccaccattctgagtagtcctgcaagcatgtttctctctgctggccttgtccagaactggcaagccctttcccctaaagggcagtagaggaaaagggtcaccatgaaaggcagatcatacttaggaaatgccaaggagcacctaaaatccccttatgtamccccagagatatgtatgtcccactgacatttgggacacaccaacttgcagcatctattctggagtggagaatcatctaattattccgtcctcccatccctatcctcccagaccaaagacctaaaaatcatgagagcagtaagactgcatagtggaaaccacattagaaacttattgcatttgtcacctctgaaccacaaagtagatttttttctttcctagttagaggcatggagctttacatatgacaagtgttctctcatttgttaccctgcccactaagttcaataagtctctacatgattggattctctttacaaagcaacttaaacgaattgcagttatgatatcaaggaaagattccagtgctgaagaacagcctgttttggaatttactcccccaaatgcaggcacaaggcgaatttcatactgggatggcttaactaacctgtcttgattttagagtcactatatctgtctacatttaaaatagataattatcttttaactaggccaaagcattcaggttacaaaaagtcacagtgaaaagttaagttcttgtctctgcaggaagcaggcaagagccccaccctcctgggcgcagccrcagctgcccaaactgcagctgcagacccaggcatctctgcactctctggggccaggaagggcccccctgcccctgcagactcagaggtgtctgttcccacttcctggactctctctgctcctggcacccactccgatcttggagcaaggttggggtcaagcctggrtgctgtcacagcccagccaggttgtgacacagcagccccctgctgccttggccccctctggactttgggcactgatcagtacgagagggaggctgaggtgggggctgagggcagctcattgctggtctgcaggcgcccttccgcacaaacagcctggcatgccatgagctgcagcaagaggcagagaggctcctgggcggaagagggcaggtctccagtgaagctccaccttcaagctggggagagcctgaagcctgatggccaggctgttggtcccatggaccagagtggaaacttgtggtgcttttyctgggcctgcccatggctgcccatggaccaatcagcatgcacgtcctctgctctgaagcccataaaaaccccagactcaggcagacttggggagatgacaggactaccagtggtggagaggagctaccgaccccagggactcctgttggctgagagctgaagatacaatgggacgactagctgcagagaggagctacccactccaggttctcctctctgctgtgagctgaatgctcatcaggacatcttgcctgtggagaggagctacccaatgccggtctcctctgagctatactgtcactcaataaagctcctttttgccttgctcaccctccatttgtctgcatacctcattctttctggacacaggacaagaacttgggacccaccaaatggcagggctaaaagagctgtaacacaaacagggctgaaacatgcctcttgcttgccacattgcaggtgacaagaaggagagaagagagagggagagaagagctgtggcccattggggagcccagacctaggagctccctgagccagggctgtgacaccctctttggaactctggggttcctggcatctccaagcttcagggcaccactgtgttccctggtgccagccatggaagctgcttgcagtatgcctggcccagctgcagcctcccagggagctgggacccatgccagcacctggagctgcccactctgccatagctggtgtgcctgattgtgcgcaatggccagaccctacagttgctcacacaccccttgctgctccatgcctggcttgccattggcaggcagtgggctccaggccaatagtgcaatatgagtacagcctgccaggctgagcagccagaataagcccagtgggcctgagcaaaactcaggcaaaaaaagccactggcctcagaagtttccagctggtgaagtgacaccccaagaatcccatgatacaggccgggtgtggtgactcacgcctgtaatcccagcacattgggaggccgaggcaagtggatcacgaagacaggaggtcgagaccagcctgaccaatatggtgaaaccccatctctactgcagatacaaaaattagccaggtgtggtggcatgcgcctgtaatcccagctactgaggcaggagaatctcttgaacccaggaggttgcagtgagccaagatcgtgccattgcactccagcctgggggacagagtgagactccgtctcaaaaaaaaaaaaaaaaagaaaaaaagaaaaaaaaagaatcccatgatactataaatacaaaaaattagctggacatgttagcacatggctgtaatcccagctacttgggaggctgaggcatgagaatcacttgaacccaggaggcagaagttgcggtgagacgagatggcacccctgtactccaacctcggtgacagagtgagactctgcctcaaaacaaaacaaaacaaaacaaaaaaagctagttcctcccttctcaagctccctttcccctggcaattaatgttagttaactggagagtgagcattctatcagactccatttagagtccagaagataaacagctaggctttcctgttggtgacagctgctttttatatgccaaaatcacctccaagatcttttattgcattaaaaaaaaatgatcccagatgctgcttttcacaaacttcttagatggtttttcaatatattactccacaaagtggaagccattatcacattcatttatttttcatgaggtgctgtaacaggaatcctggattcagcaagtaaagctgaaagccatataaataatgtatgttaagtacaactgataagcacccttgtcatcttgacatcactgagagttttagagcaaagcagcatacgtgtggcaacatgatcacattcttcatcccttctgccaagagactggtaatgaagggactgaaggtgaatttttagttttcagcttaagtgagtggttctccagcattactgagtagaaaaaccatctgcaggtgattcttttttttttttttttttttttttgagacaragtctcaggctagagtgcaggagcgtgatcttggctcactgcaacctctgcctcctgggttcaagcaattctctttcatcagcctcctgagtagctggattacaggcgtgcacccacacccagctaatttttttatacttttagtagagatagggtttcgccatattggccaggctggtctcgaacccctgacctcaagggatctgctcaccttggcctcccaagtgctaggattacaggcatgagccaatgtgcctggccaggtgattctaactcaaaaggtctctctctttccttcccttccttccttccgaaaaatctcttttatttttatttttatttttatttttggcttcccagaaagtatttcaccaacaagtatcttttaagctcctgacatgtatcagacaatgctttgggcctcagaatctgcatgttaacaagccccctaaatgatcttcgggtaggtggttcaaagaacacattgtacaagctggcctaaagaaacgtgtaattgatactgtggttatcttttaatttttttttaattttctttttttataaaatagaggtgaggttttaccatactgcccaggatggtcttgaactcctgggttcaagcaatccgcccgccttagcctcccaaagtgctgggattacaggcatgagaaactgtgaccagccgatactgtggttaccaaacactcattttatccagcttcccaacccctacaacagatggtatgttgtgtttaggtacccacccttctctgctcaaccatgtgcttcaggagaggctggccacagacccagggagtagatcctgattgttcaaaggcaatcatggtcttcccatttccctttgcagggactggtttagacaaggccatgcgatgcagctctgaccagtaaatggaggataaatctgcagggggtttctgggaaagattttcttgctcctaataaaagacatacaagaaaagatggtcttttcttattctgagtatggttgtatccagatatgaaggctggcactagggcagtcaccttgcaacaagaaggggaaagctagcccccaaatgaagcctgcccagcagaatgacagagcagcaagatggaaagaacttggttcttgaaagtgtcattgagccatggaattacccaaccctggagctgtcctattcttggactcgtaggtgcagaataacacatttctttgtttaagacagttgggcttgggactcttttataccttctgctaaaaacattctgactggcattgaatttttatgtgcacttttgattcaaggtttaagctttctgtaattcactgttaaataattgtaacacagtgtctcaggtgggttccctagaagttgagtctgagacagggatttgagtgcacatgatttattgaggtcatgctctcaggagattagtaaagcaggaggtgaaatagagaaggaaaaaggaaagagatgagcaaggatgtggttgcatgcaaagtctagctttggactgatccatgggcggttctggagctgtattgttcagtatggcagccattagccacatgtagctatttaaatttaaattaattaaaaggagttaaaatttaaagctcagttctttagtcacatgccaagtgctcagtgactacagaagctcataggtaaagtcgttagccacatcagtcatagcagccccaaactcaccatcaggtaaaggtatctggagagagtaccaattgtgactactacccatggtatgtaagtagacatgagctgcatgcaatgctattggcagagaggttagataacactccttttttgctaatccacgttgggaatttagaatctcctgagattgctcctaaggagcacctttatttcttaacaatccctagagttcagacacataccaactatataaacatatctgataggtgagtcactccagtgatgctcagattgcagacaatggaggctcagagagcaggctcaaagggagaaagggacttggtgcaatgagtaagaactagaaaaaagtgcctgaatgtcaaagagaactggtggggacagaggtctgactctggacagaacttgaagctgccactggaactgtctcatccagccactgtgtcatacaaaaaagaaagaagagggtttatattttcactttttcactacgttcatctcacttttttttttttttttttttgagtcaaggtcttactctgtcacccaggctggagtgcagtggtgcagtctcagaatccagatcgctgcaacctccctatcccaggctcaagcgattctcctgcctcagcctcccgagtagctagaaccacagacacgtaccaccacaccaggctaattttttgtattttttgtagagggggggcgtctcaccatgttgcccagggtggtctcaaactcctggactcaagtggtctacttgccttggcctcccaaagtgctgggattacaggcgtgaaccactgtgcccggggtggcctgtaatctggcacggtttgaaatccaaccaccttgcccatctcacttctataatatgttttcctatgttttatgtctgtctactctttggttatctcttcatatgacaccaactttgtaacgccatcttctagaaagagaatagaaggtaattcagtctttcctcttacatggttgaccacaatttgtttttggttattgctactttattttaattttatttatttttttatgacttcaaaaaatttttgtgggtacatcgtagctgtatatatttatggggtacatgagatgttttgatacaggcgtgcgatgtgaaataagcacatcatggggaatggggtatccattccctcaagcatttatcctttgagttacaaacaatccaattatagtcttaaaatatacaattaagttattattgactatagtcaccttattgtgctatcaatagtatttatttttatttttttgagacagggtcttgctctgttgcccaggctagagtgcagtgatgcaatcataggtgcaaccttgacctcctgggctcaagtgatcctcttgcctcagccttccaagtagctgggactacaagtgtgcaccatcacggccatctaatttttttattttttgtagagatggggtctcgctttgttgcccaggctggtctcaaactcctgggttcaactgatcctcccactttgccttccaaagtgctgggattacaggcttgagccactgcgccctgtctattattgctactttagaaatatttccttttgcttcacaacttactatgggaaatgcctaatctttaccttccttctcagtcctttgatcaggacttccctcagtcccttcttgtctggagggaagtcctcagatttcatagccatggcctcccagtagctgctaccagagcaacagctgctggttcagctcaggtcaggtcctcactgccctgttccatcactggtttggtcctggggggtaagcaggagggggttgggggtgcaggagaagtaactatgagcctgagtcatagtcacccttgagcaggaagcagaggagcttctcattcagattcttctccttgaggtcaaagatagaatccagaggctaaaccacataacccctcagggcacaccagcccaacttccaactgctgacacctgcaactttggctaagggctgttctctggtcactgaagcccactttgctcacctgtgtggcaagctgcagatgtccaggaattactgttcctccccacagctcccagtagacttcagctaatgattaatggaagttagtgtataaataccaaagctcctcattccttgggtgggatacctgagcacgagtctacactggctcccagagtttcctatcatgattgagctccatttgtcctcatggtgattggctgggtaatgcccatgcctcctttatttggctgcctttcctatactttctcaattcccctccttctttgtctctcaaatgaactccttgcactctcagcatctgcttctggggttacccaactaaggcattagatgaccacaagggcagttgtcactgggggctgggtgatttggacatagtgctggcagcctgctgcttagcctaagcccgaggaccatcatcaggacacagatactgggacagcacactctgcctccacatcttctgcatggttagtttaagtctggaatgaagattactagcaaatatatggaccatacaacaagctgcttactcccacatcattcttacttatttatttattttttaatttttatttttttgagacagggtctcactttgttacccaggctggcgtgcagtggtatgatctcggctcactgcagccttgatctcccaggttcaagtgatcctcctgcctcagcccccaagtagctgggattacaggtgcatgccaccatgcccggctgatttttgtattttttgtagagatggggttttgtcatgttgcccaggctggtcttgaattactgagcccaagtgattctcccacctcagcctcccaaagtgctgggattacaggtgtgaaccactgcgcctggccttccatataattcttgtcagttctaaaactgttactttgttcgccatctgtttgacttctgtgtttctctctcaattggttcagaacttgaaagtagaaggtcattaattgagcctcctgaaactgttaaaaataagcatggttaggctgggtatggtggctcacgaccgtaatcccagcactttgggaggctgaagtgggcgaatcatgaggtcaggagttcgggaccagcttgaccaatatggtgaaaccctgtctctactaaaaatacaaaatttatctgggtgtggtgacgcatgcctataatcccagctactagggaggctgaggcaggagaattgcttgaacccaggaggcggaggttgcagtgagccgagaacatgccattgcactctagcctgggcgacagagcaagactccgtatcaaaaaaaaaataataaataaataagcatggtagaaagataggacttcaggatgagcacaatccagggagattggaaagagggtggctagatgctggcccctggcctgagggaaggagcaaatctatagtccataaaggaggaggcagaatgaggtactaggcagagtatgagaataagaatttagaaataaagagaaggcagaagccaagtaattggaacacatggggatgctggatgtgatcctgttgagactagagctcaattatcagaactgggtcactgcaactagaatagagtaatccatgctgatgcatagcttgtgaggtaagagctagtcaaatgctttcttaacaggctatgattgggcctgggggtgggaggctggggcgcagctgagaacatggtaaacccaggtgtggacagacactgaggaaacaggctggcaggctggtactaactggttctgcaatcaaacgtttaaaagactggcacaattctatccttcttatttgttttatttttgaaacggagtctcgctctgtcgcccagtctggagtgcagtggcacgatcttggctcactgcaacctctgcctcctgggttcaagcaattctccctgcctcagcctcccaagtagctgggattataggcacccgccaccatgcccagctaatttttgtattttttagtagagatggggtttcaccatgttgaccaggctggtcttgaactcctgacctcaggtgatccccctgcctcagtctcccaaagtgctgggtttacaggcatgagccaacgtgcccagccttattcttctatttgtaaaggggcaacactgtgctttataaagccacaaaggaaaatgccattctttagtcctttttctcagattttgcagacgttagacttaaaagcctccctgcctaacctgtctctttcatcttctttgttgaggttcacgcatcatgaggaaataccagctgctctaaatgacttcaaatttgcttgatccaaacaagttgcatgtcaggtatagaagttgggactttgtcagttacaaacgacagaaacctgagtaaaaccagcttacgcagaaagagatttttttgattcagataactgggaaggatcctgggctagtttagagggtggaaggaagagcccaagaatctagggtctcagagacttgaactctggactcatggtcaaccagactctctctccattcagttcccaaaccagtttgtcacaacttttttttggtatattcaccttttcttctcttactgcagacagaactttacaccacctttaatttccctagcagcctgagtcacatgctatcatgcagctcgggcagctcaggtcaggtcctcactgccccgttccatcactggtttggtcctggggggtgatgggaggggaatgccagcaggaagagatttgtgtatcgcatccctggaggacactgattagtgctgcctgcatcttatacccatttcatggcccagcatgtaattgacaatcaataaatactcctgaatgcatgagtaaggctaccataaataatgtgacagaggtagctctcattgttgtaaattaataaattttagtttatgtctctatctggagatgctggtccatgtgcacttacttctgagagatgtctgctgtcagtgttttgaggaaacagcttctgagtctgcaagctttggtaaattcagaaggtgattaaatgccacccttggaggtttcccagataacagtctgttctagatgaccacctagactataaatgttgatggaaattgcttttccttacttgaatctctacactgagaacttattaatgaaatgtatatgtttttcaaacttatgtttacaacatcacaatgaagtaattatagtcagataagatcttattgtctccatttaatagctaggaaagtccaggcatatattgggtaagtcagtgtttttcaaggaatgtcttccagaaaacaagacccctaggtgattcatgaaaaggggttctgtggtcagttatgattgggaagactctgaatgatttccaatatatgttagtatactaaagattctgaaggaagcagttaagaactctataaggggcaggtgcagtggctcatgcctataatcccagcacttttggaggcccaggtgggaggatcacctgagcccagaagttcaaggccagcctgggcttgtagagacctggtctctacaaaaattaaaatgttggttgggcatggtggtgcgcacctatagtcccagctactcaggaggctgaagtgggaggatcacctgagcccaaaattcaaggctgcagtgagccaagatcacgttactgcactccagcctgggcaacagagcgagatgctgtctttttttttttttttttttttttttttttgagatggagtctcgctctgtcacccaggctggagtgcagtgccgcaatcttggctcactgcaagctccacttcccgggttcatgccattctcctccctcagcctcccgagtagctgggactacaggtgcccaccaccacgcccggctaattttttgtatttttagtagagatggggtttcaccaatgttagccaggatggtctcgatctcctgacctcgtgatccacccaccttggcctcccaaagtgctgggattacaggcgtgagccactgcgcccagccaagatgctgtcttttaaaaaaaaagcatcagcagaagaaagctatatgaagtaaaatctgtttaacgttgatcaaaaggatttagcaaaattattggaccttaaacttcctgtttctgcatatatcttctcttattccctcctgttttcatagaggatctgtctctttccacctaaggccaatctctccatctatacctaggactctattttcctttccctccattcctaggaatcttctatttctcaagtattctttctccctcctcatcctaggggtggtagcagctccctgctcttgctaatcatccgtttgattttccaataccaatttaattagttccccttacctggtatgagttatgttttcctgatttgaccctaactgatgatgatacatggaaatatcagaaaatagggaacagggggaaggagagcatttgagaaacaggcaaattctacttgacttggtggattaccttgaagtcaaggtagctcggggaaagtagaggagaccgggaggcaatggcagtagattgatgtctatgagctcttacctaggcatcattcagtttcctgtgaaagcagatgtcctccacactaggggttgtggggaaattgtatgagtagagaaaagggcaggttacagaggacagcccatctccctgtatatgagcgattatctctggttgtcagtaagtcacaaataagtcagtgctgtcctctagttgcctggggtgggggtcagaggacttgccccacagcagaaacctcttcatctgggaactagttgggcacagcttcttttggctgcatctgtaacctgtcctgggttggcccagctgctgagttgtcacagtttgtggttggcacctattgttaaatgtcaatattttcacagtcatcccacactgctatgctatggcatttgtcccttggccttgggaggacaggcaattctttcatacataataggaaaagatagaagagagactgtctttttctctcaaagactgttcaagccagtagcaggtcattgtactctgaataatgccctttcaaatggagaaagaatataattctgaaatcacacacttctgggaccattagagacaccagtttactgagcgtgacttttgcaagatgattctgtaatgaaatgtaatcctcaaagtctgaaataagtaaaatgtatttattcagaaaatgcatgagtgtttgtgtatatgtattaaaatctattacccttaaagtgccccatgatcaagacaggagatgagaattatattgtgcttgaagtatagacaatactgagtctgagagtgttgggcagacgtgaagttccacatgtaacaatgtctatcaatcgaggtgtctctggagttttctggaggttgaatctggaatgaacagttcttgggtgtgccctgttgaggagctaactggtgcaggagctatctggggtgaaatcactacccatgagaagaaaagcctctcctccacctttcccaggctgaaaagacagtttggcttggggatggcatgggtggagctttcagctgagactaaaggcccaactctcctcccagtgtgaggagaggttgaccctacactcttcctgctgccacaggaactgtggaggcagctgttgaggaattacccctgattga

SEQ ID NO: 96396 - DNA, 14379 bp, Homo sapiens
tctgacaccttggttgtgtgctgttcccgcctttttttttttctggccctggtggtttttcatggacttgtagttaaactgcatatgtaattttccttcttttttcacttagtatcatgacagaagcattttacatgcttataaactctattaaaatccattttttagttttctgttttaagagaccaggtctccctctgtcacccagactggaatgcagtggtgtaatcggagatcgccgtaacctcgacgtccttggctcaagggatcctcctgccccagcctcccgaatagctgggagtagatataccaccacacacagctaattttttttggtttggtgttgttcatttgcgactgagtttcgctctgttgtccaggctggagtgtagtggctcaatcttggctcactgcaacctctgcctcccggattcaagcaattttcctgcctcagcctcccaagtagctgggactacatgtgcatgccagcacgcccagctaatttttgtatttttagtagagacggggtttcactttgttggtcagggtggtctcgaactccggacctcaagtgatctgcctgcctttacctctcaaagcgcgggactacaggcatgagccatggcgcccagcctgtttgtttttaagagacaaggtctctttatgttatccaggctggtcttgaactcctgacctcaagcagtcctcccacctcagcctctcaaagtgctgggattacaggcatgagccactatgcctgggctagttttttttaattaaactttttgttttgagataatcatagctgcacatgcagttgtaataaataatacaaagagattccatgtatactttacccagtttcctccaatggtaacattttgcaaaactataataaaatatcaccaccaggatcctaacatggtcaaaatacagagcagttccatcaccaggatccctcctgtcacccttttaaggccacccttatacccccacccctacagaccccatccctaaccactggcaactactaatcttctcggcttctaccattttattatttcaagaacacatataaatggaagcatatgatgtgtaactttaggggactggtttaattctctggagattagcccaggttgtttgatgcatcaggagttcattctttgccattcttgagtggtattcaaaggtatgggtcgaccacggtttgtttaaccatttccacgttgaaggacatctaggctgactccagattttggctgttccagataaagctgctatgaacatttgtgttcatgtgttcaagcttttatgtgaacagccttcattgttctgggataagtccacaggagtgccacggtggggtcgtatgggagttgcatatttcgttatgaaaatcatatttaatagcagcttaattcttcatcaagagactagatcttttttttttttttttttttttgagacagagtcttgctctgtcgcccagactggagcataatggcatgatctcggctcactgcaacctccgcctcccaggttcaagcgattctcctgcctcagcctcccgagtagctgggattacaggcgcccgccaccatgcctggctaatttgtgtatttttagtagagacggggtttcaccatgttggctaggctggtctcgaactcctgacctcgggtgatccgcccacctcggcctcccaaagtgctgggattacaggcgtgagccactgcgcctggccgagactagatcataatttaagtattattcctttgtcattggatatatagtatttctaattaatgggcaattataagtgattctgtactttgtctttaaaattatttttgtgtttctgatgatttcttcagggtgggttcccatgagtagagttgctccatggtgggatgggagacttcaaggggcaagttgccaaactagacatttctaattctggtaacaggctgccatgtgcgcgttattgagttgatgtgctcacaatgccccgggaggtgatgggggctttgcaggcccctgtgggagctgtcagggagccagcgaggcctcagctggcttggttggcacttccctgacaatccctccattgtgcccatcagtgctggatgcccaaagcctggcacagagtttctttaaccgcctttgggaagtcgccggccagtggcagaagcaggtgccattggctgcccgggcctcacagcggcagtggctggtctccatccacgccatccggaacactcgccgcaagatggaggaccggcacgtgtccctcccttccttcaaccagctcttcggcttgtctgtgagtgctcccgtccagaccctggggacagcttcggaggaccggggcgagggtgggggccccccaggtaccgagaagagctgcccgccaaggctgagacaggagagacacccgtcagcccctgtacttgcccagcaagagactaagaagggcaacagtgtgagtctgttatgagggaggcctggatgccacgttcccctgactcctgcaccaggagccacctggggcagcccctcattttatgcttgtagcaactcataacagatggtgaaaccgaggctcccgcgagctgtccttttccaaacctaccccctcatacgcacataagccgggcgaaggccatactgattctcccagactctaccccatcagtgcctggcgccacgccccactgggagcaccctgggtcccgcgggtctgtgactcccaccacatccccaccaggaccctgtgaaccgcgcctactttgctgtgtttgatggtcacggaggcgtggatgctgcgaggtacgccgctgtccacgtgcacaccaacgctgcccgccagccagagctgcccacagaccctgagggagccctcagagaagccttccggcgcaccgaccagatgtttctcaggaaagccaagcgagaggtgaggactggccgctgggcctcaggtgcagtttggaggccagtgagagtcccagcctctgcagcgggaaaaacgccaaaggggctggtggtgctggaaggtcctcactaaacactgccggtggtcctgccattttttctaaaggggcttggttttcacttgaacggaagcagcacaaagcctgccccgacccagcatggtgggcctctcagccacacagacctgcctggcgcagagggtctgctggcctcggggaaggcagctgtggtcaagcgttcctgggattttgttttaatgagatatggcaaggtgacagacacagaccaggaccttaacaaagagtctactactcacagttcctgagaggaggggccacgcctcacagagccatgcatggaaagcactgaggtagtcggggcgcagagagaagagagggaagctgggccagagccgtctctgcatcctccccaggtatttgctgtctcgaggaatcagctggcctgggaaggggcagcccctccaggaccagcaaggccccaagttgtcaaagcatcataaaaggcggaatatgtaaaacctgattaatctactgccttcctccccttcctcctctaggcagggtctcagcaggctaccgacgtcctctgggaacaatccttcctcgggagttatagccatgtgcagggatgaggcatttgtttctgaaagaagaaagaatacaaatgcatcaggcccctcctctgtgaacttagccactctgaacctcacccacagaatttcactaggtcctccttgtagccctgtgaggtgaatactaatattgtacccattttagacattgggaaactgaggctcaggttgcttaaaagacccgccccagtgagaagacaccaggggaaaggtgcacttttgtcacacgctctgagcacagaccttcatggaaattagcagagccaggctttgcatctcaatagaaaaccatgcaatctctgcagctgcaaggaccccagtgaaaagcaggcaagcctccactcctggcctctcacctcagccccaggaagtgacaaaggcctctgagctcaaggcagcctcagagtagaaaagggattctctgaagcaggcgtaactgctttattgaggctgggcacagtggctcacgcctgtaatcccggcactttgggaggcagaggccggcggatcacttcaggttaggaattcgagaccagcctggccaacatggtgaaacctcgtctctactaaaaatacaaaaattggccaggcgcggtggctcatgcctgtaatcccagcactttgggaggctgaggtgggtggatcacttgaggtcaggagtttgagaccagcctggccaacatggtgaaaccctgcctctactaaaaattaaaaaaaaaaattagccaggtatggtggcacgcgcctatagtcccagctacttgggaggctgaggcatgagaatcacttgagcccaggagatggaagttgcagtgagctgagactgtgccactgcactccagcctgggtgacagagcaagattttgcctctaaataaataaatagccaggcgcagtgactcacgcctgtaatcctagcactttgggaggccaaggcaggcagattgcctgagctcaggagttcaagaccagcctgggaaagaaacatggcaaaaccccgtctctactaaaaacacaaaaaattagccaggcgtggtgctgtacgcctgtaatcttagctacttgggaggctgaggcaggagaatcacttgaacccgggaggcggaggttgcactgagccgagattgtgccactgcagcccagcctgaatgacagagcaagactctgtctctaaataaataaataaataaataaataaacatctttattgagatacaattgacaggtagtaagtggtgcatatttgaagtccacaatttggcaagttttggcttatacacatatacacctgtggattcctcaccacagtaacggaagtattcatcacccccggaagcttcatcctgccccgtgtcatcctctgcccttccctacctcctctcaactctcatgggccctctctccctgcagcggctgcagagcggcaccacaggtgtgtgtgcgctcattgcaggagcgaccctgcacgtcgcctggctcggggattcccaggtcattttggtacagcagggacaggtggtgaagctgatggagccacacagaccagaacggcaggtaaggggatccctgcgcccaggcccaggatattcctggcctccatcatgctgggcccataggggaaccccacccagcctgggaacttcaggtagtagtaatcctggcacctttcaagagggagggctccctgcctgatttgagtggccgggggtcccacgtgagcccttcctgagagctctgtgggtcacagctatatggagcccagagctccgggggagagcagagccctctgcactgacaggcatcccagtgcagtcagtgcagcccagtgcagaccagagcccatcatacacacggacaaggaggccacaggctgtgggtgaggaaggcctcagggaggtgatgctgccccgaggctggagggaacctggcttggggctgtactgactagaggctgcctgggaccctggcactcaggtcatcacctggacatgaggatgacagtcccactcagacctcttctcagaagactgtctcatccatgtgtctcctgaggttggattgcgagcattcagatatcatggaatgactgtttatccctcaaaccccacttttcccacgtgctgttctccaccagctatgtttgattaaccatgcacatggtggataattctacgtcagcacataggagcacccatcctttcttggggctgcggacattgcattcatcatgcagtcccttgtgggtgagcatgaagatcttttcagtctttcggtgctaaaaacaatgcatctctacctactttgtgcagcattaattgctcagagtcaagtgtacctatatctgtaggacacatccccagaagtgggatggctaggttggaactgatgcacgtacagtctgggtagatttgccaagcttcccacctcaggccatgccagcctgggctggcactacattcccaagaaggtccatttccccacagtctcaccaggctgcaggattcttcctgtcaggtaagaagcctgtcttggggcaattgttaagtttgcttttctgttayagagtyagtttgagcgtgttttcaaaagctgaagatcatttacacagcctttcctgcaaacactgtttttttcctttgcctgtttttcttatcagtttataggttccttgtatatgtgaaggaggttggttccttgtctgtgatgatttgcaaatrtttttrcatgcatcttttatttttgtttatgggcttttgccacatggaggctttgtgtttttctgtagttgagtagtctttttgtggcttctggtttggaaagcacatagagacaccaggacttgatgattgtaacagtcaggggcagctacattccttggcctttcactgcggctcacggtctggtatgggccccctgtacgtcctctccccattgtacagaggagaaaactgaggctyagtcayttgcccagagcacaccgccaaagtcacagatagtctctgccactcccctgcctccaccaccgtgggggaatttggcacctgctccctagtgggctctcctccccaggatatgcagtcagatgaaatgtggccaagtcaggattcgtgctgggcccactcccacctgctgcctgcacacctacaggctcagcattcagcaccccattaaagcccagtgggggctctgttcaaacactgcctgagtcctgcagtatggcgtcgtggcagagcatggacagatggccttgcctggtcccggctccaccgcttccaagtccatcacacaggggtccctggaggtttggggtaaggattgagtgtcccagtgcatgtggagcacagagatcagagcttgcacaagagaagcacacacaggtgtctgtgttcttggctgcagcccgcrtgggccaaggagttcagatccagtgccccccacctcccctttcctgccgccatgctctgtaggcttggcccctcctgctgtgatcctgatcacagccttccaccctagagaattaatcacagatccaggccaaggttctcccacaaaaacaagcatcatgtcggttacaagagcaagaaactggcctcaacttggcgagcttcaacgggggtccagcagcggcccagagcagcttccaggagtacgtggggggagtgcgtggtgctctgccttgttctgcggctgtctgaacagtctcstgcctctgcactcagttcagcctccaaacactgagtgcccactctgcacaagatactttgttgaggcagtgagataacacaggacccacytcctgcctctaagtctaatgrgggagcaggaggagggcaaggacctgggcaggatgaggcagagagatgaatggaatggagccgcatctcaggcagttgcaattcctgcaggccaggggagagaccaggaggaaagggcaggttatgccagaatcagggccaggtgtggaggtgtgccccaagtgatcctcccacctctcaagcctcaggagacaggaggatggcttgagccctagaggttgaggctgcagtgagctatgttcatgacactgcactccagccttggcaacagagtgagaccctgtcttcaaaaaacaaaaacaagccccagaatcagtgggtagaagactcggggcaggggagaagaccacccacctgctgctccttcagctggaaragctggactgccccaggctgggaggaactctgtaaggactcactagaagcttctgaagtgatcaggccactggaggacaagttgagggctgggtcacaaaagtgagtycaggagggcagtgagagtcactcaaggtcacaggtcacgctggcacgcctggcaggcagcctgggagagataggagtcccggctctgcaggtggagacatcgcagagggccttgggcatccaggaggatggcagtgccataggcgacgctgctgcggcctggccgtgtggagcactgcactcctaggaagcaggaaatggctgttcacaggaacccacaggccaccggctccagctttgacctgggaagctgtttcaggcaggtggagaggatgaggtttgaggagcagagggaagagctgctgagggggtgggcgctgggcagtcgggaggcgaaggcaggagatggcttgagccctagaggtcgaggctgcagtgagctatgttcatgacactgcactccagccttggcaacaaagcaagaccctgtctccaaaaaaaaaaaaaaaaaaaaaaaaaaacaaaacaaaaaacagaatcaagaatcagtgactaggagactcagggggaatgggacaagaccccttagcctggggatatgttagtcccggaccagactgagcctggccagtgtgtgacggaggtgggagccactggaggggaggaggacccaggttcagggccagggttagaggggcgagcccggggagccggcgcagcctgtccagcacagggggtgcagaatggcaggagaggggatcacaggctgcaggggagcagcacagcccctgtgccctcctgccctttggctccaccctgtcccacagccatccctggtggtggggaggggcttcaggtaggaaggttctaagcttagcctgcatggccccctgtgggggagagccacctccagagggcatgggaagcagattgccgttcattctccatcacctgcccacattcctgcctctgggacattgaggggctggagtgggctggggtgtgtgggagacagaagcagagaaaggctcctcattctccctggagcctcccacgctcacagcccctccccagggaacgcctctgaggcacaggggaggaggcgctgcttcctctgcagctcctcgccgtctgcaggcgccttcacgcgtgtgtgtgggcacatgtatgtgtgaacattcgtgcgtactctgtgttcgtccacctgcctctccccgtgccctttctcctgccctcttcttggctgtctcctgctcttccctccttcctggtcctccttgcctttcccttgccctgctcagaccccggaggtggcagatcttagacccagagagagccttgaggtccctgttcctgcccccttcatggcttgattctccacctcagctgggacaggagcacccagcctaccaggcactggtccagttcccacacaggctcatggctgcagtgcccaggaaggccgggactcctgcaaacccatgtcattcccaccacaatgccctctgcaggggagccacataaagaggcctggtccttggtgcaggcatctggagagggctgcctcccccaggcctcccgcagtgcatgtccgtctgctctggggagggaattggctgatatcccaatctgtctaggggacaccatcacctggggcatcagagttctcatgcccagctggtgctgtgcctggggactagaagggctggtgctgcgtggggtcaagaggtttacctgataaaccggtaagggatgccctcttcccccagtagacttgggaggtgcctcactcccagggtgcctccgtcactctgtcagggatgctgttgtgcaggcttcagtcagcaggctctcatcggggcagcctctcctttgggcagaggctgataggaccaaagaggtttctagaggacttgtgggtggaccaagcctctgtcctgtccctggaggaacccaggcctggggtgttgtggtccccagctgagtggagactgtgcctgtgctgagcttgggtagaggaggacaagaactaggccaggcgcggtggctcacacctgtaatcccagcactttgggaagccgaggagggtggatcatgaggtcaggagatcgagaccagtctggccaactttgagaaaccctgtctccattaaaaacacaaaaaaattagctgggcatggtggcacgcccctgtagtcacagctactcaggaggctgaggcaggagaatcacttgaacccaggaggcagaggttgtagtgagccaagatcgtgccacttcactccagccaggtgacagagcgagactctgtctcaaaaaaaaaaaaaaaaaagaactgggcgggcacaggctgccgtcagggcctcgctcaggcttccctgctgtgtgaccactcacgtcacatgctccatcttggcccagcagctttcagggcagagacggtgtccccgagctagagacagggaagcagaaggatctgctgtctgtgtcgggctcgcaagcctcgtgagtgcctccctgacccagaatgctgcccaggggcgcaggcaccgctaggcggcctcaggtggtccgttcatttcaccattcctgcaactaaaggacttgtgggttgtgtataatttctcactgtttttgatgagcctcgtttgggtgcatctctgagcctcctggctttgttccagtgctgcggctttgaatgctgctgtcttagaagcagctgtgcctctgctcaggtagcagcagggggcttcacgccccatccccccggccctgcccccaactctggctgtgtttctgcaggatgagaaggcgcgcattgaagcattgggtggctttgtgtctcacatggactgctggagagtcaacgggaccctggccgtctccagagccatcggtgagagccaaagaggccgacccaagtgggagaaggtctctcggaagcccaggcctcgagtgtggcccgcggctcaccaggggttcagggaggcagtgtgatgggccgagggggatttgtcatgcactggggtgataccctcgtagtgtgaagggaacagggcagattcagagactgcagcaccagtgtctgagtgtaagttacactgtatgttattatctcacctaaaacagctcctacaaatctcatagaaacctgtggctcaccaccctatgggctggaagtagagcttccaatattccggaaatgaggtttatcctcctcccgcgttcatgctgacaatccttttttctcttttgggaaaaaagtgggttcgctgggcgcggtggctcacgcctgtaatcccagcactttgggaggccgaggtgggtggatcacctgaggtcgggagttcgagaccagcctgatgaaaccccatgtctactaaaaaaaaaatacaaaaaattagccaggcatggtagtgagcccctgtaattccagctattcagaaggctgaggcaggagaatcacttgaacccagaaggcggaggttgcagtgagctgagatcgcgccactccactccagcctggataacgaggaaaactctgtctcaaaaaataataataaaaataaataaaaattttaaaaagtaatgggtctggctgggcatgctggctcacgcctgtaatcccagcactttgggaggccaaggtgggcggatcacctgagatcgggagttcgagaccagcctggccaacatggtgaaaccccttctctacaaaaaatacaaagttagccaggtgtggtggcacgcgcctgtaatctcagttacttgggaggctgagggaggagaagtgcttgaacccagaggcggaggttacagtaagcggagatcgtgccactgcactccagcctgggcaacagagccagactgtgtctcaaaaaaaaaaaaaaaagtagctgggcgcggtggctcacgcctgtaatcccagcactttgggaggccaaggcgggtggatcacctgaggtcaggagttcgagaccagcctgaccaacatggtgaaaccccatctctactaaaaatacaaaaaacattagccgggcgtggtggtgcctgcctgtaatcgcagctacttgggatgctgaggcagcaggatcacctgaaccctggaggtggaggttgcggtgagccaagattgcaccattgcactgcagcctgggcgacaagagcgaaactccatctcaaaaaaaaaaaaaaaaagtgggtccagcctgcatctcattgtctcagcatgcggtcagtgccgggtctcaggctgtgggcactgtgaccacacctccttcctggtacttagaaaatctctccctccccagctgattgccagggatttggcacctacccctctgaaacattctgtcctttttggcagatgtggcaccttcttgacagcccatcctcaggctgtgtctttccttgtgtctctggacactccaggaagtgaggccaggatgggacggctagggcagagaaagagggagctcggcctggtgtggtggctcatgcctgtaatcccagcactttgggaggctgaggtgggcagatcacaaggtcaagagatcgagaccatcttggccaacatggtgaaaccccatctctactaaaatacaaaaaaaaaaaaaaacaattagctgggcatggtggcgcgagcctgtaatcccagctactcgggaggctgaggcaggggaatcgcttgaacccaggaggcagaggttgcagtgagctgagatcgcgccactgcagcctggcgacagagcaagactccatctcaaaaaagaaaaaagaaaaaaagggggagctcacaggccaaggtcaggggtttccgttcccaggcaagtgggaagtactgggcagtttgcataagggagcaacagaccccagaccccatgagagcaggttggtctctgtccctgcaggatgtgaggtctaggcctgggtaggtggggaggaagctgtggacaccgtggtcctctgacccgggctcttctccgcctgtccaggggatgtcttccagaagccctacgtgtctggggaggccgatgcagcttcccgggcgctgacgggctccgaggactacctgctgcttgcctgtgatggcttctttgacgtcgtaccccaccaggaagttgttggcctggtccagagccacctgaccaggcagcagggcagcgggctccgtgtcgccgaggagctggtggctgcggcccgggagcggggctcccacgacaacatcacggtcatggtggtcttcctcagggacccccaagagctgctggagggcgggaaccagggagaaggggacccccaggcagaagggaggaggcaggacttgccctccagccttccagaacctgagacccaggctccaccaagaagctaggtggtttccaggcccctgccctccccttcctcccatccttgtccttctctccctcagaagcctcaggacccaacaggtggcaggcagtggacagggtgcccgccccacagtgctttccccagcaccccagagccagtcgggacaccccccgcagcccgtcctggtggctgtggaactgcactgggtggcgggcagatggtggaaggcagcttaggagacctcaccaaagagaagatggaccggctcttgctcccagctcctattaggcccggggtgggaccagaggtcataggtgcccaacggcagccaaaccaaagacactggtgtgcatggggcagcatggttgtgcacgtgggaccctggggcggacccaggagccaaactcttgaagcaccccctgggtcaggcccagcagcggagtggccagccccagtttcccattgctcctctctgcggccagggccaggtgggttcatatttacagatatgcccagccagtcctggtcggccacaccagtgtcccaaagaggagagcgcagcagagccaggggtctgttctgtagcagccacccccctgcccccactccagggcagccatgatgtgcttgggcccaccagggccttccgggctgctctcttccctgagcccggaaccggcgacgcacatgtgtcttttgttggtgtgtttgtttttttccagggaggtctaattccgaagcagtattccaggttttctctttgttttatcagtgccaagatgacctgttgtgtcatataatttaagcagagcttagcatttattttattctttagaaaacttaagtatttacttttttaaagctatttttcaaggaacctttttttgcagtattattgaatttattttctaaatcaggattgaaacaggaacttttccaggtggtgttaataagccattcaagtgccttacacagctttgaagaaactaggactgcagtgggctcggataggcccattgaggtttttagaaaagcaggatttgttttgttagggaggcatgattttggtgagatctttctggaagagttttccgcctctttgtgatgctgaacacccccaaggttctcccctccccccgctg
